United States Patent Application Publication US 2013/0096032 A1 - sequence listing, part 35

SEQ ID NO: 1233 - DNA, 107214 bp, Arabidopsis thaliana
gaattcgcttttgagccttcttcttctccttcactctagaaaacaaagtatataaccatgcatcaatatcacagagtaaccaattaatcaagctatcaaattcaaaaaaatatcacaaaacatggactccaatcctaatattgcacagtcaaaacaaccacggaaaataaaaaagagagtttaaaataaaacgcaattaacttgaacatctaaccaaaaaaaattgttacttgacttcaaatgcttgctataacgttttcattaaaatcatccattttacattgctagaacattttcatccatcttttaagtgaaaaccctacatacggaacatcttatgaaacaacgattgacgagacaagaattgttaaaaaaatcagagtcttttttaataactttgctagatagatactatgtagattaacatcattaaaacgtgagacgctttttgacctaacattagtataattaaaaaagaaaaggaaaggacgaggagaaaaagaagatgtagagtgcacgctaatatcacagccgctattgcggcggtgttcctcccattcctccatcatcattattatttactccaactgccaccgacgattctttacttaattaccaatttctccttccctctccaaaacttctaatgtactactgtacggacgaactcatcactctctatctttcttgcgatgccaaagaaattactcaaaagaaagaaaataaatgagagaaaaaatggggcttttggctttggcctcaagataaaactaaaaccctccccaccaccaacactaagataatgaagtaaattacgatcggacccctgcaaacaaaaacacacacgtgtttctcgtctcagtaaaaaaaactcacggtgtctccggtggtggtgttttctcggcggaggcggttgagttctcggccggatcttcacttgaacttgaggtagctgagggattattattagtagaggtaacggcaacggaaacggcggcggatgaggaacaagaagaagtgacggtggtaggtttgactccggtggtttgtgttaaatcggagtcgaatctgagactgtgaggatgatcggaggagtggtggaggttccaaccgaagtcagagaggatattggaagtgtctcggtcgaagaagtcagaatcttgagctgtgagtgtgagttctctccaagcagagtcgtcgttgctcagatcgggattatcaggatcgttcatgatgattgatcggcgagagaagtagtgataagagaagatagagaaagagaggtagagagagaaaaagagaggagctagggtttgttcttgattggaagagaaagaaagaaagaaagaaagaaaagagagtgaaaaaaaaactttgaaacccgttaaagtgcagtgtctcgtcaaggaccgatctcagactctctctctctttgtctatacgagagattcttttaatttatttaatttttggaaattgcgtaaacacaaaatatattaataataattcaagagagagagggaaaaaaaagaagagaaagttgaaaaaatggaacgtcaacgtcaaaagggtcaagtgaaacggaacgggaggctgctagtagcggagaaagtgagaggcccacgtctactttttgagtcctatagatcgacgcctatttttagactcggatttgcatttactcttcaattaacatagatgatgagacttctttcactattgaaattggtaccactaatccaattgtccaaagaaggacgattagcaagatttgttcgttttatagttgttggttcatcgagacttttgtttttatgtatctactactattagtcgatgttactgttgcaactatgaaacaaacctaattgagttattggtcattgttgatgtcgtgactcgtgagcgattacgaaacaaacatactatcagaaccctagttcgatctggtataatttttgttgtatgagtccatgggattcctttttgtggaagaaaagaagcttcaacttaaaaataccacctacttgtttgtggttcggatgactgatgatgcgaggataaaaaagcataattttttttttttttttttatgaaatgaggtataattgaaaatgaataaagtatatttaaattttgattgaaaattagttagaaagtaaataattggtttctgcgtgttgtccgtgttggatatgacaagaatctagcgaatgtaaaccacaaacaattaaccggccacgtggaaattcttaatcctcataagtcatatatgataattatcttataatcatattcacatgttattccttatttatattcccataattgcaatccatcaaacaaacgtttccggtcgcactcagactcaaacaaccatatcttcgagattcatgtaaacgttccctgtggaaaaactaaacaacatcgtcttttaaataaaaaagtgtctataaaatcagcagatgaatcgatttttgtttaaatacatgcacggattaaaacgagacacatgtctacgtgatgtctaaccattattagaatattgttgaaatcatgtaacatatgtaccacacgctactacgctaacaacgtatatatagaatcatagatacagctgtaatacaagttgtgttttaaaattatgattatagaaaaacagttaactttgtccatatacacttttgtgaagatatgtggatatgaataatttaggttcacatgtgttttttaatcaaagaattaagtatcaatacacatctaaatagcaacattattctttaccatttttgggtttggtctatcgatctcggtgctattataacgctagcatctacgtcgagaatcgtttgtgcgtacacgcaagagggacacctacttgtatttgcacaatccatctatatcctcgtaggccctttgattcgatatacatatcctcgataaattataaatagtggattatgaataggaagtatcaataatggtcctctctaaaaaaaaaaaggtatcaataatgggagcaaatcatgttagaaatcaaatcaacataaatattgatttgtaaatttattatatgatataaaccgttaacttgattactaattaaatggagtaagttttttagtttagctataaaaagactgacctatgttttttatatatcatttaaatttgttctcagttctaatgtgatatatgtaaaaaggaaaataaaatgattcaacaaaaccggtacaacgcatagaaaatatggtattgtcatctatttacatatcactgtttcttaccaaaaacagaccattatttgtttttgtaccactatttctcactactatatctcttaccgattaatagtatagatgcaatctcttattgttaaacattttttttaccgattaatttccattgatttatacttcataatcttatatgctcagtttttttttttatcatttctgatttataacttatacacgcatattaataagttggaattcaaattgtgataaatagtgttgcggctacaagcccccgtcactagcagctacaaaaactacgtttcctcatatcattcttcataaagtgtaaacctaattgaacatgaatgaaatcattatttataaatgaatacatcaaatgcgagcaatttgttattcgactattttgtatcaaaaaagaaaataattaattgttctgtttgtttgtgtttcacattttggttagacttcaaacactattacaagccttttttttatcgaaaacactattacaagactttttttcatagaattttcttttgcaaaagttaatggatgaatccaaattttataaacgtttttttttttttgtaaaatctacccgtaatcacatatacacaaatgactacgcgatactttctaaataatgagatcagtacgcgtcgacaagagtgggggccatggtgcaagatcgagtcataaagtgacataagtcaagtcaggagcgatgaaccttgaactccgaattccatcacaaaatttcatggaattttctaacgcaaattaaattttctcttaattaacatctaatcatcattctatttaacattataaaatcaaattccatgttttcaagaaatcataatcattattgcaaatctagctaaaagagagatagtactagattgcgaatcatccatgattcatgattctaaaacggaccacgtttgctcctttctcgaaaacgacactcacgtttacaattcaattagacttggaccaacacccttgtatcttgtgggtaccttttactctttgtaatctcatgtaaaacacttaattttactaatgaaatgaatggaggagagtcaaaaagaaactcattatacttggggccaaatctatatatatcggaatgggccgtactaactgtgagcccataaaggtccataagtcacctctagtatttggcggcgaaatcttgtttcctggtattggtctcagactcttaagattaagaataaaattacaaaatgcattcacttatgtatagagtctacagagtacagactatagagatagaactaaaaaacattttgacacatggataatcttctctaacgggatcttcgtgattagtcttcgatctttatctttagttctctatctcagttggctctcctaacaaagagtatttgggtttggctccaacagatatccttcaccacctacaaataacaaaggcaatctctggttttactgttttggtgactcaaactcgaagcatttcgtaagtgaaggaagagatgttgcaaaaaacactgaagagtgaagataacttaaggatcacgaaaccacccaatataagcaacaatttaacttcttgttctgaccaatcttgtatttccatatctaaaacagtaaccattcacacttttgttctgaaacaaatcaattacagaaaaaaggaaatttatggttcggaatgtacaaggtcacggattcacatttatggatatggaaattgtaactttccgataaagacccatctttcaatttcccctattttaccttgtttttttaacctagattttttctcataataaatcatacgtaacgtctcaattgatgtagcagcattaaacactatatttccatttcactcactatctttccttctttcacaactttctttttccaagtatctctctctctattagacaacaacaccacaagacaatcgaagatctctctctctctctccacaacgatgaagactaaccggaaccgtccgatcaacatcctcatcgtcttcttccttcttacgaccgcaagagcagcaacaagaaactggaccaaccgaactcaccgaaccgtccctaaggttcaacacgcgtactacgcatatcctcaccgttcatgcgaatctttctctcgtccatacgcacgctctatgtgcattgagctcgaaagaatccacagaagcagtcgacaaccgcttttctctcctccgcctcctccgacggagattgatcaaaggtacggcgtcgagaaaagacttgttccctccggtccaaacccacttcacaactgatgaaacccttcttgtgaagaaaaggagctagctagggttcttctcaattttcttgtaaatctttcttctttgtattactttcttgatctgtttgtattgcgcaattactacgtaatgaggaaaactagtactatttccacgcttgtttttgggcttatcgattgtgaaaatagggcagaaacaagcttggaaatagtttatttgccaaggatcttgatcttgtgcttcacttccttgttattactgcatcaaaaatcttattttaaaacaaaacggtagaaagttaagaaggtctctccatacattttttttgattgagacaggactcaggaggttgagatttgagaaacaaaagaaacacatgaattccattaatttgggagctgaacctctctcatgctttggagtattaaatgaggatgggctttatgatttatatgggccttcacaattggatatgatggaattctatggcccaaaatatcctcctccaaccggtaagattaatgttggccataggaaggtattgagatcattgaaaaattaaagaactctggtttctagatagctctttctgtcttagattttgttaggttgttatgatggtttcgtaataaagagaagcttaatttttaaatgatatttggaaaaaaagtattggttttgtaaactatatgcatgaattgcttaacaaatcccacataaacttataaagcttctcttaggagacaaggaatctatctaaacggggtaatctctttgacttactaagagatcttaaactagaaaccctttgtgagaccctaagcttatgacttgacttaagggaaaggtattgcttaagcagcctttcacaaactaaaccttccttgtctccaaatgcaatatctatctatatattagttgatggtactctccaaaatttcaagattcgattctgaacaaactgtagcgtcatgaacgaatccacagtgcaacgagcgaaacctgaacatatggcagctgttgtggatcaatggaaggaaacagagataagcaaatcgagaaagaagtgtgtgttatgttttctttcttggttgtcctgtttaaatgttgctaagaggctaatgggtttaagattttttcaggtacgagaagctaagtgagaagattgtgtcatgggaagataagaagaggaaaaaggcaaagagaaaacttcatagaacagaggtgcctcttcttttctttttcctccactttcctttggttccaaaaactaatccttaaataactatacaaccaatcaatgtggtgaatgtgcagagaagtgtagagaaaacaaagttgaaggcgacccagaggttcagggacgaaaatgaacgtattgagattatcgttgcaagtgcaagagcacatgcgtatgagagtcgaataaaagaagagttgaaggttaaggagaaagcaaacctcatgagaacaactggtaggaaaccctctacatgcctctgaatcctgcaagttgcaggaaatgtaaaaccaaacattctttactgctgataactattgtcgaacatgtaaaatgcagacacaaatataaggtgtttttatctatttaagtataagagagataacacacatgtgatccattatggcacaaatctgaaaaccaaaactttagacagttgcacaacaatactaaaaccaagagttcaaaatcacaaatacaatgctcaatcttgcaataaacaatattataagaaatgtgcagaactaccaaaaatcataaaaacttcttctgagttctgaccatcaaaggctccaaagtgctaaaaaagggttccatagtgaactacaatcacccagaatgggccgagcaaccaataataggagttatgagttcagcaccagtctcatgatgatgttatttcatttaccaacctttctagaataggataagcaaaatatagtacaagaccagctggaactgcgaaaagtattgtgaggaggaagtaaagggcaagaattatgaggctaccaggtatagcaaagaatacgatcagaaggaagatgatcacaaacggaaacttggaggtgaaagagatgaaaaaatcaagagatttgtgaaaggagaagagttgtctgcttggttggttactgtggtcatgatgtggcaaaaggtctgtagactggttacgcaataaaggcctcgcaaccagattgttgttgctgctgtggtttcccagagacatgctacacctcggagtcggagccgattgctggttatcagtgaccaaggaaccatgacttgtcctgtcaccatgacttgtcctgtcaccattcagactctcaaccatccagagaaggaagaaattcttccgagggaactttagattacccttgtaaacaatcctgaacgaaagcaactgacaccacgggcacgagacgaaaaacggaatccgaatatcttggcttgagagtctcaagacagcagattggagaccaaagacacaattctggcaaagagtatgaccacaccataacacataaggaacattctcaacaatgttgaaagattcccaacatatgggacattctaatccctcttcatccctgctaatatttgaaacctcatcatctgagcattgagaggatgcttgagctgaatctttaggggacttctttaaccccatacttccaatgacattcgacgcaaagccccacattttgatcaaacttgaaactgagaatgatcaccaaactttataaaacctgagccaatgtaccaacatttacccagtaaccttcccagattgaaaagagcttctttgaccaatacccatcattttaaagaacctggataacaagtgcaaaaatcatagatagtttagcaaacattatatatgaaaaaattcacaaaaacacaaactttcatgttattgggacatgaacaagattacagatcagaagaatggcaaaacaaaatgtgcccacgaaagctcaatgtacaatacatggtaactccccaatcaaaatcaaaacaaaggttaatgaaacctataaataaacaggcatctagatgcagaagacgcaagagatcaatctaggtttaaaaattcgatttttaagttccgtaacagatgaaaataatcggagattgaagtttacttaccgttaaatctttcaaaatcagatacgcagatgcattaaagaggagatcgaaacggggaagagaagaataaagcctctctctttttctctctctcgttgatccgccgtgttagctttttaatggcaaaacgctaaagaaaatatcggagcaaacgacgaaaacgacaacgtttagttggtagctcagactcagagagtattgaccaatgtgcacgtgccatcggtgtgacctccgtgacggttaaatatttttcacggctctgacttgttttaattattcttttcttaaaccttcttgatgatttagaaggtttcgaggtttgaggtatattcgcttaaacgacaactcaattttttgtcgtcgtagctggttttgatgtttccgatacttcatcgatccacagttgtagaaaattcttcgacatgaagttgaaattctgattagggtcttcctcgattcgcttttggtgaatcaaatttctttaatttcaggtgaatccttaaaaatctcacgacctctccgtttcttaattttttggtttttgtgataaaagctcaaggctttagattagaattatctgaaagttttcatctttttttttctttagctcttgtttttgtaacactttctggtttgtagactatggttgattttggaatttttagatttttgattgcattagtacgatctgattatctaatttcgatgattgtcgacgtaatttgacttgggcattgagaatttccaaactttctctgactgaaatttcatttttccttcatggaaatgattcttcctagttacttgttttgtctgtcttccatttccagtgaatacgcttttgacaggaggaccatactaagtcttgggaaaaccctcttcatagtgggtttgatctacaatgatgtatcagacaattcccacggcaccaaccattcgtggtggaactccaacagagagtggtgattacgttgtgactttggatcagattccacggtggagtgatgttgagcagagatcatctttggaggatgagacaggagatccagaacattcgaatccgcgctacgcaaaccctttggcttcgtcttccgaagcagggagcagcgggaatgggatggtatctaagtttcctgttgatcacgagataaactctagaatatacctttggagaggggaaccttggaaccttgaggttgatgctgttgtaaattcgacaaatgaggtaagatgatttcaaggaattatatttgcttgcgagtaagtaagtttctcttaatgtgcgtctgatgatatggttaaaatttcttggtattggaggacagaacttggatgaggcacatagcagtcctggtctacatgtggctgctggacctggccttgcagagcaatgtgctacattggtataaacactttctttcgctaatttctaaaacaagatttttatatatactattgaaaaaaacattatattatgtattgtcttctattgttgcgtgaaagaggatttttcgcttattctttgtttcttggcagggtggatgcaggacagggatggcgaaagtaacaaatgcctatgatctaccagcgaggtaattggtgatggagaagacggtttaaaataaattctttacttattagaggactgaaaaagaaagaaattgtgctccttgaatctagtctctgctctatctatcaactatccttgtccatatgatagagcttctccattgttgactatgtacagttttttaatgctgtgtgagtactacatcctatgatttctgaggaacttctcatttctcaaaataccaagcattctgtgcgactttaatatggactgtgaaatagatttgtgccttagtccccaactcaaaaaaatgtgttttttgtttgtcttttgttcaggagggttatccatacagtaggacccaagtatgcagtaaagtatcatacagctgctgagaatgctctaagtcactgctatagatcttgtctggaacttctcatagatagtgggctacaaaggtgtgtgaagtgaaattctagttttttcttatttttttgcaacaatcaaattctattgtagttttgtgattatctttgtatcctgaactcaagaacttgattttggtctgcatacaacattgcagtatcgctctgggctgtatatacacagaagccaaaaactatccccgagaaccagctgctcatgttgccataagtaagatagttcttctcttcttgaacagtctcttgcttttgatcaaatgactgtcaagtttccaactcgtgggtgtgcggttttcaggaactgttcgccgctttctagagaagcaaaaggataaaatcagtgccgttgttttctgtaccaccacatcctctgatacggagatatacaaacggtatcttaattcgctgcaactggttttcaagaacctttacttattttgtgtaatcctagttatcgatttgctcattttcagttttgagaacctttgctttcagaattatgcccataaagaccttagcatgtagaaatgctggcaatgtatataccataacttcttatatttgaggggtgcagaagcaatgccgaccattgctaaaaatttgactctctaaatgtagattacttccactttactttcctcgagatgaacatgaggaagaggttgccatatcaaagctcccggctgatgttggagatgaaaatggtgagacggttatagacgaacgtaaaatcagaatacaggcgctgccaaataaacctccacccagatcttttccaactccactcgagcgcccttctactgatcttactttgttacgcaggttagtgaactcttgactgctgcagtctttgcagtttattgtctcactacttttcactcaattaatagccatatgatttcaggaactcgaatcatcttgattcgtatttggatcctgccttcatgtccttgattaaggatccagatgaaaggcgcaaagaacaatgggagaagactgcacaagcacaaagtggattcaattttgttaaattgctaggatttggtgatctaggaggaccccctctctctgctgcagaggaatactcacttcattcgcgatacctagcgaaagctaattcaatcaacctttccgagattgcagagatgaaaattgtgtatgtccttggttttctttccctcgctttcccttgcataagttcactttatatgcccttgagccaatgcctaatggaacagacattgacaaagcccgttctgttttctttcttcagctatcgtggtggtgttgacaccgagggtcatcctgtaatggttgttgtaggagctcactttttgctgcgatgtcttgatctggagcgttttgtactttatgttattaaggtaagcacacaatcacatacctcgatggttctctaactcactgcagttctgtctcaaaactaacatacggtgcaaatgtacaggaatttgaacctgtgatacaaaagccttattcgattgtctactttcattctgcagcatcgttacaagtgtaagttgattcttaatactgtttatcggaaaaagactcctgtgctttataaacttcactaacttctttttgcttttacgggtttgaatttgcaatgtgaatcaacagccaaccagatttgggatggatgaaaagattagaacagatacttggtcgaaaacaccagcgtaaccttcaggtatgaaatcacaaacctactacacctcatagaggaaggttcctccttgtcctcattctgatcatctctgcttcgtccaggcaatctatgttcttcatccaactttccacttgaaggctacaatcttaacgatgcaatttttcgtggataatgtggtaaagtcctgaattatttcaaagtcccaaccttttccgccgatagactcgagtcattctaaagaagtctaatttgctgtcattttcttgttccatttcgaaaaatccgataaggtatggaagaaagttgtatatgcagaccgacttctgcagctgttcaaatacgttcctcgtgagcagctgacaatcccagactttgttttccagtaagttcactctactcctcacactctagtaacgttattcagttctcgatttgttttacttactagaccttgtgtgaaaaattgcaggcatgatcttgaagttaacggaggaaaaggtctaatcgttgacccaagaacaaaatacgtttatcaacggccatgaaccaaaatcaaagaccgttactttattcagtacttgtatgtttgcttgtgaaatatttcttcattctttcatgcttatcttctcaagatgatcctgggagcaaataaagtcttcttcttcttctaatgtaatctaaagtttgaatctttttgtttataaatccattttctcagcacaaaaaaaaagccaaagtcttctctcttttctctgtttgtcaatgttcttgttcagctgaagatgacgcagtacatgccattgtttagatcatgctcgagcttacgattagtaagtcagcttcatgctcacctacttgtcaccggtcgtctccgtcgtgaccctcttccagtgacgaagctcattgaatcatacgctttcatgggttctccagattcgtctaggctcgtctttgaagcttttccttaccctgattccttcatgtacggtgttctcatcaaatgcaacgtctggtgtcatttactcgacgccgccattgatctgtaccataggttggtttcggagacgacccaaatcagtaagtttgtgtttccgtctgttttgagggcttgtgcgggttcgagggagcatctgagtgttggtgggaaagtccatgggagaattatcaagggcggtgtagacgacgacgctgtgatagagacgtctctgttgtgtatgtatggtcaaactgggaatttaagtgatgcagagaaggtgttcgatggaatgcctgtgagagaccttgtggcttggagtactcttgtttctagctgtctcgagaatggtgaggtggtgaaagcattgaggatgtttaagtgtatggtggatgatggtgttgagcccgatgctgtgacgatgatcagcgttgtagaaggatgtgctgagcttggatgtttgaggatcgctagatcagttcatggccagataacgaggaaaatgtttgatttagatgaaacattatgcaattctctgcttacaatgtacagtaagtgtggggatttgcttagctcggagagaatctttgagaagatcgccaagaagaatgctgtttcgtggacagccatgatttctagttacaaccgtggcgagttctctgaaaaggcattgagaagtttcagtgagatgataaagtctggaattgagcctaatttggttaccctttatagtgttttgagctcttgtggtttgatagggttgattagagaaggtaagtcggtccatggttttgcagttagacgagagctggatccgaattacgagtcgctttctctggccttagttgagctgtacgctgaatgcgggaaactaagcgactgtgagacagttttacgtgtggttagtgatagaaatattgtcgcatggaactctcttatatctctatatgcacacagaggtatggtgattcaagcattgggcttgtttagacagatggtgacacagagaataaaaccagacgcattcactttggccagctcaatctcagcatgcgagaatgctggtttagttccgctagggaaacagattcacggacatgttataaggacagatgtttcagatgagtttgtgcagaactcgttgatagacatgtactctaaaagcggatctgtggattcagcaagcacagtgtttaatcaaatcaagcataggagcgttgtgacatggaactcaatgctctgcgggttttctcagaatggtaactctgtagaggcaattagcctcttcgactatatgtatcatagctatctcgagatgaatgaagttacatttttggcggttattcaagcatgctcaagcataggttcactggagaaagggaaatgggttcaccacaagctcattatttccggtttaaaggatcttttcactgatacagctctaatcgacatgtatgccaaatgtggagatctcaacgcagctgaaacagtcttcagggccatgtcgagtagaagcattgtgtcatggagtagtatgatcaatgcctatggaatgcacggacggataggatccgccatatctacattcaatcaaatggtggaatccggaacgaaacctaacgaagttgtcttcatgaacgttctctctgcttgtggtcactctggttccgttgaagaaggtaagtactactttaacttgatgaaaagttttggcgtatcaccaaactcagagcatttcgcctgtttcatcgaccttttgagccgttctggtgatctcaaagaagcatatagaaccatcaaggagatgccttttctagctgatgcttcagtttggggttctctggtcaatggatgcagaatccatcagaaaatggatatcatcaaagccattaaaaacgatctttcggatattgttacagatgatacgggatactacactctcttgtccaatatatatgctgaagaaggggaatgggaagaattcaggagactgagatcagctatgaagagttcgaatcttaagaaagttcctgggtacagcgcgattgagattgatcaaaaagttttcagatttggagctggtgaagaaaatcgtatccaaacagatgaaatctataggtttcttggaaatttgcagaatctaacgaatgaagaacatgtcgtagattcttagagccaatgtaggaagatatatattctttttgacccaatagaaaacagagatgcagattttgtaatgataaccaatcatgtgttttcttttctttggcccttataagagaggacaagatatacaaagagcaaccaacacccacaaacatggggttgattgacaataataaaacatcgatcgctgaaaatcagtttttgtccattgttacttgctctggttcttttccctctataatgttcctcaaattgtgaaatcggatttatttcgaaaagctttatgttaatagcactgttgggggagtacctgcagggcacctatgtcgccttggtcttctggttgcatttccccaccctgtaaggctcctatcttccagtcccaccatttgtacactactgttattcattggctgtgccaaagaggagcaaaccggagctctgtcaatgttgctgaccagtcgttttcttcctcggtttgagctccttcgggccattcctgagttccagttgtagcctgtggctttcataagtcccccaaacatctgaagatcttcggttacttcgagcctagacagagaagctagcccagggagaatatccctttggaaatcccgctttggtcttcctcgtctcgcttgtcctcttcttggcctattacttgtgatacccatagaacccgtcccatcaaatttcagatattcagggattaaaggctttggcatgtagtcttcttctttggtctgtgttaagttcagggtcattgcctcaaaataatcaaactcacctgaagaacattcttcacggcagccttcacagtctctggcttccaaacaagcatcaattttgctctctaaatcattgccacaagaagctattgtgttcacaaaccaagagagcggctccttgtcaactgcatcagtcgaagaggaagcagcttcatcagtattgcggcaatgataagacagtgagatagtgactatagcttctgctgctgcctcgatgagttcatccacagagtctccagcttcatctctcttctctggaaatttccctccttcttcttcactctcaagcgtcaagggagcttccacatttatcaaagtagttgcttttgtttccactcttggattagaacagaagccggaatcttcatcctcgctagcacagaaattcaagtcaatgtgctgcctgtgagtggcagctttattaccttcttccttgtccacaacaactccttcagaaaccgaggcttcacatggcaggttgatatcgaggtttatcttcaccaagttgtttactttcttgggttcattagagatacacacagaagaagttataagggaagggtgctcctcgcaaatagaaagcttctgagagataggaaaaccaagaatctttctacgactctgtgaattggccatttcaacatgtctcaagttggcgtcattagaacatgtaacagacctcaaaccattctgaggatgtacataatttgagctgtcacccatatcacgttcatccatgaattgatgatttgcagaagcattcaaatccaaaccaccattggtttttccatttttgttaaggggcttaggttttatccagggcaaaccagaagagcactcctgcttttttggtccttgaaggtttttaagactctgatgcatcacactctcacacaaagaaccattagtaactgccccttttgggccattgttaagatggttaaagtttactgatggaaaattaaaggcactttcctccgagaatgaagagaatccttggttaagcccgttagaatcacggcttctcatctctgcacttgagtctgctcgtacttgagtattaaaagtcaagaatggattcgcttgaagtggcaaaggtttctgaactgagctgctacttcggttctcccatgatgaaatccaatggctccaaggtctgacagattccgggcgatatccatgattcaagcttggaacatttgatgccacacttgattccacatagctatcatacgaaacctcaggattcctttgacgaacttcacatttgaaagatgctctttcgcccgataacttgctgtggtcagttgaagggtatcccagaggttgaaatgcactgttagaaagaacttgtaccgaatgggaaggcaggcataacttgtctcttggagtgctttttccgttccctttaacaatgcagcaatagagaaacatcagagactagaagataagcaaatagctactgtatcattaacacagtccacaaactaatctatgagcaacacgaccaaaatctcacctgcttctagaaccatccatccattttgactagtatttttttccacccactggccttgcacgtgtgaaatgtttgctccataaagagaatataagtccctggaagaagaagaaacaggtactgaatcttggcattggactggctcgttcaagtcagtaaatccatttgagttcttcataagcaaagaagatccagaagaatcgttccgatgagattcaaagaagatgttttcaccaacttcttttgactgctcataaggaggacaagtcgtattatcaccctctgtatggagatactcatctgcgggaagttgaagatcaatcattgttctcctaaccttgacaggtctaacctctaacaccttgttgtccttgccaacattgcaatcttgagaggtgcttccttcgccacatatcgagtttccgaaaagaaatcctcgtttaatcccacttcccggtgtaggctcattgttgttcaagtgatcaacaaagttctttcccttaacttcagccatcaaactcttctgtgttctatacaaacggtgaagctcataaacctgcattaatcaaaacaagatcaatcaaatttaacagacacataaaaaaccaaagcattcgagtaaaatgagaaacacgaacggcattattcaatacctgattcttaaatacagcttcatgttcaagcattgtttgtttcaaaaaatctctctcgtaagaatccgttggaggtctcgccgagaaaccattctgatactgcccataaggcaaagttttatcacctccacaatacattgaatagctacaagtattggaaatatcttcacttagatccctcattgaggacaagaagcttccacaatgaactgtttctcccattcctccagaaacaaaaacacaattcaaagctctattagccatagattcaaatcaacttaagtagtaaaaacagcaattaacaaatccagaaagtcaccgacgaacataataatcttatatgatttgatcaatcaatcaattcaataaaatgaatgaaactataacatctgagctgaatttagctctaaaattcacaagtagatgtagcaaaaaaaattcccagaaaattggagcctccattgaaggtgaagaagctgaattgaaaccgatcgttcattaaaaactcaaagtttactccaaaaactaattcaataaaccaaaaaaaaaaaaaaaaaaaaaaaatattcatgaagcgtacgatgaacagtaaaaagagaagagaagagaagagaaggctgtgattgatttcagtcaaaatgcttaaaaccattaaaattgatcagatactatataaaatcataatcagcttcgattaaatgtcataatgagagttttgatatacctcttctcagtttctcagacacaaatcgtctcggcgacaaagatttatgcgaaatgagaaagaaaaataaagaaatgaaaagtgtttttgtttttctgctgagataataatactaaaaataaggagcggaaagagagaaaaatctaagaggagagactaaatcacgaactccatgggatgggagagagaagaagaagaaagcttttagcttaagaatcaaatgatcatcatcatcatcatcgtcgacgtcgatccgctgggccaactatctctctctctctctctctgtatcatctgtcttcttctttatttttctctctatctacttctgattcttaaaacggagaaagcaaatataaacaaaagaatcacaccttttttattcttttctttttttttttcctttttttctctctttctattagagtgaagagagagagagagagagagtagttcggtgtagagagagaaaggagagagatcccgtaaaatatatatattttaattaaaattatactaaatgagaaaattacacgacgacgcttctcacaacagagagagactcgatatatttttgtcaacatctgttattcttttttttttttttttttttttttttctcttcgttaaaaattaaaagtgacttttctcatgagttttagctttaaatgcaacttaatttcaatgtattgttcttctaatcttttcattaaaatcgtatgaaaaatttaaataaattgggtttgcagatgtatatcatgattcatgagtaaaatagtaatcattagattttgttctatttcacacacttgctgtgaaaacaaacaaacaaacaaaaaaactgaaaagtttcgtacctacaatttgagtttaggtaaaatttattttcaacattaaattgtgttttccatgtaaatagactgtaattttcatcatgtatagcttttttattttcttttgagaaaataattatttatatagctatggttagatctttccatctctttgacctaagaaacgtcaaaatattctaggcgaatcaaataggaagctggataattttgtctcgttttatataattcagttgctttgtatatttggtgtgcacaaaacaaaaagatatgatttattaccttttaatatttttttaataatacatacctttaaatattgataaaagatatttatttaaaaaatcatcttgtaatttattattttttaccttttattgtaggtttgagttaaaatttgtgatatttgtgcgggtgttgaagttagagtggagtaaattccaaatcacaagtacaattttaccccctagactcgatcatttgggacattaattttagaatggagaaagctacacgatcaaagaataatcattttcttcattattaactttagaaaaacatttatgtatgctgtaaaaaaaaacatttacttttacggagtacaatagatcgagtttacgtctccatttgtttgctaaacataaaacgcgttgtttcattaattggacaaatcatatctttctcctttaatttgtacttgcattacctattaaaaaaagttaatgctaagttttagcattgatgttcaaattttatccacaaattagaaaacatgtttcttaacaacttcttgaaaactccaaagagataaacatttgaacatggaattgatgataaactaaaaaaatatttatttcacaaaaaaaaataatggttcacttcatatctcaatgatccaaaaccatacattttgatgaatgcaattatgtaacttacgacaattcgtagttcacctcccacgcccaaaacgattaaaccatcacacttgttctagccgtatatcgtatttagatttctataatccataaaccattataccatcttgccaaaagtgaattaggtatttaataatgtaaacaaaaaaagttattaggttcattagaaattttgctattagacaatcctaaaagatgctattagaaaataacaaattttttgtataagctttaaacgttacatttaagaatccatcgttttactttaacgcctagtgtacttttaaaattctattatattcacttgatgttctgataaacaaaagttaaaaatatgccaatatttaactttgcttaaaaacaatatgaaatccgaaaccacgagataatatatggtccaaaaattaaaatagatgaaattcatctttgtccgcatgtatctgaaattgtcttgcgatttctttaaataccggttagacaaatgtgacaactatttgtctatttgttttcaattttccctgattggaataaaaaatgtttctatatacactgagcattaaaatcatatgcctatgaccaatatacaaattatatcctcccatgacttctccttattttataaaagaacactagtttgatgttaaaaagtcatgactttttcttaattccattatacgaatattattcttttcagaatattaagatcgagaagcttctgctttctttcgaacaaaatattcaaaaagatacataattggctaacaaatttagtgtaatcagaaactatatgtggtaattgaatattgtctccatgctttgtctcatgtacactaacacaagacttgaaatcttagttaacctctcctaaatgaagtaagaaaggataattaaagtaatgatagcaaaacccgaaaaagattagcttaacaaactcaatgacgttttaaaaagcttagacacttgataagattaagaccaacaagttaccctaaattacaagtttgatgataacaatacttaatttctaaatgaagcatcaattgtttaatgtttataaattaggttagatttaaagcttgaggggtccgaatgtcgacgcaactttgaggtttataagtttgaatgtggggtcaggaatttaatgaccttaattttgaagataattacggttttgggattgattttgtctacttttgtagttttgtttcttctgttcgttacagattggttgattttctacttaaacaaaatatcattaaaaaggcttcattgttgagattattacataaataggatcattcttctgaggaagcatattttctttcgaatttcgttacgtgtcataggtttgttggatatgaagatattattcaatctagatgttacatttgttatatagttttttaaaaaatcatcgaccgatagaatcatataagtcaacttggaatgtttaatgattatttaaacccatgtaccagttgtacaactacaaaccactggtatcaaacaaccatataaataaaacatatgtaattaaaatgattataaacactaacactaacggtaacgtgtttatgcattattaacacgttagaaaccgtatgaatttaatattttctctcttgtgtaaaataatcacaatgaccaaactttttcaagtacaaaatttattgtatctaacaaatggaataatgttattatgattgaaaagaaagattggctagatctagtggagaaaaagtagtaataagaagagataagactttaagtgcttcgtcttgtaaaccacaagtacatcatcatgtctttgagagagccgatgcaataattgattaaatgtttcgatggctctgatttattcgtttgactttacaaaaatgtaattagtttcgagcagagttacttgttctataatcgctaaataaccaataaaccaaggtgaaactcggtagcaccaacaccacgtccaactccgatgataacaataggtctttcgttactgttccaatccgacacgagcgatataattagagttatcgattcccaccactaatctgaaggcaacatcggaatcgacaagaactttttaacatttcatagcatagatagcaaattcagataatagcaaataagtaaaataaaaataaaaataaattatatataacaccaaaaacattttatttatttatgattgataacaaaattgtagaaacattaaacacgtgatattcttccacctatcctttctcgaccagataattttgtaacggattggatttttttgtgtcactatccgatttttatttttcctaactccgccgaatccgttcctctgtccttttctttctccactctctgtctctgtctcttcctcttttgattctccgatggaggctaagttactcaaacccgcgttttacaattccccaaacctcaatcttacgaattcttcaagactcatctcgcgattatcaatctggaacgataaatcaaaagttggactatcttctgggtctctcttcctccgtctctccgcagcttctccgatccggtaatgtgttccgtttatttaccgatcgtcttccattgatataaagaatcataaatcttgttttaaaccggagataacgaaaaaagccaccgcctttaatttgctttgtctgtctcgttgattaaggcattgatgtgatatgggcttattgcgtacagatactctagggggctactaagggtagatgagagtgagtatttgaaacttgaaagcattagacactctttgattcgtcaagaggacagtattatctttaatcttcttgaacgagctcagtatcgctacaacgctgatacttatgacgaggatgcctttactatggaagggtttcaaggatctttagttgagtttatggtcagagaaactgaaaagcttcacgcaaaggtcgaaactttatcagcaatagttgttcatagtttccgaaatctttctctttgttgatggtttgtttggttgaagttaggtggacaggtacaagagtcctgatgagcatccctttttcccacaatgcttgcctgaacctatccttcctcctattcaatacccacaggtgaattttggccttcaaagtagatcatatacttaataactagacatactcctacacagaacaatgcgtaactttgctcttctgtcttgcgactaaaccaggttttgcatcgttgcgccgaatcgataaacatcaacaagaaggtgtggaatatgtatttcaaacaccttctccccagactggtcaagccaggggatgacggtaattgtggttcagctgctctctgtgacacaatgtgtttgcaggcaagaagcttggcatgcatcattaacatatggctcaattaggagacttgaaactgaaaaaagtttgtttgcctctctttgcagatactttcaaagagaattcactttggtaaatttgttgctgaagccaagtttcgtgaaaatcctgctgcctatgaaacagctatcaaagaacaagtactctcattttgattcatgctaaataccttaccttattgcattatctgcaatcttcttttgtcattaactggcttgaatctttccaggaccggacacagctgatgcaacttctaacgtacgaaacggttgaagaagtagtcaagaagagagttgagatcaaagccagaatttttggtcaagacataacgattaacgacccagaaactgaagctgatccttcctacaaaatacaacctagcttagttgcaaaactctatggagaaaggatcatgcccctcacaaaggaagtccaaattgagtacttgcttagaagactggattaatgttttcaaagaaggaagcataacatttgtattgatcctatttttccgaaaaccataatgttgacataagctgcgcaagctagcaagtcaagttgattttattacagaaggacctaaacaaatgaacttgaatttgagttcactacaatgaatttatacttttgtagcatcagagtgaagctcctgcggattctcgaacaatctcgtaaatgcctattgcgttttcaatggccagtaaaaagataatgcaccattctaaaagatctgattgtcggttctgcatcacctcttggaggaaatgaatgttgtgctgcagatgaaaagagagatatgtaaaaaactcaaaaacatgattacagttaatgataacaaaatcaacctagtaatgtaataataatacctctataaactttagcttatagtctagatccccaaatctctgagagatctcgtactcttctcttaggtactcgtatatctgagcatatctagcttctctccaagcaatctcggatctatgagaaaacaagagaacatatgagtctcagcatatatatatagagatcatagaaaacaacaatataaagtgatttaacattagtagaatacctctcaaacaaaccaactttgagaatcacatcggctatattagaattcgccttccctacaagttggaagagctttttcctggtcattgtgaatgttccggttttcgccattgaacggtttatatcagcaaactcttccaccaacttgttaacctgagataaatacaaatctcaaatttaaccatatacttgtatcaattgacaacactgagaaggaacaagttacctgagaaacagagtaatccaaagcaatactttgtccgagcacactcccaattatacggatgctattagtatccaaagttttgagaacaatgtagtcagggccacctttcatttcctcaatcagcaaaggcttctccttcacagcataatctaacacaacaaagtccacaaaagatcagttcatttacaaagctatggtttcaagctaagtgctgtaagagaggacggatgctaaccatcttttctcatttctgtaagcaatccagaagcatgtctacgaacaatgtcgagataacggtcaacatcattatcatcaacattgaaaagaatagcagaaccatattgaaagacaaccatgaacttgcagttgcttacactctccctctcgtccaaactctgaagaaaggtaacaaagataaggtaaccaaaggcatgccatttgcattatactcaataatcaacagataagtaaacatagctaaactgtttctgaataaaacttacatagattccagaaggggtaaaatccgaaaatttgagggcaatataattagtagaacgtgaagtaggaggaacaacattgcataagttctcagcttgcattgccttcaaatcaatactgccaaaaccatagttctgagaaaccaaattataaatgaaaaacacataacagacttcaactttcaaactgtaaagattccaaattcaaaactttcactagtgagtcccaataccaaagatgtacatacctagtactgagaaaataggctttgatagggattttgcctagtgcttcctctgcctctgttccaaattcatagttttgatatgcatcattcgacccagaatcagagtcattgttgtaaatcgaaatcggagaagggaacgctgaaaagtgtcggaaattgagaaagcgagaagctaaaccaatcgttgggtgtttcgaaacacatggagaagaagaaaggtttagtctttttgaagaattgagtaattgattacgaagaagaagagcagctactgctctccatttacccattcaatgaaatcaaaattgaaattttttgtcctctgcaccagaatctctcgacttattatattagtcaatttgtattttggagagattgtcttttgatatcgaaagatatttggttacgaagaagccttggttctcgccgccggtgaccacagtcccctaatcaaatgatcgttttacttgtttcaaaacgactgtgttttttgtttaattaactaaaacgacagcggttcgtttaataaacttgtttcaaaaagtttaaaaccctcttgtagcattttcatattaagccaaaacaaaaacctaaaaccctatcttggaaaaatgttaagttagaaaagccctaatcttgtagccttggtttttgaagtttagaagaatgacgaatgtctagtccttaccaagtgttatgggattggaaaattctctagggtttcaatttttttccgagatcaatgcgatttatttgtaaaagttggaacaagtttatcaaaaagatcataattattgataaaacaccaataaccccgcatatagtcaattttgcagatttcttataaattaaactttaaaaaataattttataatccatcaaatttaaatactatttttttagaaggtccaatatatagtcaaactctactatatagggtaacgcgacttagtggaatcgaacctcgatagaaagacgaaatcaaatgaacttaaccacttgactaaaagcacatctctcaaatctaaaaactacttattcgtggtttatctataaaacttgaaatatttttgtcaaaagatcatatttttaataaaacagcaagaatgcaaatagtcatctttacggatattttgttagattgaagtttaaagaacaaatattacaatccatcaaatctgaaaactacttattagttatttgtggttgcctacagctttaccaataatgtgattttttataaagcttacattttgcttatagaaaacctttgaatgagttatagaaaacctttgaatgagttggtactattgtcgtcattcttctaatttctaaacttcaaacaccaaaagttgcaaagtagtttttttttgttgttttggtttaatattaaaatagatgatacgacatcggttaggcagttgttaaaacgctgtgtttcaagcctttaaacgacagcgtttcttaaagtgctcgatagccttttactttgtaagaagagtcgtcgtaatctcatttctcttttaactgagacgaaaaagattcacttctccggcgagcaatttcaagtttctcggtaatggcgatgtcttctggaactctcaggatctctgcgaccttagtatctccttatcatcatcaccaccgtaatcgcctctcattaccttcttcttcttccaaggtccgattttcttataattcttactctacgattcaaattttctcttcgctgcaatttgggatctggagctcgtgaaattcgccaccaaattaggagaacttagattactagcttcgatctttcgtttctatgtctgtgtggtttaggaagaatctgaaatgcgtcttttattggaacaatttcacaatttctctctagctctagatttgcttgttcatcgcgagctcctgaaagtttatcattccagtttctgtgtttttacttaggcacttggaaatgaaggattttagtaacaaaacttaagtatatttgtttttaggaaagccaacgaatccatctccatgaccatcctccttttttgtagttttgatattttctttatcttgtagctcatattaagtctttatagtatggaagtggtgtctttgattactgagagcgagactggaccggtcttctgttagatatgtgcggatgtttgtggtgctatgacctgatgtgttgcaattttgttacaaaaccatttcattaagtttaagatgagctttgatgttacagttgcttctttacctatagatgatcaaagagagtgaatatgttcttaagcttgtagctcatattaagtctttttaacaatggtggtggtgccttggattacgtagactagaccggtcttctgttagatatatgcagatgtttgtggtgtttatgacctgatgttttgctactttgttagaaaacatatacgtttaggtcagctttgatgttatagttgctttacctatagatgtacgataacaattactgagttctcaaaatgcaactagtctgaaattacagtccctttttgcgggtgatggatgtaaatttgcaggttgatttcacgggattcataagcaatggcgtaaacagtttggaaactcagaaatgtactcctggactggcgatcagccgcgaaaacacacgaggtcaggtgaaggttcttgcaaggaacaccggagactatgaactatcaccaagcccagcagagcaagagatagagagctttctctataatgccatcaacatgggtttctttgacaggttaaacttggcttggaagataatattcccatctcacgcatcaagaagaagctccaacgcaagaattgcaaagcagcggctcaagatgatcctcttctccgacaggtgtgatgttagtgacgaagctaaaaggaaaatcgtcaacaacattatccatgcactgtcggatttcgtagagatagaatcagaggaaaaagttcagctaaatgtttccacggacggtgaccttgggaccatttactcggtcacggtgcctgttagaagggtgaaaccagagtaccaagacgtggacgaggctggaaccataaccaacgtggaatacaaagatacccgtgatggttctgtcgatgtcaggttcgatttttatgttccagagtgatgaaaaggcacagtcttagatttatttgctggatagtatcttgtctgttatgttgatgttcttcaagtttagtctggagggaacaaagacagtttcttgacactccccatgtatatatatatatgcaacttctcttttcttataagtttttttactgtgtttgacacgagctggtcggctcaacctattttagtttcacattctgtgaagttaatcatattcaattgcaatactttaaccacaaactatataagttaaactcaatcaaaatatggtgcaatggttcccatcacaaaaatagaaatggactattgaatctcttacctgttcgactaaaataaatattttcaaacaagaactgttatagaacaagattttttacctacagatacagaacgcaaccgatccgaaatggacatgcctaaaattaaattataactttaactaaatcccaaaacacaaaccgaaaacgaaccaaaaatccggatttatcatctacgactacaaacattcaaagtagtatgtacaatagatattgggccataagcccattaacccgtttgtgaattttgaaagagctcaggtattggggaaagctctagtctacaaatttgaaattcggaattcgaaattggggaaagtcttcttcatctgtctagagagtggcgtttgatttgagataacgttcttctccaaaattgcttgaggaagtggttttgttgtgtctctctgggtttgaaatatgagcggagatagacttgaatttgaaaaccctatagaggatgcggtttcgaggctcagattctcccctcaatcaaacaatctcctcgttgcttcttgggattctgtgagtttcttctcttctcttcttttttctcggatcgataccgtattggtctcagagatagtgacgaattgttgcttgcttgtgtaaatgtgtagtatctgagattgtatgatgtggagagctcttcgctaagtcttgaattaaactctcaagctgctcttcttgattgttgtttcgagaatgaatcaacttcatttacctctggttctgatggattcatccgaaggtttgcaattttcgcttttctattgtatgaagatagcaaatttaccttttcaatgaaaaagatctgatcttgtatagaatgataacaccttgcttgttaggtatgatttaaacgctggaacagttgatacaattggaaggcatgatgacatttcaacatccattgtctactcttatgaaaaaggtcagctttttacatttttaagtaagtggtgatgactgtttttacataagttgatttggtatcaggttttgagttttgaatctaagactttggtaacgttatgtatactgtcttatactaaactctaagtggtttgatgcggctcaggtgaagttatctcgactgggtttgatgagaagatcaaattctgggatacaagacaaagagaaagtcttgtgttttcgactgatgctggtggagcagtgggatgtgtcactgtatctggaaacaacttagttgtttgtgtggacgcatcgatgcatatatacgatttacgtaacttagatgaagcttttcaatcgtatgcatcccaagtggaggtgccaatcagatgtatcacctctgtaccttattccagaggtaaacatatatagttacaagaatctgtctttggtgttatttggccatagtttacatttccactgagaaaagatttatattttacattgatcaggtttcatgtttggtttggtttctaagatgtttattgttggtattgagcaggatatgcagttgggtcagtagacggacgagtagctgtggatttccccaatacatcatgctccagtgagattaagtaagtccacaatatgaaagttatcatttggctatccactggtttgtattcaatcttttctcttaagatgtgtaccataaattcatggcagatacagtttccgatgccatcccaagagtaggaatggaagacttgatggtgtatgcataaatgcaatcgaattcagtccatggtatatgtctctcattcaccatctaatggtacacatgattgatcatcaaactaactcttttcttgttgccacagtgggtcagggacttttgtaacaggtgacaatgaaggatacgtgatctcatggaatgctaaaagcagaagaagactcaatgaggttcaaacactaaacatgacttgttctctctagattccttcttgttcttattctcctctataataatttgtgttttttataaaagttgccaaggtactcaaatagcatcgcgtctttagcatttgaccacactggagaactcttggccattgcatcaagccacacttaccaagatgctaaagagaagtaagtcccacactcttctcaattcgtttcatcatcacaaacactctcacaatacatcattaaaacatttgtatcaatatatctccaaatgttttgcagggaagaagctcctcaagtgttcatacacaggctttgaaagattcgtaagcttcttgaatctcagtgtctacttgtatctatctagttatttttttgtgtgtttttggtagcacgttttagcttgatctcagaactgactcgtgtcaaccaacatgtaatgattgtatctctcacgtctctttatactacttgttctctaaactttgttttgactttttagtcaactatatgctttgactttaaaataaacagtagaataatcaaattatttaagagttgattaattaaatagagaatctcagaggccgcgtaagatttacgatctgacttttatttctttaagaaaaaacaaaaaaacgccgcacgtgtagggtcgcgtcagttgcacgcgacacgtcaaataaatctgaaccctagatcgctttcttcagtgttctataaaaactaaactccattcgctgacttcgcaaagaagaacactttctctctgaaatctcaaattcatctcttctcttccgatttcgctgaatcatgtcagacgacgagcatcacttcgaatccagcgacgccggagcttctaagacttatcctcaacaagccggtaacattcgtaaaggtggtcacatcgtcatcaagggacgtccctgcaaggttttgtctctgatttgattattattgattttagaggaatcatcttcatggattgtattaaagcagtgttccgttacctgatcgttgtgaatttttgaggtttagtgattctggattgtgatctggtgtttagtgttgagaaaaacctctgtttttgaagtttatggatttatagggtttttaaatctataatagggtttaattcaattggtgatatgtggggtttatgatataggtggttgaggtatcgacttcgaagactgggaagcatggtcacgccaagtgtcactttgttgccattgatatctttacttctaagaagcttgaagatatcgttccttcttcccacaattgtgatgtgagtcttgtgaatggattagaaacgttatacaaagtctataatttttgactcacaacacaaaactgtttcctttttattggcacaggttccacatgtgaatcgtgttgattatcagttgattgatatctctgaagatggctttgtatgtcatcttctttttcactagttcagctttgtgttttgtctttgcccatatggttgaattagagggttttgttctttgattacatttacaggttagtcttcttactgataatggtagcactaaggatgatctgaagctgccaacagatgaagctttactcacacagctcaagaatggatttgaggagggtaaggatattgttgtgtctgtcatgtctgcaatgggagaggagcagatgtgtgctctcaaggaagttggtcccaagtaataataataagtaagcattctctcttttacagaggctatgtattatcaagtttgacagagtcaaatgttataagaacaaagtttggtccttttttttggtcttcttagtataatttaagcccacatgtgtttcccatgcaagacactcttatatttactagtatatcttactattggttttggttgtggagaagttactgttgacagttccaaacctctacttctctttatgtgctatgttattttctcagatcctaaaggattagtcattttgaatgtggatatgtcacatcaatacttgtgatccaagtgctctctttgagtagtcgctgagtgatcaaatgctaagggaggtctcatatacttgctagtttaagggcctacttcatagttttagttggttatgctatggagtgggcctgactacaaccatcaacaatcgataaaaagctacatttctatggatattgaacttgaactttggtgtaagaagttttagtctactattgaaccaaaagcgttttccactgattaccttttgattattatagcacactaaattagtcaagagtaaaaaaaatgaaacatataaacaaaaaaatactcatcaaattattttctccataaccaatcaagtattaattgcccccacatcttataattgcttccattacccacagttcacatttcacagcctcacaattatcttgagttatatgtccataaactttacactactattaaacatttattttgtggggaataatggttttatattaatgaaagctacaaaaactaaaatagaaatagaagaagggtatagtgagtcacgggtatgggtagagagacagagaggggcacgtgcctgaaagaaaagaaccaagcaaatgagaacaaagtcactctctgtatgtccccatctaccattttgtagtattccttggtttggcattggatcatttgatatatatccctcgttttttcgacatttgctacatatcctttattcttcaaaatttgaacaatattacaattcattatcaaatttaatatttagtttgtcctgcccaaaagctgttaatattgtcctatctttttgtttatattgactttgttgctaccacggttttgacttctttttattacgtacgatggtttcgaagacatgtttcttaccgaagcgccattgttttcatacaaaatatagattatggtagatggatgtcgcgccaaaattgtaaatggtattggcttttagtatttcaaagattttagccaatcattattagctcaagcttggtaattcatacatgaacaacactcgttattggtgtatatctgtaaagctcgatacttataatctaatagcgctttagaatgtggtatgggttctcgattggcctatgtttgctgatgtgtatatctggtatattatatacatcggaatcgttcaacgttggttgcaaccggatatctcgataaacgagcacccgtattcaccgggcgtagcattcttattttattttaacaaagactattttttaaaactattcgtagattagtagtttagtactcaaaaaaccataaatactcaattacgtttttaggatttttataagaatgcttgtctctacctcatcggttttctacttttacgataaaactattaaattgcaatctcttataccaagaaaaaaaaagaatatgaagaaggaaaacgacatacataaagaggtccttcgaatttaatgcttcacatttactccttcacccacacaccttttgtcccttttttttaatgatcttattcagttttaaaataatttcttagtttaacggaaaatattcaaatagaatttcagcttatacattaaattatatttaaatttattatttttcatactcttttttttgtgattttacaaaatcttgtgtacgaatgagttttttttttttgctaagtttagagagaaagagtacaaataacataagcaatcgaaatttagcatgtataactttatttgcaaagaaaagattcatcaaaacatagcattgtcttcggccgttactttcatggtgttgtgtcagaaggatcgatacatgtttataagaatttctcaatcaattcaatgaggacagcaaaaacaattccacttctctttaaataaaccatgtatctgcatgcaaagtcgacgtatattaaactttttttttaactttatataatacacaaaagacatgtaatgtaagacattggctttcgatccaaatgaccctttttaagagaaatagcaagaaaaaggtaactaaaaacgcaaaccaattacaaacaaaaaaaaagttttatctttttttcttacaaaaagtccatttatctgacaatagagagatcataagagacatatcaccagctaccaaagcttttaaaaattcaaacaaataccataagattttagaaatacaaaaacaaatcctaaacccttataggaaaatttattaatctttcccggaccgtcgttttcttggtgctttgttctgtcactctcgaaccctcgaatattgaaaatcaagagctacttctattatattcctttcatttaaataatttctttggaagttcaaaattctctttaaccaaatcggctttgattcttgtaacatatttgaactttgtgcagagtagttaccagtttggaagactcaacatttaagacaaaatagtcatttggtacaacaaaacatttaatgtgtgatatgagacaatttattacacaaggacacattgtaattaagttaaatagagacatgtttaggctacctaatcacaattaaacctagttttactcattttatctctacaaattgaaacatgtcatgtgggatttgaagtaagaaaagatttagggtgaaaacaaaaaggcaacaaaaatcagtgggggtaaaaaagcaaaagagagtaaaatactgggagaaagacagagagagagagaagagtgattgcaatttaacaaaggagaaagaaaacaagtgttactggatttgccagcaacaggactgtgacacatgatttggccataggaaaaaggtaactgctttttcatctcttaattataactcctttcctctcttctctctctctcttccatggtgggttcttcttttagtagatctctgcaccacccaaagcccaaagctcaaagctttgcacagaagatacagagagaaagaaccacatacaaaaaaaaagagtctacttttctttttgtttctacttgctatttattacttttcacaccacaccctctggtcaaatgtctttctctctactcttctttcctttggtctgagacaacagtagcaagagtccgtgaaagaagaaaacaaaatgttagaattttgaagaagatgagggaaaaggaagcaactttatctgtttatttgacttgagtctcttcgatctacatctggattttgcagcatttcttcttgaggaaaaatgaggaaacatggatggcagcttccataccatcctcttcaggttcttcctttgttcttactgagatttctttggagggttttgattttggaggtgaaagttttgatctttttgtttaatttgtgggttaggtggtggctgttgctgtgttcttggctttagggtttgctttctatgtcttctttgctccatttgttgggaagaagattcatcagtacattgcgatgggcatttacactcctctggtaagcttaatttgtttttgaaatcaaatctgctttcaataaactttgaatggttttcaagatcaaaattgtgtacttgttggccgtttatgtgttgtctttactttgttgtctttctcattttggggaaatgcttatctttttgtgaagtacatagaccattggtttcacaatctaacatgtctttgtgaaattttgttacttatatctaattagggaaattggatttacctggctttttagttggatcttgatttggtccccttcaagagattagaagcttcattgattcctgtaaatggacaagttagctctagagacttcttatttccgagccaattttaggggctatggttgaaattttgatcttttaacttgatccattttgcttttaattgaagctgcacttgagaccttagtcttagagattgtgtacaccttaagtctttgaaaatagtgatttattctttcccttttttggtatcctcttagagactgcctaagacagtgacatctttttttcagattacgtgtgtggttggactgtatatatggtgtgcggcttcagatcctgcagaccgtggagttttccggtctaagaagtaccttaaaattcctgaaaatgggaaatttcctctagcaaaggatataaaagatggatgtggatcagctacaggtggtgctaaatctcatgatggcacgtgtgtagaggatacagaaaatggaagtaacaagaaattggagtcatcagaaagatcttctctcctgcgtttgctctgctctccttgtgcattgctatgtagttgttgcagtggaaaagatgaatcttctgagcagatgagtgaggatgggatgttttattgcagtctgtgtgaagttgaggtgcggggaacatttataaacacagacatgtcttttcattggctttagagttttcttgtgacaagaaagcttcacatattctcaggagtagtcaacaattattgtcttccttttgcaggtcttcaaatacagcaagcattgcagagtttgtgacaaatgtgtggaccgttttgatcatcactgcagggtattcaaaggatttgcttaaaaatttcatggtttatcttaaatggttaaacccttccttctgttttaattattttatctttgtttttgtatgacttttgtagtggctaaacaactgcattggcaagcggaattaccgaaaattcttcagtcttatggtatcagctatttttttggtaaggttgtgttgatctttcatgatgtcctgaaagaatatcttctgtctatctttctgtcatgaaatgttctgaataattattccttggtgggtgaaatgaagagttagttctcataaagttagatgtattattaaccggtggaaacatcgttttttcccctgtggtttgaaattgcagctcattatgcaatggtcaactgggatttttgtgctggtattatgtttactccgaagaaaccaatttaatgcagacattgccctgaagttgggaagcagcttctcgctaattccatttgttatagttgttgtaagttaccttctcatacagttgatcttcccttatctcacctgaaagcaagatttgaaggtttcttctgtctcttgcagggtgtctgtacagtattagcaatgctggcaacgttaccacttgctcagcttttcttcttccacattcttctcattaagaaggtttgtttcccatgctcagttgctcacagacatgccaagctttgtcctttaactattcaattaaccaaagtaaattttctctaacagggaatcagtacatacgactacatagttgcgcttagggagcaagagcaagaactagaagctggaggcggtcaacagagtcctcaaatgtcaatgatcagctcatttactggactaagcagtgcaagctccttcaatacatttcatcgtggggcatggtgcacaccaccacgtttgtttcttgaggatcaggtaccattattcaccagtttcttctaccttgttgactatgatttgctctaatgcgtgtgcatatctgtatccagtttgacgtagtccctccagagaatgcttctgtaagttcatatgggaagaagtctgttgtagaggaacgtgtcaagaagaagccccaacctgtgaagattagtccttggactctagctcgtctcaatgcagaagaagtttcaaaagcagcagcagaagcaagaaagaaatccaaaataatccagcctgtggcgagacgggaaaatccatttgttggcttagaagcaagcagcagcttcggaagcagtggccgtagaatgttcccaacaaaatatgaaggtgttaataataacgggaagcagcgaaggcaatcaaagcgcatacggttaccagcagaactacctctagaaccgctgatgaatgttcagacaaaagcagcaatggagacatcaactagttcagggctagctccacttcagctagaagcaagaagcgcgtttcagacaagccgggcaatgtcagggtctggtaatgttatggtgacatcttcaccagagagcagcttagactcgcatgacattcacccgtttagagtttcgtctgaagcagaggatgcagcgcagcttaatgggttctcttctgctgttggtctgatgggtcaacagagaggacaacaacaacaacaacaactatcaatgatgatgatgccattgtcaaggtctacaagtgatggctatgatgcatctggtggagaagacagtgatcaggttccttctagaaacatccacaaatcaagatgagaagcatgatagaataattctagttttggcttcttcgaatcttcggaggtattctttgtgtaatggctgctgccttctatcaggaagaagtcaacatttgaggatcttgaaggtataaaaatgcctgccaaaagctcttaggagaagagcaccagagacttttgagaattcttaagattttatttgaaggtactgagcaatttgaacatgatgatgatcttctagggatttactaaaacttattttgctttgtttgttaggaaaaaaacttttatttcttctaaagaaatgttaaattgtgtgattcaaagaaaatgtttttaatgaccatagatgatttcaaagaaagtgtatgttcagtttgagttgcatgatcagagaatagagaacgttgataatttcggattatttagtcaacaaagccaccgactaatctaattatttattctttaaaaaccttttgggattgcgtcactccaaagtattcagttcaccaaaagaagttcaatttctaattcactcaaaaataaaaagtataactcaacttaccacatcctaactcatgaaaattttcatgtttttgagtaaagttttgatttaacaattttacaaaggagataactcaaaaatgtaagtcaatcataactcaacaaacttcaatctctaatgcaaatcttaaacaaatcatgattggtaacagtttattacattacattaacaaacaaaatcacactatatattatcaaaataaatatttctttttttgaattatcaaaataaatagaacaatttgttttatcagttttttttgtttttgtttttttgcaagtttctatcatatttttctcttacggggaaaaataaacaaatttgcgccagatggcaacatttcctattttcatcaacgcgtctttccttcttgattctgttatgacccagactgggacccaaacccagacccgtacccggattggatatagtaacaccgaatctgacgctaatactctttcgtcaccgtcacctttctccagtcgacccggttcattcctccaagccctttctgcgtgatttctgtttcttcacgctctccaaaaattccccatctttcttctcattgctttcgtgacaccttccatgctttaaacgcgccgctaacaaatacactaaccctctctcttcatgattaccaaaacgctaatcccatattttgggtttgcttaattacaacatcaaaatccaaactttgggaaaaaaaatccaaaccttttcgttgtaaaacagagcaatcatggaaatgggtttatctgggatgatgaatcatggaggatcaaattcaaaattacggaaatttgagatagaatcatcatcatcatcaccatcatcatcctctgatcataagtttcattcgatgaatgctcttgagatcttgagagaaaccgttagaattctccggtataatcttggtgctttcatgttaatcgctcttcttttgatctgtcctgtttccgctattctattaccaaaccttttagttgatcaatcagttgttaattcacttacagtgaggcttctcttagtttccaaatcaagtggtcttcctttattgccttttgttagaaactcttgtcagaaattctctgagacagctgtttcttctgcaatgtgtttccctttgttcatcactttgtcactcttgtctagagctgctgtggtttactctgttgattgcacttattcgaggaagaaagttgtggtgactaagtttgtggtgataatgcagagactatggaaacgtcttgtgatcacttacttgtggatttgtactgtgattgttgtttgtctcacttccttctgcgtgtttctcgtcgcggtttgtagctctttctatgttctcggattctctcctgattttaatgcctatggagctatcttagttggtttggtgttctcagtagtgtttgcaaatgctatcattatctgtaacaccacgatcgtgatctcgattcttgaagatgtgtcggggccaggagcgttggttagagcgagtgatttgatcaaaggacagactcaggttggtttgttgatatttctaggatcaacaatagggttgacgtttgtggaaggattgtttgagcatagagtgaagagtttgagttatggagatggttcttcgaggttatgggaaggtccactacttgtggtgatgtattcatttgtggtgcttattgatacaatgatgagtgcagtgttctattttagttgccggtcttatagtatggaagctgttgaagctttggaagcttctggagagattgtgtcccaagatttgtccctgctttaagagttgtcttcaagtttcagaactttgaggatctaagataatgcgaaagaagggtaacaaaagagttagttggatgacaagtaaaaatgagaggcgattttgtatatgaaaggagatttttagttgagcattctttgttgggctttctgcttcttctgttttagtttttttgttctttacattttgtgatcgtcacatatcgtaacggcccatgttctttcacatttggtcttactttgtcaataatcaattataaaatgtgtccatctcatgtgttaagttcttaatcacttttgtgtttgtgttttctttatatatttgttctgtttttttttcctatgtagaacatatactaaaaactaaattgttcataattataattataaacatacataatctgcaggctgtagcccatttgcgcatcggactaacattcaaaggtctttgttaacgttgggccgaattgagcggatcaattttcataatatgtaggctgaatattgcaaaagattaacccagtcggttggaacacctaacaatttggatttataggtgtgaacttattagtagctacataaaatctggtactaaagtttgagaaacagtgatgtcaaatgtgaactattgaatcatagaccgtgatgggattgaatcaactagttaagtttgatgggatatttttatagacgacatgcaataattctatttttctgtcacgagaactatcaatcttttttatatgtggctccgatctttcttttattttttggtattcatatatctccaaaaataattgagacctttttcctgtctttctagaatctagagtataataattttaacactaatcaataatatgtcaagttaacatacatgtttcattgtcgtttaagcattaaataatattcttcatgtgaaaaaattagaccatgacatatacaaaacaaaagctagattaattttaagaaaaattagaccatgacatatataatttattttattgcattttgtcaaaagattttattccactatgttctaatttctctcatatataaaaacaccctacaaaatagaagatatataggtaataatatcttaaaacgttggactgatggaagctaaaaagctaccgtatatactgcaatagccttgttctcaactgttcaaatgcatccaaaatggttataacacagataggcgtttgtcaactaaccctgtacagacaaagacaccaatttgacaacacatagaaagttcattcgagatataacttataatcttggaacattattgtataacttttgttggcataaactttggcaaaaatatttttaaagtattgaaaacgaacttaataattggtttgagtgtgtaatttactaatttagcatgggagagacaatgctatcaattaatattttttaccctatagtattttttaagagaattgagagagtttggtacaagttctcttcacttgtctggagaatttgggttcccgagaactggaaaagatgaaaagaaaaccaaaagattatttacttacttcagattttcatattcctttcatattttatgacaactcacaaaaacacagactcctaattcctctttttgttctctcctcttttttctttttcattgtttacataaaatcattcattctgtcttttgtcctctgtgtcgtcgttattaatacccaatttcttaaaaataaacaaaatttgataaaattcatatagtatacatggaatggttcgtgtgtgtgtgtactgcaacactctgcacattcattaactacactttcttccaagttgcaaattattcaatttttacccatttctctcttttgtcctttctcttgttttgggactttcacctttccaaactcccaaatcttttatttattactccatcagcatttaattttgttcacaatcatattttttttccaatatttacacccaactaaaaatagttattttttcttaaatcatgacaaattgaattttaacatttggaaactttaggagtccctacaagtaatcaactctttagttttcgagtgtttggttgaaagtttggccttgatgtgatcttgaaatgtgattgagtttactactatagttggagttttgattgttgatgatatgatgataggttcctctttccaaatcattgaaatgttacaaaacaaaataaaacaaaaactgatattcaagaaaaataatgttttgtggttgtgaacgtagaaacacaaatgatcaacatcaacttcacgcattcaagaaaaaaacaaaaaaacaaaaagaacttttactttaaagaaattatgaattacagaaaaatacaataaaaactcactggcttggactttctaggttcaataattggctttggtagtacttatgataatatgtgatgaatttgtcattggaacctataaagataacagtatcaagatcaatttttttatatattaaagaatcagcagtaaaacatgagattcttgacattatcacttaatttaggaagaggaatcgtctttggaggaccaacacgagacacagaagaaggattcatggatcctccattagattcagatgatctctcgatgtatagccttcctctgtacgcagcaaggtgagcataataagccggtggcacaatcgatataggtttcgtgcacctcacgaaagtgtaacacaaattatacacaagtctctgcaattcgtctgaagtgaactcgttctcgtcccatagaatatggtaatgcgttggcctgctcgtgcccttcactcctaaatggctacagagataaaaatcaaactctttcggatgagttatcactgtatcaaccactgtaccaggaggtatgttctcatggtctggatcgcaccggaacagccttgtgtggtgtcttttctgaaccacggcgaatgtgatgcttggattgtaatcttggaacttcgaacaagcagtttttatcgattgaagctcttcttggagaactttcttgaactgtgtctcgctaacaccgtccctgaagaatatgattcgattcggaagcttttttaccgctttgtaaaaatcatcaagaagttccttgaccatcaagtcaagatcttgtatgatctcttgcctatgagtctgagacctcattcttgagacgtatcggttagcttctggccagtttatgctccctaccacagccgctactgaagggctacaatcatcgaatggatgaggatgcgttacatcagctcccatgaagataaccggctcatcgggtctaagcagtctagggatgtgagaaggtatcgagttgtagagctcggtcatggatccaccgatcttggcgtttatcttgagagctaagttcgaaacgaactgagaactgagcttagtgatgttagggtataagcagcattgtgtcacaacaccaattcttgtctctgatatcctctttagatctccgtaccctttatgttttttctccattacacaaataatcagctggagattgttcgatgccgctctttgaatctccttcagttttgattcgagaagcgaaatgttgttgagtatgtgtgatggttcaaagaaggtactgcttaatgtgttcttgcttaagaagactcccaaatgctcacacttttgagtaagctcgtttatgaacttgggaatggtagatttctgatcagagctgcctccaatactcatcaaagcccatctctcaattctagttcctttaaaaactttactttctttaaggttccttggccggtcaagtttaagctttggtggctgaagtattcttcctttcagcaatgtcatttctcttgaaacctcaaggttgaattctcttgtttggtttccgctgtcaaagtacagaaccaaaatattaaactcttttcgatgttttagtactcgaatatagaagctcagattatttgaattacctcgatggaccgaccgatcctgtcataaccttatcaataatagctttcctttcattaggtttttggcagcccattttcatgatctttgcagcttgatcatctgatagctttccaagaaacttttgaccttcacaaatcatgcatagctccataggaaggtaacaaggtcttgccctactgatttgcagacacggcaagttcttgaactgaatctcataaccataatgatctttgaagtaactcataagccttagatatttcccttctctatcaggaaaccatatattctccgtaatttcctctgttaacccataaactcgatacctttgaactgtttctctatggcaaacaaagactcttatgttcttaagtgctttctccacttctctcttttcctctaaactcaattctctacctttgttcctaggaaggtccgtaagaaactcgagccgcttctgcaagtaagctattactccaatactttcatggaaagctgtgattgagagatccatgttaagtgctaaaccttgctgagtatgtctaagactctggaaaaaccctctgagtccaacagctcctcctccaatctccttagatccacccatagaactcgagtaaaacgatcttccgatcgatgtacacttctccattggattctctctcaagataacatcaagagcatgaatgtattctggaggcagaggagcccaatcctctccttcctttctctgttctttaccatcaaacttggacacaagcttcatattaaccctaaacagtttctcaatcttcttctgaggttgcttctcacgcaagtcaccgtaattcatcacagccttgcaagatgggatagggagattaacaaagaactcaagcctatctccctgaaactccacagggctgtaaatgttttgcctgccgtcaaaagccggaacaacaccagagaagctattacgatctgtctcaacaagcttctgtttgatcattctagcaatttcctttgaaggctgtggagatatctcaacattgtaatggtaaatcctctgtgacgaatcaaacttgacaagaaaatggttggcgaggagataaatgacagaaccatcttgaccaccaaagtccggtcttttagcaaccactaatgctgcttcttctattgctatggatccactcactttgttgttagaaacttgtatcttcttcttctgttggtgttgctgctttctctccacaactgttgaagcaaaaaaatgggtgagtcaaagtcaaatttagactttaattgtttttgaatgaaacacaaaaagatgcaagtaaatcagtaccaatagagagagtattaaagggagacagagagtttgttttcagacattaacacattaaagaaagagaacatttaaagtaaagtgaatattgtacagactacagagaaggagaaggaccatttagacatttacactatactagagtttgtgtgggaatacacagcaaaacaagaacaacaagagatagccttgaaaacctcgtccaataaatataaactaattcagccataggtgaggatcctaaacctttagaccaaacatgcaaagaataaaccaagaagaagaaaaaggtagattagtagtcaccttgagaaacagggagagatttgtggaaacgggtcattgagtgaggaggaggaagaggaagtaaaggaggaagaggaggagaaagaggaagaagatgaggaggaggaggaggaggaagagagttgtgaaattgagagtagaagtagcagtagtaatagtagtagtagctagaaggaagatttgaggcaacaagattgaggttttggtgagaagaagggtgcaaaagaaaaggaggaggattggtttgaacatggtgatgataaggcttgtggagaagaggtgttcttgatttggaactagggatgtgtttgttggtactgtgatgatgatgatgagttttttcttccatggctgctgagaggaaaaggagctacagagagagacctttgttggctttggaaagctttggaaaagcagaagaaagagagagagaagaagaagaagaagaagaagaagaagaagagagtgtgggtttatgagagagagagataaaagaggcagaaagggattgtctgagtttttggtcagggaaaggtcaaagtccccttccttttgttttattttatttttctgcccccaaaataatgaaatgatgttatttatgctgtcataaataagctttaattgttggcaataataaaagaaaataggcctataaatgtaaataactatattagtatagtagtataaatgatttgttgaggatattgagaaaagctacgagtaaactatagttcttgattatataatcgcaatgtgatttttaagaaagtagtgattaccgataatgtttggtgagaatctaaccgatgatattagacctttatatgttttttcaacagcatgaatgatttgataagccttttatggtttcgtaaaccccaagttgttgttgttgttgttacacatgttttataaaatggaccaatacactcattaaatcgaattatggggaccattctgtttaattatttattctttgtactattttcttcgtacctcattaataatacacactttggactctttcatcaattttccgattttttttaaaagaaaaattatacacatgtttgcatatagctgaataacaccaaaaaaaaaaaatggatgaaagttagattaatgattctttactattcgtagtttattttggaaactattgaatagtattacatgaaagcaatataattcaagagccctttggcttctttcatttttgattgtgaccaaaacccataccaatggttcccacaattataggtcccactataatttatctcgttgaataattgtatttcgtgaaaaaaatctagagatgatgaacaagaacaatgggtcttaaatcataatatcaacatcaatattaggtatcaatcctagcctttttattaaatcctaaagattacgaagctattggtgcgaattcatcgaagcaatgctaaaacaaaagatgctcaataatatatattatagatgtatgtctttgtgaaaaatggtccgattcaaagagtttacttttatgtaatggaacactaaagattactgggaccaaagagatttggtcaaagctaaaagcaccctataaccccattgttttgggctaaaattgctctctacttttagcttaagctctaaccaatagtatttgccttcttcttttttgtataaaactatttagtgatgaaaagccgttaatccgacgatatttcttgttttaaattttgattttgtcttttatgtcaactacaacaaaactttgttaacaaataattttttgggaatgtggtgatggcgactgggtgatatgattatcgtggaccctaaaccatattatctaactccattacaagttataatctcttattttcttttatttacaagttaattagtactattgattacaaagatcaaggtccaatcgctttgacctataagtatattaaaaaatatcagatgaccagtcatatccatttacctataactgatttggactagagctcgttaaaagaataaagatggcgttacatcatcacagataaatctttggatacctattttcataaaaacacattctctttgcaattttttttttttttttaatcttctcccagagataaaaatcccgttcacattatgttaaacaaatacattttttcccactcttgttataatttagttttagtgttcttgtaacaaacagttaatgtctataagagacatggttagctaacagtataacgtttagtagtcaatctttaataactcactgatgtaataaactactctatcttataatgactgattctgtagtaaataaagatttacaaataaattatgatattagagtttccaatgtagatctctaatgacttttgaggtataagtgaagtgtatatatatgcacaagcatgtacagaagaagagacaggtaaagttgtatagaagaggatcaaacctcactaaaagagagaagaggactagtgaggctatcgtttctgcttcctgatcctgagaatctaagtgggagcagagcaggatctttgtacgcactgaccaagttattgtaaaactcgggcattgttggatcgtttctatcttccttatctctctttgtcaacacctaaaacaaaacacagagagttaacaccaaacatcttgtaatgcaaatttcagatttacttctttatgtgtgtgagtgtgtgtgggatttgtacctcagcaggataatcagtgaatataggcatgaagcgtttacgacagaactcgttaaagagaagagtaaaaacgggaagagggacaagcaagtatgtagctagttccatcttctttagcgcaaatagaccgattgcaattgcttgcataagtacaagagagaatatcatcgtatagtgtatcattggccaaaacattccacccgtatcaaactttggagcatacacattcataaactgcatcgcaaaacacaattgagtccttagttctagtgcacgaagaaagctaaaagagtaaaatatgtgtgtcatatatacctggtttcggtagatgatgtatgcaaggataaagtataaaaggatgaaaggaagaatcaatggagctaagaagaagtatgtaatcccaagaagcccaaagaagagaactctaggagtgtctctgtggtaccgcattggcggtacaacaaattcattttcatctgacggttcaaaagatctttttatgtaactgaccatgaagggaactacacggaagagttcagtcagagtatctgtccatcctgttgtcacaacataagcgatgaaaaacgaagcctgcaaaaatgatgtaaaccactctgtaaaaatgaccattgtgtgagacaataaatggtgggagaagtgtttttttacctgagctggaacagccacagccaacttgagcgggatttgctttggatcgagaattacagaaagcttgtagaaggctgatccagagaaaacagttgcgaaaaacacattccatatagtgaaccagatcaccttgttacaagcactcttttgtatatcgctgtggcaaatgtgcccttggatagaagagagaaactccatggttggaggtacgactttgagagatgtctgaagtataagacttggaaggtatccagttattatttgacttacaactttcctgcaacagagattgctaatgtttagaacaataagcttaaagtgttgttgttcaaaggtaatgataatgaaaaatctgtcacttacattgataggatcaatgacaagaacgggaacataaattctagtgcaggaaggttggtgagaccttggacaagtactactggaacaagaaataagatagtaaggaggagacaagcgaacacaaccagaattttagcaagccatttctgcataaatgatgcagagaagaaaggccagtgtacgtcatgaggttctggtgctggttctgtgagccagtaagtagggttgattgattgtggcatgtggagtgctgttgcagcaccatatcgagacttgaatgatacaaaagcagctcgaacttcctacgtgatgagagaaaacatgcaaaattatgagaaagatgtatccagttcgcaggtcctacatgtaaccatcagaggcatacctttccaggtgctgaaacttcagcttgccccaatcgtatgttctgttccatttcctgtaacacactctcatagtgaccctcagtattgtctttacgactgaagaatctcattggcgtctttttaactggcttcttatgtttcacttctttatataactttttagccttatcctgcaagagccagaattgaaaaagaagtgtaaccaagagtaatagattgcaatagcatgcacacacaaagatatactttccaatccaacggaaggcagataagctttttcaagacttacaacgacacttcggagtttacttgttcgatggataaccacatgagaaaaataggtagaggaatgattttcaccaaagaacctatcaacagtgtcgctcacactgcttccatctgaagaggggatatttcgaaccaatattgtaaactgttctggcttaggtttagatgaatagaaatgctcaatccttttcaacgcaatatatctgaattcctgtcaaagaaagacaatactaatgacaatatagcaaatactaatgacagtcttctaaagagtcatcactaaagaactttagcattcattacgataaaataatttaagtaaccataagtacaagcccttacaaagtaaagaagacagcaaacaaatacagtcacaagatatatagctccaaagtgaacccatagcctgcaaaaaaaaaacaaaaatatctacatatatacatcatcctagcaacaataataacaacataaaagcttgaggttaccattgtgagcggactttgaggtttgcaacagaaaacagatccaaagaattggctgaccagtcagcgtaatcaatcactgtaagttgatctccaaagcagttcacaggcaagagaacaaaaacaccaatgataccagcaaacaagaacactttcaaactaaaagtgatcattctcataaacacaacaccatccaagccagatgattccataagttccttttctgttggtctccatgatttccaaatccatttaagagaaggtatataccttgctactttgttgcgtctacgtttatacgtcccattcgcgagtctgcgaggtaaaaaaacctcgtagtttcgtggctgcttcctcagtacagagtaaagaatgaagagtaatacacataggcaagagtttatcccaacagacataagaagtgcagacaaaagcatcttcaatgcttcgaaacctctcagtaacaaaactcagctcaagaactgcataaataaatcaaaatcaataaaaaaaaaactaaagaatctatctacataatatgaattcgaatacagagatcttaattcacactgatcttttacgagacggagcaggatcaaacctgagacttaagaaatcgaaattctgtgttttgaaatcttcaacgtcagtgatcggaacaaaacgcaccacgaatcagagaagacaaatctgaattcgtattatgatttgaaagtgagattgattgtgaaagcaagagagcagataattttaattttggagatcggacggtcaataacacgtgttataaataattattaactcatttagattttatattaaggccttccctcgcttaccaatttttgtttattggtattacccaaattgccctctctttgcgtgggatatcttaatacgttgtgagggtatttttgtatatttcggaaagtcaacggtttatcgacacaagtggaatgaacaaataattgagcatgttcaaatcttactctcttttaaatttattttgtattttgattacattatgttatgattatgtgtttccacgtacaacgatttaaatagtgttaattctaatttttttaaacgatgacgactcgtaaatatcatagttgtaaccgcatccaaatttaaattcgcataaatagtaaagctattatctcgacaattgaagagccgcttcatattgcaaatttcatgagagatcagtttttgagaagttgaggtttgtgttccatgcattttcgacaaggaatttaggccactagtgaattggctaaatcataattttattttccttcttatgatttaattgttgaatattgataatcttttttacaatagtagtatgacttgtgattttacttactatataaaaaaatacatcggttttttgcgtagcgtatttttaaacattttgatatatcctattggaagaagctaaattggagctttcatcacagatttttctctgaatcactttcagttccgattgggtttggtcttcctccaccgatggacaacaacttctgtcgacttaaagattctggcgtctcagattcttcgattaaacatataaacggcttgattcatcgaaaatcatagattaatgatttttgattttgtcgcgagaaacagagaaagaaaagagagtggtcgggaataaaaaagagaccgagaaaaaaaatgggaaaaaaagaaatggtttcttttttgttttgttaaatatgactattcaatcacgttaggacatgtcgtcgaccctcacaaatctctcttctagctctcttaattttacgtatttttgaattatttttttctaagttaatttagagaactctgaaatttcttaagagagactcccattggagatggccttagtatcttcaattttattctcatgatcactgcctccaatttaaagatattgtataatggtttctcctaccgacattcaaactaggaatttttttctagtttcatccaaatccaaaaccttaatggatctctgtttttttctactttatttcttttgtaacacgtctgtattatttttttgttctattgaatttgaataagatttttttgtttttaaaagaacaataataatatgtaacacgacgaagtacccaaggttccacttctattccaaaatatgaaataacatgtttacatataaattataaatatcagagtgagtccaataattggttctgattgagataagctgtataatctaaaacctcagacaaacacaatttatttgactttaaaccatcaaagtatcctaaaggaccaacaaatctaaacaaaaactaaacttatcttggaaaaaagcaaataaagccacacaaataaaattcccaagtctcagagaacagagtcatagccattgatctaatgtacaacacccaaaagaagagaagattgattgtttgggctaagaaaacagaaagagcgtaaccaaccccgtagtagagagtttcagataaccttcttcttctcgaaaaacgtcttcaagtgcaaaaactgcatccctgcaactcctatgcagacgaaaaacgagagaacactcaaccacgccatttttgtgttagtggaccggttcaagtcttgcatctcttcttccctgagaccacaccacaatcaagtcatataaacaatatcttcataataccaaacaatagagaaagaaaagtacctatctctaagataatacatctcttcatgaatcgagttaacagtatcaagaagactctttacttcaaattccataacctgccacaaaaatgcataacaacaacacacatggaggatcaacatagtaaccagccactagcttcaacaattccgctactacaattctgaagctgtgaaactttcgttatctattcttataatcagaccagcttctcataatccacacaaagagaagagaaattgaactcacttcagttcaaactgatcataagaacacacaatggagtatcatcaacatagtaacaagcctaacactaacttcaacaatttcgttatatctatgtatataatcagaatcagcttctcataatctacacacagagaacttacttcgacttgactcttcttagcaacattagcccagcttttagattgaacaccagtcttccactcaaagtcaatactcaacgaaacctcaggcttatgatcaacagcagtgaaacaagccatgtaatcacctgcttcaacagccgagaatgcgaattgtcctgaatctacttgttccgcgtgatggtaattgttaccggaattagacgtcaccttcacacataaccaaaactcagatctatggacaaaattttaacaaattaggtcaaaattagaaagatctgtgtttaccttgacggaaattttgtgagtttgtggtaaagcttgaccttcgtgaggattatcgatgttgtatttaccaacagtcattgaattgcttttgatgtcttcggcgatacactttgtgcgacctgagtgtagatcgaagtgaagcgagtgtgaaattggtgaccaaatcgctagaattagaagcatcgtccatagtttttgcgattggagaaacatttttgaaaaatccagagaaatcgaatctctcttcgtcttccttttgcttcttcctcgattgtgtagacgaagctcgatgacgatgcaagtgttttgacacgtgtatatgttttattggttaaaacacataagtgtgaacagcttcagattacaaaccgatcctgaattatttggttctgcttaataaaccggtttggtttagcattatgtgatccttgcgtcttaaggaaccggtatggtttacctttgtgtaaatttcctttttttagggtacaaaaaaatgcagaactttccttttctcggttaaaaaaaaaaggaaagtaaacaacgaacaccattacttaactttggagtgagtttctaatactgagttacttgagccgtaaccgtaagagatcattcatgcttgagagaatgtcaaaaaagattaacgagcttcttcgttactgtgaagagaactatattgagagaggaagtctcgaacttgcattacgatgtgctgtttcaatctgcaaagcgaatcctgacgctcctcaagcttatgcacacgtcgccgcttacagaatccttttgacggcagccaattatcgtacggtcacaggagagcctgactggtacgctgtgttgggaatcaacaaacgcggatcctcaaagtctgtggtgaacgctattgataggcggtgcgaggagatcatagaggtgttggatggcgaaactggggtctccaaagctgtttcgagggtttatgatctggtcagacttggcgtatcggagttgatggacgaagataggagaagagcgtatgatctccgttctggattttctattatcaactgaatctaaaactttttgaagttttaatttttcaagcaaagtttgtaatctctctatgttttcctatggattcatgtatgtatatgtctttccatgttgaacttttcctattaaggctaatatatatctgtagttttagtgaatcatcatcaaacataatcagagagtgtgttattaacttataaggatggctcagtcatctttgtcaacatcgtcgtcatcgtagtaatggaaaggatgtggaactgacttgaaggctctgtatttgcctacattgttcaagtgctcattctccaacctgaagaagctccatattccccgacgaataatctctaaacatgaaataatgcttgttactgcgattttgtgaagcgacttcaagttgaactctagcactagctgcatccatgccactcttagaatcacattcactacctgtcaaaatcaaatatgattcaaccagaatctttagaacatgacatattctgatgttaaaatgttactacttaccatggctgcaaaatagacgcttttgtgagggaccagtaatttgtcccttaagtatgggttcttggagtgcttacggaggagtccccagtctataacaatgtcccagaatgtgttcatccctgtcgctacacctgagcttacaagagccaaaatcatccaagtgcgtccctttttcagttcatacgctgttcttacgatgactgcaatgattgtcaacatatatttcaacgcattgtatccgtgtacggattctttttcttcgcataatctgcgtatgcactgcaaaaaagtgaatacatgtaagttatagattcggatgtgacagaatcagtgaaggcagtaataaaaaaaggaagagattgaattgtgtgaaacctggaggaagcggagccagtagggtataacagcaacgacaaagtagaaggcattgtaaacaccatgactatgacacttgttttgcctctgcaagtattctcctaagccatagtagcaaatgaatagctcaaagctccttatggcttgtatctgaacttatcaaaacaaaaaacatcagtctattattctgatcatttattgtcatttttcagcaaacattaatgcaaatatataacctgactggttaggtggtctcccaagaaaaaatctggaagtgtgacctgtgataaaggataaaatcatgaagatgaatattgaataacatccaggagtcaatttaatacgattacctcgtagaggggggcacatatacagtgaaacagtgatcgtataaagaaaaaccgacttgagcggtatatgatgttgaaaggacaaaaaagtatgaaaagaacaatctgcaaaaaaaaaagagatgtttaagcctgacggattccatctgataacgattgcacaaaatgtaaacaccaaaagaatatcttacagtggccaaacacaaaggaataacttcagggagtgtcttatgatgtttcatcctccagtccatatcaagctgcaaatttagcaggaaacagacaaaagcaagcaccgcaagaccggtgcttaccaggaaaacttctcggtcacccaactctgttccctgcttgaaaccaaagatgaaggtatagttgactctataacgcttccagaagtatatattcgctgagtacatgagcatatgaagaatgatgaatccaaataagctgcaggacatgcaatgtttgtcagtgtgagacaagaaagatctgtttattaattttctgagcacatgttctgagtaagtgactagaataattgcctgtaaagagggataatatttgccatgtattcagtaccgtagttcttctccatgatttttctactttctatcttgaaaacaacagcaataactagtgcaatagagcaaccagaaaagaaacctgtgggaagttgaagaacaattatcactgaacaattgtgacatctttgaaaatctgacactcttaaattcccttaccagagaagaatgtaaccctgtgcctttctcttttaacttttggccttagacacttcatgccttctcttcgattaccacttgaaaagtgcttaacaaaagttacctctactctctccaggagtctgttaacctaaatcagaatacagtgaacaaaacaatttgatgtactaacataacagaaaaatgattctacgactgaaatatacacaaacctcatcagaacttccaatcaatgaattatccacaattttcatgtagttcctagatgcattcctcgaagcaatctacaaattaaccagagaaaaatgagtatattgcatgattccgttgttcatgcattgattgggctctgcagtaagaaatctgtaaggtatagaagaagctcttcttcatatctaaccttctcatacttcttcatgatttttgaaaatgccagaagattcatgaaactgattcaaattacacaaatatagacaaatcagtgccatgacaatataaaagaaaaacttagtgagaaaatgaactttggctgaaccttctcctcacctgtattccttcaaacggcggagtttctgatagaactcactaaaaacaagcctcaactgttcctctccttttttcaatcctttcttggagattggttcattagaatccccaaaaactccttttaatgtagtaataggagattcaagcacatcattcatcttcacacgctcaagtatttctcgaagatcctgcttatcaccaatactggcttcctcttcatctccattggtatgagaaaccgggacaatgtcagccatgatatgggaggcctcttcttctggaatgttagttctttcaataccatgtaccatatctgtgtttgcagtacctgcaaatatatcaagaattcagtaaactgatcataaatagatgcttctcatcataaacattcttgtcgtctttgcttaccctgtgttctcattgtgttatcagatgtatctactacaaccttatcagatggatgcttctccaaattcaggttatctacatcaggtttttgcatcttaaccctcaacgcaatcagtgcatccatttgtttatctaacaaagccgcttcctcaatcacttccttaactttatcccggtaaaacttgttaactttgtttagattctcatcaagcttcttaaagaatgactcttcgaattcccctccttcttcagactttttgagaaactttgtctcatacaacttacgagaaccttcttcctgcaccgtgtcaacttttatgacttggtcctcaatatcccctgcacgttcactatgcctaggatgaaaagacagaccactaaatgaacggtgcaacgcctctgcctgctgtgaaactctcgacgctgctctagtcagcttactgtgcttgtagctacgtatttcttttaaaaccctcttcaagccattgtaatccacataagcttctacccactctggcaccatttgcttcttaaatatcttcccaaacttcatctttttgcagctcaattcaaccaaatcaatgctatatcacaaacttcataaagaggacaagaacaagatgtgatcatcaaatacaacaataacatataataagagatcaaaaatcgggaaatctatgatacgactacagagaaatctgaagaaaaacaataggttcgggatccattagaacaaccaaataagcagaagattcgaaagaagtttctaattgtgtacatatatggagtttgatcatacagggcacgaaaaaacttgatgagtagagatagatagataccttgatcaggaagaaacgttagactaagctcgatgacgttaaggtgaaagaagacgtcggaatttgaaacgcctctctctctctcgctctgtttactctcgccgagtgtcactacagtatttgctttgcttgtattagttggttactgctctgcggctgagatcatgcttaagaacttgttcctctccttccagccgttggattcttcctgactgccacgtgccgttcgataatggaacgcgtgttcaactgctgcggccgaaattgatggaaggaagcaaaatcatagatactggttgaccatttttttggccgactagagattgacacgtgttgcttcataagcctcactgtggcagtgaaaccgtctaacttggcagtatcgggaccttaaggatttaaccaatcaaatttggcagtatcaggacctcaaggatttaaccaatcaaaaaccaaaaaatttggggccatatcatttgtcttgtactattgaattgattgcgatcaaatctgcattttaaatgcatacattccaaattacttcggcaaaacattttcaaatggtcgaagatgtagtacaaacttatgtagttgtttattacctccaaggctccaagtatgtgtactaataaaacagagtgaatctaagtctacatcataaccattgtacatcataaccattgagtgctctacttagaacccgcatatgatttcccgctctcttgagatccgaattcaacaatgctcattcatatagtaagtcttgctcagttgtttgaattgctttgttcatcaggtattgcccgctcaccactgcagcagtagaaatgtggcagcttaactcgcccacaactcctgccaggaaacaacagtgtcatgatcataattcataatgctggtggtaccaagaatggaaaaatgatgataacaagttgtttcaaggagcagtctcagtttttgacagagcaacaaatacaaaagctcttccattaaagtctgttcatgttggtaactcacagtttctaccgataatggtagaaagaaacagaacattgaattggaaagacttgtttgactctcaaagcagatcgaatgcaaaacttaaccaatgaaacaaaattaagaaccatcaaaacgtaacagaaaatgatctgcaaatacctgcaacggatgatcacaggagtaggtttaaaggcctttggtccatttcttatccctctcttgtgtttagaaatctgtatgattcacgaaataaaagctactgttaaccaaatcattcttaaaaacaatgattttgggcctaagcaaagcaaaacagattacatttaaacagatctttgattcttgtctattgaagtcaagatcttccaatcatgatctcaagatcgaatctttaccacaaaatagtaaacctccctaaaaccctagagggtaaaaaaaatcagctaaaagagcaaattccaaacgcagcaacactttcaaaccctaaaactctcaaatttcatatttgcagtggtataatggaaaagctgaaatataattattaccttcttcttgggcacagccattagctccatggatccaccgaaagagaaactcaggaaaccgaatctgaagttattttcatcaatgatagaatccgattgttaattataaaactccggtaaaacaagcggcggcgaagcggtagagcgatcgatggcgctgtctaagggaggagaaatcgcagcgacgtaactgaagcatcgggattctaatatacgccggaaatcagcagcggcgcgttttagcgtcgtcagtctcaacgccattggttcaaattctccggtggctttgcggagggtgatacttgcactgttgcacagttacgcttaacaagacggtgtcgtttcatcgtaaccggcaataactaaaataaaaataaaaacctgacacggaccggctggtcagaccggttgaaccgcgaactctggtccagcttttatatatgtacagttcaacgtccggtccggtttataaaatcatgatcataaacgtattgtggaaggatcgtaaataatctaaagtttgtgcctccatgagaacataccttagaatctaatctgcctcagcttcattgttacgttttgattaaccaaaatttagcaattagattccatcttttatcgtttatactctttatctatcttttttctaacctcaaaaaaatccttattttagtgacagtgctgctatcagttagcaaatcagactgttaacttttagcctatatgtgtgatgtatctaagactaggagttacttttttatttcaagttggtagaaacgaatttagtaaagcatgtgtttggaattggagtcgatcaaatataaacaaatcgtttctccctaaacaaagatgctagattgctagagattaagatgacgatttgattaatcatcgtcactcatatttaattggtttccttaactaaatttatctaaacaaagatgctagagcttttgtttgcgtcatctcatcctaatcctcatatcttttaatcctatcctttttgtcccatgccctatatagtaagtatataaaattggcttggtgatgtatatgaacatatgatgaatcatgtgccatttgaaatatagtataatacatgtacacttgtgtaaaatagcttttggggtcttttaatttgttagaatagcatttttagattgtccattaacaaggtagtttcttgaaaaattttaaaagatattcatgcgccacttaattataacggtttaatgaacaattatttgtggcaatagcgaaacaaaatcatgaaattaacaagaataaacagctaatcatgaacttgttttttctcctctttcccactttgtgctggaacgttccttcgcatcttgtagtaatctcacaaaacccattttcaagaaacttgtgtccagtctgaattgagcgtgtggagttttttggacaaatgtagtaaacaaagatttaatcacccaattagggaataataatgacaccattagataagaacatgcgtaattagtgacatctaattattgtttaatcagaaatccgccgtggcgcgtgggtgtatgccctccacaatccttatccctaatgactttttatgtgaaaatgacacgtcattcagaagcaaaaaaattggaccccccaagccttgtagcatgccacgtttcttccaaaattaagaccaagaatggtcttcacactagtttttatgttatacaagttctttagtacttctcctttggattctttttaattactagtttgttttatgaaaaacgtatgttattgattattgagatatcagtattattatatatgcagtataaagttattgatgtgtatattttgtcatgcaaactatatcgtggagaaaataatgttgcttatgacttttgatagttgggcttacatttggataatggatagggtagacaaagataggaggaaagcaataatagcgaaatgaagaacgaatatttggggaaataggacaaatgaatatacttctctttgaaatggagattcacctaaattattaatactaaagccatgcaatgcatccaaacaaatcagtggtcaagcacactcaattatatgtccacgaagacctttagaatcttcacaaccaaaagctattttctacgctacctgataattctgactcaattcttcttcataaaacgtataatgaagctttatgaatgattaattatagacacaaccggccctatctgcgatttctacaaacaatagaacacaaaactttaaaagttactacaaaataccgaattgactatatatatcatattatcagtataaacatgattagattgatcatgtttatcagtaatcatgaaagacaaagagtgtgactattgtaaaccaaattttagaataaaataaataatttatcatactatatacagtattttgttaagtatatgtcatccaatagtaacattatcatttaaactgaaaaatgtttcagctactttaaggaattatagctttattaaaagtatatacttttaggtcacgtgtttagaggtgaagaacaataataattactcaataagttcaccagtcacactccaacatcttattcaaattccttttaaaagctttttaaccgtggctgtttgatgaccatttgacaaaatttagtatattagaaaaaaacaataggatagggataatataggacattagactattagatggacaaaatgaagtattatttaattttccaatgtaccaaccaataagaaagaagtgacgcacagtaaacgacaaaaagctcaagcataaaaacccaaaccttctctgctttctaaacatttcaagaaccttgagaacatcaaaaactaacacagaaagaaaaaaaacagttcctgttctattagattgttttctaaattgtctgaaaatcatggaagtaacttcccaatctaccctccctccagggttcagatttcatcctaccgacgaagaactcatcgtttactatcttcgaaaccagaccatgtctaaaccatgccctgtctccatcatcccagaagttgatatctacaaattcgacccatggcaattacccggttagacccggtttatctctcaatgataacctattcttctagatgttcatgtttagagctactttccttatttgctttgttcgttttgtatttacagagaaaacagagtttggagaaaatgagtggtatttcttcagccctagagaaagaaaatatccaaacggagtcagaccaaaccgggcagctgtttccggttattggaaagcaaccggtacagacaaagccattcacagcggttcaagtaacgtaggtgtcaagaaagctctagtcttctacaaaggtagacctcctaaaggaatcaaaactgactggatcatgcatgagtatcgtctccatgattcacgtaaagcatcaacgaaacgtaacggttccatgagggtacgtaagcagaggaaacaagtttatagctcttgtatattttattacaacttgtgaaaatgttaattttctttatatttttgcagttagatgaatgggtactgtgtaggatatacaagaagagaggagcaagtaagcttctgaatgagcaagagggtttcatggacgaagtactaatggaggatgagacaaaagttgtagttaacgaagcagagagaagaactgaagaagagataatgatgatgacgtcgatgaaacttccaaggacgtgttcgctggctcatttgttggaaatggattacatgggacccgtctctcacattgataattttagtcagttcgatcatcttcatcaacctgattcggagtctagttggttcggggaccttcagtttaaccaagacgagatcttaaaccatcatcgtcaagcgatgtttaagttttagtgatggggtcagtaaaaaagaagaagaaacaagaaaagatgtgcttgaaaagttactttggtagatatttggttagtttgggtacatgaatgaaaattgtaaaatattataactaaaacccaatgggattttatatttctcccatatgaatgtgaaatgaaaaacaatgtttaattaaaaattaagttgtttcagcatgataagacgaagtcacgaagttgatttacattacgaactaataaaacaaaagacttttgtaacttacgatgtttttaaaatgataaaaagagagattgagattacgttaacttggaatgaacaagtcgatgacgtgtggaggaatcaacgccagatacaatgcattttgggtacttatctttgtcgttttattagataacgaatgttacttgtcgtcatcatcgtacattaaaccacattttgattcagtctgcgcagactcaaacattagtggatgtaacttatcataaatatgtggaccctttttgctaatttcaattttgaccggttttggtgtaccaaacacggtttaacaaaaccacgaaaccaaacttgtttaagaaagaatacacaccaaagaaatgttgcaaagaaggcataataaaaaagagtgttagttgattagtagattggtcacaaactttgtctgattgctaaacaatataaaaactcttatgaatttatttagaacttatttttcagattcaaagaggtaaaaaatgtcgttgtgtttggttatagcttgtatggtaacatcatggatcttcttacaccgatggggacaaagaaacaagagtggtccaaagacttggcctttggttggagcagcgatcgaacagttaactaattttgatcgaatgcatgattggctcgttgagtatctttataactcaagaacagtagtggttccaatgccattcactacttatacatacatagctgatcccatcaacgttgaatatgtcctgaaaacaaacttctccaattaccccaaggtgaaaaaagctctttatatcaatatcatgtatatgttttgttgtgactttgattttttgttgtatatcagggagagacttatcattcttatatggaagtattgttgggagatgggattttcaattctgatggagagctttggaggaaacagagaaaaaccgcgagtttcgaatttgcttccaagaatcttagagattttagtactgtagtgtttaaagagtatagtcttaaactcttcactatcctttcccaagcatctttcaaagagcaacaagtagatatgcaggtaagaatctattaatcactaaagtctacaaacttagtttctcttacataacatcctttttttggctctaggaattgttgatgagaatgactttggattcaatatgtaaagtgggatttggtgtggagatagggacattggctccagagttaccagagaatcactttgctaaggcttttgataccgcaaatataatcgtaacacttcgtttcatagatcctctttggaagatgaaaaagttccttaacataggctctgaggcattgcttggtaaaagcataaaagtagtcaatgatttcacctattcagtcataagaagaaggaaagcagagttattagaggcacaaatatctcctaccaacaacaacaacaacaacaacaacaaggtgataaacttgttatacaactcaaaaatgtaaatatatgcacttgtcacattagtaacatttttattctcatatgtaactaggtgaagcacgatatactctcgaggtttatcgagatcagtgacgatccagatagcaaagaaacagagaaaagcctaagagatattgtcctcaactttgtaatagctggaagagatacaacagcaacaactctcacttgggctatatacatgataatgatgaatgaaaatgttgctgagaaactatactcagagctacaagaactcgaaaaagaaagcgcggaagcgactaatacatcgttgcatcaatacgatacagaggatttcaattccttcaacgagaaggtaacagaattcgcaggactattgaactacgattccttaggaaaacttcactacttacatgctgtgatcacagaaacacttcgtctctaccctgccgttcctcaggtaagtaaaaatccattaaatttgtgaattgagatatcgaaacgaagaaaagaaaaaatcgtatattcgatattcgtaggatccgaaaggagtattagaagatgatatgttaccaaatgggacaaaagtaaaagctggagggatggtcacatatgtaccttactcaatgggtcgtatggaatacaattggggatcagatgcagcattgtttaaacccgaaagatggcttaaagatggagtctttcaaaatgcatcaccattcaagttcacagcttttcaggtaactataatcaaacacatacaagatttttgtttttgaacatgaaagatgatgagtttgtgtgagtgtaggctggaccaaggatatgtttgggaaaggattcagcttatctgcaaatgaagatggcaatggcaatactttgcagattctataagtttcatttggtgccaaatcatcctgtcaagtatcggatgatgacgatcttatccatggctcatggcttgaaggttactgtatccagacgttcatagacacacacacaaaaaaaaaaaaaaactatacaaagtcaaatccatttgaaatgatccaagaagagatataattaaaatctttataactatcttgttctaaaacttctccataagataaattttatagatcaaacaacaattgtgaggcaaattttttccctttttactcccgtaaatttaatttcttatatttcattttttaccgctctatgtcaccaatcagatcaaattaatcgattggaataatgtgaatacaagtatataaattataaaaccagaaggtccagaattcaccacattgtttaaagtcaacatgaacactaatagaaacatgactaaggaaggactatatatggaatctttttgtataggaatatttggcccaattaaggcccaaacctcctctctttttttgaaaagaagagaatatttgctgcgttaagttgaggcatcgtcatcgtgaaatgtgcagctccggaaataaataatcactaaaataaccagatccgatctactgccccggtttctcgccggaatctccattctgtaaccggcgatcctctttctggtataactcttccaccaaaatttatttccgattactttctcctttcttcttgttgattttatccttttgatcattcatgttcgagtaaacgataaaactgttgcttgaagttttttaatggcgatttctaatgtgatgttagagtctatgtctagatctctattaagattcgaatactgaattcgcgggaagtggacttttttgtttctaatgattgatttagtactgataagtgataacgatgtatatagtttttgttctggacttgaatttgaaaacatacttttgttaaagctcagttatggaagacgtgaaagggaaggagattattgatgatgctcctattgacaacaaggtttcagatgaaatggagagtgaggtgatttttttgaattgtttcttttactgtttggagtttagctactagagttttaggttgatggaaggaacaaagttatgatctttctctgtattcgtaaaccttttcgcgctttgtttattgaccattggtattggtgttcgatattgtaggaaaatgcgatcaagaaaaagtatggaggattgttgcctaagaagattcctttgatatctaaggtagctttgtttttgccattgttagaatgaggtgtaataacttagaagctgattcagctgtgtttatttttcgtttaaggaccatgaacgtgcgttttttgactcagctgattgggctttaggcaaggttagtcttttgcattaccaacctttgtaactatcctttcttcctgctactgtctttgtttgtggtgtggaatatataaagggctcttaagtaactaaagacatgaatttgacattttcatcagcaaaaaggacagaagccgaaagggcctttggaagctctccgcccaaaactgcaggtaaagtgaaaactctacctttctttgtttgttcatttgtttcttgtttgtgtctttgacattaatatctgttcgtgttacagccaaccccgcaacagcaaccaagagcaagacgaatggcttattcttcaggcgaaactgaaggtaattagatatgaatctgtagctttgtttttcttgattccattgacatattatattactcaagtcattcattcaacgtatctctttgaaatcagacactgagattgataacaacgaagctccggatgaccaagcctgcgcatcagctgtggatagtaccaatttaaaggacgatggaggcgcaaaagacaacatcaaatcatgaacaacatatagagatctcttgaggagcgcaaacaaacaacatcacaagtcaatttacagaagaataagcgaccaggtttgctttgcaacggttgtaatatcaagtctcttaccttatcatacttgggactgcaaatctgtatcacttacaaacctcctggcttgaaacgtctattggacgattgcaaatgatttgctttaatgatccatcaaatccctcttaatgattcattacgcaaatcaagttctatactcaactgaacaaccaatcctggcatttttataattgctgatttgtcttgatgttacatgagatccaagattacaataatagtctttgtgagttatgacgtcttactcaaacaaaggcttcataatgtcggaattgggaaagtcaactccaatactttcttcaccagtagcggcaacttgccgccttggtttttgttttattctctctttttcaccaactagtcctcttttctttgttgtttccttcttgacttaacctttccaaagtaagtaactttgttcccaccattaaattagagttttatatgaccatgtatgatctaagacccagaacactcaccttccttgaggttgctcttcctcccactactgatactacaccgattttttcactcctctttttttcacaatgctcggtgttcaaaggtaaggatcggactcaaatcaatttgttctcagatgctcaatgttgatcttagaattcacaaacgaatctttctacttgtatgtcatgatatatctgcaaagattctgtcttttgtattgataacatctggaagtgtgatttcttgattagagagagttctgtatgattcagaagaagttgatagtgtttagagtttggtgtgtgacttttatgtacatcaggattttccaggagcacatcatccgcagaggccggtggtgtattaggagggtctactcgtggttttttaacttgttgatgcagtcttattggaacgaggtttgtgtttatgaactggattgcatcattcgtttgactaattcctctgtcttacagttttgatttgctctgtttcttctttggttaagattgaggattgcaaggtgaagatatttgataaactgagtgaaaaagctgaaaaggttttggagattggtattggcacaggtcctaatatgagatactacgctgctcgcaatagtaacgttactctatatgggttggatccaaatcccaaaatgaagaaatacgcacgcaaatccgctaccaaagcaggattgaaacctaaaaactttagattcaagcaaggagtaagttttctttttggcatcctacattagtcttttttcataatcacctggtttgatcttgtttatcattaggtaggagaagctataccattaaaagataactctgtggatgcagttgttgcaacactggttctatgttctgtctctgatgtcactcaaacactcaaaggtaatcctttcttcccttattgagaaagtaagtaacccttttcagaagttcaatggtaatttcagaaatcaaacgtgtgctgagacaaggaggggttttcatcttcttagaacatgttgcagcaaaaggtacataaatttgagagatataaaactcttatattgcagacaaaacctgaatattcgtattcggttgttgcagatggatcgttcttcaagcgtttgcagaaattgttagatccgttgcagcagagacttgcagatggatgccatttggcaagaaacacgagagagtgcatcttggaagctggttttagtggaggagttgaagtacagaccttttctatgtatagcttcccttggatgacaagacctcatatctatggactagcttacaactaaaactatcatctttattcaattacactaaaatgattggctttgaatgttttgattcgctgattgctgttattactaaataatatggagaaaaaatgctaattatgtgtaattaaaaagatttgattttgtggacagaatctgaagtagagaaaaacatatcttcatgttactcttatgctctgttttggtatatgagtaatttgagcttttgataagttaaaagaatggagattctccacttctcaccttcttcatcaatctcgacgatcatacatagacctcgaagaaagattatggctttgagagattccatcaaaacccagatgaatctcattacgacagagtctgtttcatctttcaggttctgtccttgtggaagaagacatttcataggagctgctatgacttcaatgccatttcttccaatctctccctctcacgcttctacctcaacggtttcttcctctgttttgtgtttaataactttacggtttatctagaattgatgaaaaatgcatcctttaatcatctgaattcattttattttaggaagatttgaaaagattacgtcctccaaagccagattggtatgaagaattctttgcttggtctatgaattcagaggtggaatcgtacgagaaagaggctagtgaatttcatgagtttagtttcattcttttcttatcttctacagattcctttatgtcttattgttattcttttgtcaggtttcagattacaagatgaaactctttgataacttagttgggaaagcagaaaaagttttggagattggcattggaacaggtcccaacttcaagtactacacagacattccaaacgtttctgttattggtattgatccaaatgctaaaatggaaagttatgcgcgtaaatccgctacagaagcaggcttgaaacctgaagaattcacattcgttcatgcggtaactttgtgattatggatcaaatatgatatcattagcaaaatagcatccccctgatgctacattttttgttattgtgtctagcttggagagtctataccgttagaagatgcatcggttgatgcagtcgtggggactctggtgctttgttctgtcacagatgtcactcagacgctcaaaggtaactctttacctcctttgtattcaacagcttaagagtgctcagtaacagtttgagtttatgtggtttgttacagagataaaacggatactaagaccgggagggatatacattttcattgaacatgttgcagccgaaggtacaacttccgactcgaaaaaatcatcagcagagcgtgtagagaactgatgaaactaacccatcgtttggctttttctttggctgagcagatggtacatttttgaggttggtgcagacagttttggacccattgcaacaagttgttgccgatggatgtcacttgacaaggcacaccggagagtcaattttagaagctaggttcaatggtggtgcagatgttaaaaagacatctctttctaggcttgcttacataagctctcatgtctatggagttgcttataattaataaaaacacaggaacatgtctcttagattcatccaaggtatggtgataatttgtaccttttcaatgagatatataaataaatgtaaatgatcactctagcttattttatatagtaggataagtctattttattgatatggatgttccttgtggaatataaactacaatatctatttcaaaaagcttcagtcgtcttggaagtgaaactctaaattattaccttaacaatgttcgaggtaaggtttcaccaaacgagatgagataaattattacctagaaagctggagacaactctaaagactaagatctgagattgtaagatcattttggccattatgatgaagatgatgactcgagttctttcatcgccttcctcacatgtctcgtcgctcaaatactcacctcgcagagtgattcgagcttcacgagatcatcttcgtgctgaaactctaaagagtcatcaacttccttcaggctcctcctccaccagcttatgttcctgtggaagaaaacattttctcgaagcagctagcccgacgatgccctttcttcctatttgttcacctaatgcttcgcgttccaaggtgatttgtatttctttttatctttctcctagatgcattttgtgtataggtaccaagtttttacttgtgtgacaagattttactagtaaagattctgtttctttggcacaaagattattgctttggtactctgaatgaatgaatatggcactcttatatacttgagatgtggaggaaatgtaactgactgagatttatctgcacactaggatgtttcagaaacatttcatcctcagaggccagattggtataaggagctttttgcttggttcttgagcacaggaatgcgatcttatgaagcagaggtcagtctttgtgatttaaatgcatcattctatgatccatttcttgagaatgatagatctttttcatgttttatgtttgtgttatttggtaagatcgccgagtacaagaggaaactattcgaaaaactggctggtaaagcagaaacagtgctggagattggtgttggtactggccctaatctgaagtactttgctggtaatgaaaacgtctgtgtttttggtatggacccgaaccataaaatggaaaagtacgcatgtgaatctgccagagaagctgggatgaaacctgaaaactttagattcatgcatggagtaagtaaattgctctgttttgatttgtgagacatctctttttgtaatcccttgatgttacttatatgttgatcttaggtaggagaagctataccattagatgatgactctatggattcagtggttgcaacacttgttctatgttctgtctctgatgtcactcaaacactaaatggtaaacttcctaaacccttaaaagatctcactggatatattacttacctgattggtatcttcagagatcaagcgggtgctgaaaccgggtgggattttcttattcatcgagcacgtagcggctaaaggtatgtattcttttacatcaaaccccttgaaaagacaaaactggaatccaaagtttttgtttttgtggatgcagatggatctttttttaggcatgttcaaaatgtactggatccaatacagcaagtagttgcagatggatgtcatttgacaagaaacaccgacttacacatttcggctgcgggtttcgatggtggcactgagatcaacgatacggcaatctatagcttcccttggattataagacctcatgtctatggagcagcatacaagtaaggtttcttgcttactacaaagagtcaaatgttgacttcattttcctgtttatgcaaactaattccaatatttgaaacatttggccactctttgttgtgtcaagactcctatgaaatgttatgtgaactactggttggctttcttgggtttatttgtgaactaaaacgggccaagtttgggctaagatttatgagacaagtcaaaagcccatgatcatgggaaacgttcttctttggacgtgagagtccgagacaaccaaaaagttatgacagcccactttctttcagaacacacattttaacctttttcattccaatagtactttccaattttcatatcataggaatataccaaagatagagtgttttgagagacggtcattatgtttggtttagaagttcttttatgattattgtttaattctcaagtctctataacgtgtcatgttaattattttaaacatcctagtaatagaaatatgtctaattagagaccacaaaaagattcaaaaaaagtgccaattaaaagagtgaagagatttaaggattatccgggaagattcggggagaaagaaatgtcgcagtgtggtgcatgatgcggctacagcaacggaagtaagaagaaaaggtcagaaacatgttgcatgttcccaaagttgcacatgagaggttcacgtcattgtcatatccactttctcacgatgcaccgtttatattcacgtaccaaacgctccgattctttttcttttcgatttttctaaactgtttatcataggtcagaagcattcggtttttcgatttaggtttgttcgcaatttactataaaatgaactaaatattatcttggttcggttctagttatatttggataaacaataatagaaatatctatttaatttgactaatactatagaatctaataggtatatttatttttttgaaatatgtatttggtttttatgtccacccctagtttatcacatcatttctccttttatccttgaatattttaaaagaatatggaaggtctctatatgtcgtcgttaggaatagacaaatacatacctatctattcctacaaaaagtcgttttcgtaaaccaacttacacaaagtcatctaaaaatcttttttctcattatattggttagaatctctaccagaataactgatattcgtcgacactcttaacaacattttgaaatatgcatttcttattttacattattttgttgacaatttaaaggagaatcacttgatatgtagattgaatacttttctcaattaatattttagttgaatacggcctaatttagtttacatgaaaactcatcgttgaggaatatactgttttaaacacacatacacatacaatttactaacttttttggtatgtttatcaaaaacagttcaagtaaattaacgaatagataatgatttagttacaagtgacgatttcatgagaatgactagtttatggctcggcctacaaagaaaaaaatacatattatttgtgtggttgcttctgttcattcaagtgtcaagtgttccacgatatgtagggaccaattttacttcttttcacgtgacatgtttgggctgatgttcacaagaaaagagttatacgaaaatatgatataatcggatgttaagaaagtaatatactttatctgaaaatatagacttattcgtgaaagatttgtctggagatagaggctaggcttgtaggctgaccttaagtcgcaatggaaacgattaatatttataacggtatcttatccaagatagtatatatagaagcaaaatcattgacatttcatcaaaatgatgtgaaagcttttatttaatttggtcccagcaagatagccatgttcgtagggtcgtatactcgatcgactaattcaatttaggaggtgaggaattttacaaacaaagaacaaagatttcctcagatattgtttcacaagacaaaatgaaaagaaaagatttctttttatctagatacatattggtgtttaaaaaaagatacattttattttttctagttgtagaaaaatgtggatgttcaaaaattcattttacaaagtaatattaatttgtaggataattttagattattttgttgaatatataggatataaatatgaaatcttgtgaacttttaaactattgtgaaatatgtaaattctcaataatttaaagagaaaggaaaaggtataatgataatatatgggtttaggcattaagcatatatgtgttgcgtcgctattggagatgcaacttggttttaagtttttaacttgggcatgtgccaacataaggccaatatttaaagagcccctttgaaaaggaacgtttttaaaaagtctttttaaaacccactcagaaacaatgtgtaaattcctttaacaaaataaaaagataataataaataaataaagatatatatataatataccgttatgatcgataccaaacttaacgttctcgtctaaattttgtcaaacaaaacaacatcctttataaaaaacttgtttatgtcagctgattttttttgtttaacttttaaattgaacaatatcaattgtgtctggtattcgattacagttctttaattttgtaaaaattaactaaaacaaaatttacgttgcttcgattatgttccggttgtaaaaatatttgttcgaattgagatttcttaagaattaccgaactaaaactggaaattttggttctctctaattcgatttaaaatgattatttcagttttggtgagttagctttattttgtttacgtaatcattaaatgtatttcatatatatatatatatatatatatctagtaacaattattaatcgtcaatgtactttgatttattcgtttggtgttgtttagttgccctagtctagttagtttttagtctcggtacaaaatattttgaccgttaaatataaaatagaattcgtttggtttagattttgactaatttcaattcggtatgcttcgcgctttttatggcaatccctaaattaacggtcttgaaaaatagttataacgtcttgatcaatgcgttatccaaatatgtgtagtaataacattcaatccattccgatcaatgatacaacagcactcaagagaggccatcgtcaccagtctgcagtatccaccactcatattaaaaagaagtttgacttgtcaaagacattccacatttatttaagattttagggataacctttatgccttttcaaaaatactacagtcaacattataaaaacattagagccaattcagagatttctttatgaattaaaaaaaagacaaaaaaaaagtgatctaatttacctttgggttgatctcgatgtggtgattatgtgtgtaacacatgatatatgtagcaagtacacaatgtcactaaaagtctaaaacatggataatataatgaaaacgatgagcattttaattggataaccttaatattgtctaggtttttaaaaagttacaagaaaaaggaaaatagttgacggcattttcctttggtgataaaaagctgtattctattactcaaatgcgttttcgctatttcttatcttttctttccgtatatatgtatatatttgcacaggtttccgtatgattttttttcacacctttcaagtttgggggattccaaaaatttaatggtttagaatagtttcacgtaaaccaggtaggataaattacaaaccaaaaaccggtataataaaattggttcttacttatatatctgggtcaggcaggtttaagtgcgagagtaaaactagatgaactttttaaatcatattaaggaaatataaaagacaatttataatatttaataaatattttgtcgtagaaagcggccccgcggattacggctaatttaaagagtaaccaagcacgtggattttgatttttgattacataacttgtatcagtgtatgtttacgtcttattttctttaattgccataatcaagatcatgcatctctttttctagtcgatcatagactattaacttaggctaatttttggaaactacagccacccattatcttaataaacccattgaaagagttataaattttgcatcaaaatgcataagaatttttataattaagaaattttgtttactaaaaaattatataattatacataaaaagtgatggtagctttacggttatatatctcgtgattagtcaagaccatatgtatttattatgtatacaatctctgcagaatatatatacctcatatatcactataatttagaaatttatttgaatgcttaaatttcttcaattataattagaagaaaaaaactgaaaaataggagatgtaaatcaatgttagtaaaatccagaaaccaaaaatggccaccgacgatggaggtgctcttccagaggaagatgttgactattgtcttaatcttgtttggcctaaaacgaatagtagcaacaaattaacctaattttccttttcattgtcataatatatggtaacatgttagtgatatagaatgatgtgaacgttggtccataagctatccgtttgacgacgagctcatgtcttagttttatagattgaaaagtacattttaacgatgtttgggaagatcgaccaagttcaaggatatgagaatttgttcatattcccttgcttttgttataactattatagtattatgtttcatagaggagcaactgtatttaattttcatagaagttttgtcaatacgttaaaacaaataattaattattttatttttctgaatagtgattatatatgttaccagtcagtcggtcacatacatcatgcatggctttgataatatttatggctaattaacaagcataggtaatctttttccaaacatacataaaatgggtatttgagaaaaaaaattggggagatttggcaaataataaataaataattaattaatcaaaagagtcgtaagcatttgcatgattatgactaaagcacatgaagccgactttaagatttgatacatctcacatggtcatcactatggtgataacgtcacccacgtttccaaaagtaatatttctcatctttcgctaattaaaactataggcaaataaactagtctgtatttaagaatgtgagactaaataaattatttactaataggaataatatatattcctacatgtgaatagataggttggttatactacgaagttaaggtgtggtcttgttcatgttcatcaaaaatagttcaattatctttatacattaaggaaattgtatacattaatacatacactgatacacatacgctcggcccttaaacgtatcgagagactgagtacagtatggaatacgtagtttgttcacataaaaagtgacggaatcttcgttgcaatgtcatgttttcttttctttttccggactattcgttgtaacgtacgtcaattgttaatcaagatgtcttaattaattaggatgagtaatgcgctttgccttatttttagaaaacaattagatgtcattttacttttcgcaaacaaaaaaagttattttcgtaaaaggcaattccgcattaacatatatgatagttacatgggatgggggcaaatgtgcattagtaattagtaaaatttaaatcaaagaaattaggaaaaggacaaaaaggaagaagcaagtgtctcggtccctttgcagcaacaacagtcgaaagataaatttttagaccgggttgatctatatttcatattttattgtcaaattttttttatataaataatatcgagaggaattacttcaggccaaggcaaccatgtttgtgatttttagaggatgatattggatttcttatgtcgataatatacgattctcttgtaaaatttcaggtgctagtaaaacaaaatataactaaaactaaattttacggagtttaaatgcgatttatacaactaaaatatcatctatattaatttttcacatacacatttcttaatatgtgtaacatcctatattgcatatagagattaatagaggatgttataggttataaacatgtctatgtgtattttatttttattagataactgaataaatcacagaatctacattgctatcaaaaacatttacgctaaacagatatgacaactcttaaatcacttaatagtcagttatgtggacgaagccgagtattaaggtgagcaagaaaaaaaaaacacaattttaaacacacgaattttgttttaaatgggacaaacctagaaaaagaattacgaatttacaccatatcttttgagttttgagacatttactactaaacacatacgttggttgcttatatttgttatattaactcaatcatttatgcatcagtagagtcttagttaggtgattatctaatccaagaagtaaaagttgaatcgtgagctgagataaaatattccaaatatagcattggaccgtgaaattggaatcttgggaaacccctcgacgactagaaattagtttcgaataaaaatgttaaaatataaaatgattctgaagacacaaagttggttaaggtcgttaaaaccggcttcgggaagctttgattttgttttaattttgatattattctttagaaatttgccattgttcctaccatcacgctaatgcttatgaatatttttatacacggagacaaatatgcgcaaagagtggttgtctgatttacatcagagtatcagactacgaaaacaacagatgataatatatgtataattagaatataaattaactatgtctaaaaaaaaactaaaaaaaaaactatgtctcgcagaatgaatttagtttctacatagatttatttatatgcataaactaattaataaaacctatattgacaattgctctttattttctgacttatatgcatgtgtaagtgttaaaaaaaaaactaaaaaacaattgtatgcgaagcacacaaagacatccacatgcatatattgacaaatgacaattactctttacgattgtcgtcgtcatgactgtttacttaagcgtgtaagtggcataaattatttatccacaaattatttaagcgtttatattaaggcacctccatcagtaatatttcttctactagatacttattattaaaataatataaagtgatgaaaaagaagagagaaatgaaaatcgtctctgttttcagaaactttgagagatgtttctggtcacgtgtttttccaaaaatagttgattttattttttaaattaaaatttaatactttatctgaatttaattaaaataaataatattttattcataagaaactattttttgaaaatcaaccgatgtagatggccttagttctatatatttatatatattcaaattttatgtttatatcaaatttaagaatcgtttttcactttttctagacaatcgttttttctttggtaaaatgcaaaacataattctttcttttccattataagatgtttaaacatacgtgattttatgtatttaacatgtaccgcatgttaacgtttggagaagaatgacgatgaacaagtaatgattattagttgttacactaatcatttgtagatgaaaatcattatcaaacacaattcaaagaggacatattcgtgtcaactttcttctgctcatctatcaatacatgcttacaacgttagctcgaaacggcgtctgtcatccacatgcggagctatctctgtgtttttcatttatttatcttctacttattaatagatttttgttttgtttctctcagaaaatattactaattgttaaaagatgattattttgaagaactagcaaacggaccgtccatgatattttgtggaccatgttttgagctgaaattacggaaacttggccgtcgatttctgccgttgaacttcttcaccttattaaatttaatgtgcatttattttctcgatatgcaaactaaaaaaatgtgactctaaaaaaaatctatctaaccctaataaatacatttgcagaaacaccgtagaagctccttaaaagttagatacttcatcaccaaacacatgtaaaaattttattttgtcattaagtaattcaatatatgtacttccagcgacattttttctcataaaccagacacgacttcttcatcgatcgtacataggtttgatgattttttaaaataaataataagatggttacgcatcgaaacattagattgagataaacaaacgacaaagctatacgtgtcgtggtacatcgatctcaaagcagaccactatgacccacttggatttcaacttgaattttctttgtctttatgatattttctttgcttttcttttgaatattcaatttcacactcagtaataaaactttctccagcctccatattgaccttaatccattacttctacatactataccaaattcaaaatttagaactacctattttgtagactaaaactttctcaagcttaaattgtttcttgatagactaaatatattatcccaaggtaaagttggtgtttatgtgtgtttgaaggcgcctgaaaaaaatagaaaccacacgactcgtcttgtatgtagctcacatgtgtctttgcctctttgctttttcatgccattaaatattaaatcttcagcggtttttggtccccaacaataaaaatatattttcttactatattctatagttcattaatattacattgaataaacctaatgttttttaatatgaaaaaccagaaaaataaaattgcattcggagttttggtcttgttttgaaaagaaaagaaaaaagtggaagctagttgcattaacattaaacagtggcaaaaacgtaaatcattcactcactaagtttttctataaattgaactactcccctcctctgctttttccaattctaaaccaaacaacagattctcataatcatctcttcttttttcctctttacgaaaagaagaaagatcaaaccttccaagtaatcattttctttctctctctcacacacacacattcactagttttagcttcacaaaatgtgatctaacttcatttacctatatgcaggtttacacaaaaagaaaaaagaacgatggctcttgtcaccttcttgtttattgctacccttggagcaatgacgtcacatgtcaatggttacgccggaggaggttgggtcaacgcacacgccacattctacggtggtggtgatgcttccggcacaatgggtatatttccttgaaccttctctcacaagtcacaaggctttaaagctttcaagatttttcctttaccacaattcttatgaaattttgggttgcaggaggtgcttgtggatacggaaacctatatagccaaggctatggaaccaacacggcggcgctaagcacggctctattcaataatggtctaagttgtggtgcttgcttcgagataagatgtcaaaacgatggaaaatggtgtcttcctggctcaattgtcgtcacagccacaaacttttgccctcctaacaacgccttaccgaacaacgcaggaggttggtgtaaccctcctcagcagcattttgatctctctcagcccgtatttcaacgcatcgctcaatacagagccggcattgtccccgtcgcttaccgaaggtaaaacctaaaaaaacatagctgctctgtttttacctcaaaacagagtatgcgactgaataaaaaatgaacatgaaacagagctgctctgtttttcttccaaaacagagtatagtgtattattggaatcttactccgttttcaactttttgttgttgtgtgtttaacagagtgccgtgcgtgagaagaggaggaataaggtttacgataaacggacactcttacttcaacctagttctgatcactaacgtcggaggagccggagatgttcactcagcgatggttaaaggttcaagaactggatggcaagcgatgtcaagaaactggggacagaactggcagagtaactcttaccttaacggacaatctctctcattcaaagttacaacaagcgatggccaaaccattgtctctaacaacgttgctaacgcaggctggtctttcggccagaccttcacaggtgcgcagctacgttaggaagagtgattcggtgaaaattcatctcattgatcgtgtggtattgacgtgttgtagtagaagcagttagagagaggggcatgatagtaatttggtcctttctttcaattgaggttaacctaaaaagaagtggtgcttcgagtgcttgattttgcacgaggccttgatgatgtcatcttttgggaaccttttcttatctttcttcatttttattggtaaggttttatgttatactgatgcagaggtggtattgagttgaagtaccacccgctagtagtagtagtagtctctcgtgtcatttgtatcccttctcgaagcgagagggagagttttagattttattaatctcgttaaagtcatttgtatgttgtaaatttttcaatttctacaagtaagaaatattggagatttgtttgttatatactttgtgtaataaattatattcatataagagatcagaaacaagatcggcatgtttttgtttacttttgttccacgtccggcatatatttagaattcacatgaattgcattgataaagcatatattttcatttgttaagaatttaaacactgtaatagatagttaaatttaactttacgaaagagtttacaaaaagtacttcaagaacgagaaattatcaattgtcaaatctagactaacctatcaaagaattatctcggacaagtagtagttttacttgtattgtatttgcttgcatgtgaagagatatggttatttgatgatcttaactatatggtaggtattatggtgaattatattaagaaatgttttcgtgaaaaatatatattcgtcacacatagtcacatgtatgaaagcctagttgtaaccgcccgcccactcttttcaaaacgtaatagattcgtttggaagttataactatgaagacatcttttttctagactcgacaatattagcaatttattcgtcacccatctgcatgtaaatatataatggtcgcgtgtattgacatattattatttgtcaaaatatatttgtgcatatgaacaaatgtattacataagtcggaaaaataacagtaacgttagaaaaaatataaacgaaaataagatatgtcgcttcattaatatacttttctttttcccaccatcaaaatatatttagctaactaattcgatcattttttttttcttttttcaatcaacattataataacattagcgtctttttctctttgattaatttgcaaatgtataagagattacatatgagaaaatccatgaaaaaaaagaaacgaagcaaaaaaaaaaacataatgtagtttgttgacaggttattttggccagcaaatctgcatatctaatagattttctatacgtggtttgtagacaaaaaaaaatacgaagcattttgcgggaaaaaatccaactgatttgaaagaataaaaaatcagccatcagaataataataagaaattaactatactatactgcaaatagcatgttgtgacaaaaagaaaacaaaaaagaagaatgacgtgcacgtagtagtaacagtaatcacgagtgatacagaataaccgaagccatgtgcttttctgacaatattttgttctaactacccacatgagtacctatgggtccccgcagactcgaaacgctaaccaacatatttcacatcgtccattttctcaacgggccttatttagcccattctctcattttaagcattcactgagcactcttcctttatgagattcaacaactccaaactattatcgggaaattgcatgaacactttcgaaatgactattcagttttctctgtttactactcttctatcatttgatggggacaaaatgaatacttcatcagttcatcttaaatattacttttcttcaaattataataaactcttgatgtggtggttgcagtgtagttaaggatttggaaactgcaaatcaaaatttttctagccaactcatattatgttattttatagatgcgtaagcagaggtaaacgcatttatttacatctctcgttcacagcttagacttgtattataaatagtatataaccgagaaacaatactttgcttacgctttttggagatgactctcgagttacaagtaacttaaaatagtatcatctagtgtagtatgtgtccatgtaacctatcaatcctagcttcttcggcatttatgactcgttgatacaaagacaaggcgcgttttcggatcaatgcgtcttatgtttttttccggagctacttgtcagtttggctgttgcatattagatatgttcagaaacagtcagcaaaacaagaccagtaataacagagttttgaaaacaaatgaatgatgaacaaaccgttatttacccaaaaatatagaggatcatcgaagaccgcaacataaggtaatgtttcagaagaagcgccgttgttttttcctccaatctgaggcttataagaagcttccaagatctggctaacgtagtaatccgcaggactgcctaatagattccactcagctagttgcttaagcttttgatcatttaagaaactgagattgctgaattgttggttcggatcagccgatgtcccgggaatgctaccggtttctagtttttgtaagatatctgagcttttactaaagagtcctgagtaatttccaagagctgaacttgcagaacacgttatgtccttgtacatgtgatgaagctgcagattagggtcttcttcttctataggaacattcatgttttcatcggtacgaacccatgagaaattctcaagttgttgctccatctccattccgaaatctatatctatttcagtctgcaactgcataaacacaatgttttggctctatgtttatacatatctcaaaacatctttataatgtccagagtgatgaatccttacctggtttttgcattgtgaggacataagttgttgctgctgacgttgcggcatgctcgcctataagtcgtaataagatgcataagttttgttaaatgagaccttaactcattatttgattatttgggaggaagatcataccttacgaccatagatttgagccagagattgtcttagtgaatgttctagttgctgcaaaacatctacgctgtcgatattatctacatcggtccagtagctatctcaaaaaaccatgtaactcacaaattagaataccaaaaccaaaaggaagatttaactgaagtagatagaagatatttgcaccttagtcgtgtgtgtatatctgataattgtgtttgcagaaacctgattttttcgctaagcacctgaaaattcccgtgtcgcgaaacgaattagaagatacttcagaatcatttattaacatcatagtagttgtacatacctcaactgttggtgtactgtaaaagaaaacaaaaacgagtcacattagtagtaatacacaacaacactaaacaagaacaaacagagaaagagttcagaaagaatctcatattcttgatataatataacacacctaattctgtctagaaactttgatatatctatatcgtggttagctttcatgaaagttttcctcaaggcctaagatattatgaaaaagaaatagtattaatgatagtttaggagatgagaagagaagagagactaaacagagccaagaaccactacttacttcaaggttttccaacttcctgttcaaacgtagacaaaaatcgaagaagttatatgttcagtgtaatgtcaacgcagaaagattctagatcctagaaatgtgtaaaagtgaagagaagaaacctctttgctctttcttgaggagagagttgagcaaacttagcaatgacttctccaatgctaaacaaaacccaaaaaacagaacatcaaactaaacagaacaatgtgaaagatactttggtattaaaaaaaaagtgtgatcagacctgtgtttgcctatgcaaattgaagcctttcccatgggagaaaacatgagaagcacaacatctatgtcgcataagatcgataactccttagcctttttcataatcccatgtctccttttcgtatacgtacattgacgtccattcatgttctgtagtttctttatctttagcttcactctacccatcctgcataacttatgacccactcatatgaacaaagagaatacaacacacattttgaaactaacaatgagcaacaccaagaatcaatggaatagcaaacgatacccacttggccacttcaaagattcatacttttgtcaataaaatccccaagaaggaagagaaaacttacctaatttaagacaaaacaaaactttccatgaatcagatgctgaacataaaaactttccttatgaggaagaaagaaaaaaagagagaaaaggacaacaaaaaaaaacagagcttttggaaacgaagagagattgtgaaggagagagaagaaataggtattgattgggagaccaaaaaaatcggaaattagggttggaagctagagactagggaatttgggatcgtttccattaattttcatctgttacttcacagaacagaaacaacgacttacccgctttctttttttattggaccactcatttgggctaaccaccaaagtaaatcagttactagaagctactaaccgacgtttcacgtgtcaagctcatcgggtttcgtttcctaggaatgtggcacttagatctgatgaggatggtgccgtaacggcgaactaagcaccttacggttgagaatcatacggtctacacgtgttgattagttttatataaaccgttgtttcttttgttttatatttcacgtgtgttttttcttgaaccatctatgttttgtatagtacatgcttattagtatgttttgatgatttcagatatttggtaaaagagatttttaaaaaagaaaaaaattggttcatacttttagaaagtgtgattagaaactggatttctatgttggtgggggattaataagcctgtatttgtcaaccaagaaactgaattcgacttaaacttttgttgatctctcactgtagagacatgtttaatgatttcgatttgaactccaacggttgcaaaacataaatacagtatatggacatagacaataaaatcacgtattatatagaaccttcgacgtgagcgtcctcttccaagagtgggcgtatcccgtattcacctatctcccagtcgtcatttaagttgaattcgaactcaaacaaaagctctatggattccacacctcttgcttcaacttcgaatgtgtacagaggctctgttaaaagtggatatagagttgggctttttaaactatacttgcgaccactctgtttctctacgatggtaagatatacgtacccccagttctcacagtcaattttgtcaccctttctaaccagcaagatccaatctcaagactttcttcttcttcttcctcttcttattcttccatagaagccgcgaaccaagacctgatcagattctaaaacaatgtagagcaatatcttccgacacaagtcatggaaagatccactaacaacacaacaacaaagacctcgagccctaataaacctccttacagaatcccttcacatgttttcgcaagaacaacctctacagctccagttgaatggagcattgtctccaatgaatctcttttcagtatccatattggtaataatagcttcacgtttcctcagcatccttcaccaataacttctcttttaccatcaccaataactgtgttacaaacatatataccgtatatggaaatagacaatacaatcacgtcattatatagaactttcgacgtgagtgtcctcctccaagagtgggcgtatcccgcattcacctatctcccattttttcctgccgaattggaacttaatgacaagctctacggatttcacaccttttgcttcgatttcgaatgtgtacagatgctcagttaaaagtggatatagagttgggctttctaaactatacttgcgaccactctgtttctctaggacggtaagatatacggacccccattcctcacagtcaattttgtcaccctttctaaccagcaagatgcaagctttaaatctacaagatgtacgacaatgcctctcattcaacttcactgccagagaacctccagtggtagctcggtaagtgaaaaacgcaggcacttctctacctggtaacatcgtgtagttacttgtcgatgtctggacgatgatatctctccctttttcattcagtttccagcagtcaataaatttgagccaaacttggggattcggaaaggagcaagcaagtgtctccaaggactcacatgattctgcaactaaaactgataaggaatctggaagctgcgggagtgataccagcttcgtgcatttgttgagatccaatttcttgagattaatgagattcccaatagatgaaggaagctctactaggcttgagcattcactaagatacagttcctggagattaatgagattcccaatagatgaaggaagctctactaggcttgagcattcactaagatacagttcctggagattaatgagattcccaatagataaaggaagctccactaagcttgagcatccacttagatccaatttcttgagattaatgagattcccaatagatgaaggaagctccactaagcttgagcatccacttagatccaatttcttgagattgagattcccaatagatgaaggaagctccactaagcttgagcatccacttagattcaatgtcttgagattaatgagatttccaatagataaaggaagctccactaagcttgagcatccacttagatccaatttcttgagattaatgagattcccaatagatgaaggaagctctactaggcttgagcattcactaagatacagttcctggagattaatgagattcccaatagatgaaggaagctctactaggcttgagcattcacttagattcaatgtcttgagattaatgagatttccaatagataaaggaagctccactaagcttgagcatccacttagatccaatttcttgagattaatgagattcccaatagatgaaggaagctctactaggcttgagcattcactaagatacagttcctggagattaatgagattcccaatagatgaaggaagctctactaggcttgagcattcacttagattcaatgtcttgagattaatgagattcccaatagatgaaggaagctctactaggcttgagcattcactaagatacagttcctggagattaatgagattcccaatagataaaggaagctccactaagcttgagcatccacttagatccaatttcttgagattaatgagattcccaatagatgaaggaagctccactaagcttgagcatccacttagattcaataacttgagattaatgagatttccaatagatgaaggaatctccactaggcttgaaattctttttaggtatagtatcttgagactaatgagatttccaatagatgacggaagctccagtaaacttgaacatccgtggaaataaaaagcctcgagattaatgagatttccgatagatgagggaagctccactaggcttgagcatcccatgagatccaatctcgggagattaatgagatttccgatagatgagggaagctccactaggcttgagcatcccatgagatccaatctcgggagagtaatgagatttccaatagatgagggaagcttcaataggcttgagcaaccttgtatatctaagctcttgatattagtagcattcccaatagaggaaggaagctctatcaaacttgagcaatcggaaagaaccatttctaggagattaatggctgttgagagattaggaagctctttcaaatgactagaataacgtaaatccatcaccttgagattgacaagcggctgtaatgaccaaaagaaaaaaatgcaacacaagagaacaacttaaatgccatttaaaggctaaaatcatgttttttcatctttatttttgaaactaacaattttatacaaaaatagaaattaaaataaaataaatttcataaaagaatggtaaatgcttacttgaattccttcccacagtttctcgagctcactgtgtttcaatattatcttgacaagaaacttcagattaaacttagaaggcaaacttgtcatcggatagtaatcccaatgtagaattctaagttttggaggtagatagtttagaccttgtggcaagtgcaatcttccataagaattttcatcgaatctaaaaaattgaagattagacattccttcaaaaactctatcacttatatttagttcgtccatgctccaataaacttcgaaatttatgcctataacactttcacttccctaataaaatacacaaatataaaagtaaaggtggttagtaatcaaacgtattaaatttgtatatgagtaaaggaactgaaggataaatgacaacttactgtatgactagtaagtacttcacaaatctcctttccatcaactagaaattgacgtttcccaggttcataaacggattggttacgaacaatttctctacccaattgaactagtagattatgcatcggttgagttaaatcctcggatatgagagatctttgaactaagacctgaagccctcgctgcacgtttgagaatttgtgacgaagagtatcttcaaaggtatgatcaatgccttcgtcgttaaaaaaacatgctatatggagaaacaaatctttgtcttcgtcgtccaagacatcgtaactaaattttaaaatgctccctatttctccgtcaaggcgaatccgtaaccttggtagttcccctttccaatcttccttggacattccccggaaatgagaacccataaccctaagtcccaaagggagattaccagcaagtcttgtaactttcgtagcaagcttctcgaaaccatcatcaggggaatcatgaccaaaagcatggatgcagaagatttgaagagcctcatgatctggtggaaaatccacattgtaaatatgtttgatctgaaacgccttcaaaagttgttgatcttgtgttgtgatgataatacgagatccaggaccgaggcataccgcctttggcatggcaagtaattgtactaattgatccaccccatcaagaacaataagcactttctttcccatcacaaagttttgcgcagttcctaactgatgaatcttgatatcctcttggttaatcaattgagctagaaattgctgctctaattgcaacttcacatcgtgatcatcagaacaaattggtcttgtataacttggtttgaatttcatgaaaacactcatttgaaaaccatcagagatttgattatgtagaactctagcaatagtgctcttaccaattccagaaggacctgaaataccaaccgtcctcctttcatctgttgaatcgaggcaaagcaactgtttcatcttttctatatgagctttcatcccaatcaaaccttcaaacccactgaacggtgaggaattaatcaatcttttggaaatttcaatggcaatttcttcaatcatggcagcttcattttccctaccaaaaaaaacacagagaggattagtacattttcctctaatgtgttgaaagattaagagcaaagtagacgaaccagtttcttgaatcgtaaccagcaattgtagcaacctcctcaaaagcttgtctccatctcataatattctcctttgttctacccttacaagttttctgaaagacagctccaaattctccggtaagcttcttaacatgggatggatcaacttcatagaaaatggcaaacactgttagaccaaactctttcttgcatttcataatctccaccaattcttcaagacaccactttgaagaagcatagttcctcgagagcagaacaattgcgatcttagattctctaatggccttaatgagttcaggaccgatggattctcctctcctaatctcattatcgatgaacggagtgattccttttctccgaaactccttttgaatgtgactgagaaagtttctgcgaacgtcatccccacggaagcttggaaatacatggtgagtcccggtgcaagacaaagatgatggaggagaagttgaagaagacggatgagatgttgaagaagacaacgtagatggaggagatgttgaagacgccaaagacgatggaggagatgtagaagaagaacccacatcttcgttttcttgatggattctcaactttctaagaaagatgaagaagcctattgcaaaagcagcagcaacaatggtaaggaaaaaagaagaatccattagcataagactgagagaggatcaagatcaacagagattttttacttctcagcaaagctatacgaaggatgaatgaacaaagatggatttgtgatacattattgaacacattatcttgactccattgactcaacgctacagtaagtcaatagcaagcttcacggatgtttacttttgtgtggtcgacaaggaattgagaaaaaaatataatgtatatagatcagattaatacgttatgggctcaatgggcttgtataattaatggactatctaattatgctaagccttttaatgaaaaaaagtataacaaaaggaggggttttggattttggtacattggtttcgatgaaatcaatccagaatgtggcgaaccggtttaccattgtggatgagaaccggaatctgaaccggttcgtagaatcttgttcgttctcttcttctcgtataaacaattgatgaaaactgaaatacattttagaagcggatcggagtcgttgatcacgctggagtctattcgggaacctacgatgaggattacgtcgcttctgttggttgcagcgctgaaggaatttgtagagaaaatcaattgcggaagaggaaggagagaagcagcaacgatgaggatgatgataaacactatgggcttttaatgtgtaatgtatgcttttaggcccaaaataacccaataatagacactaggatttatttatcaaagtgtaacattatgggcttttatgtgtaatgtgtgccgtaatgtattttttcttatttgcgatgagagtacatcatatttgaatgacaaattgatttcgatgcgatttgagtgtggttagaaaaccaaattaccaaattagtctagttatattattttttgtattttcaatttacataataatataaaacagtacttgaatttaatttataatataaaacattacttgaatatttgaaaagcaatacataaatatcacagagaaattaattagtaaaattagaattaatttttgtgtttaaaatgaaagaaactaataatggtaattaattaatattgtttaaattaataagaaagaaaattagtctcattgaaggactttgctcagcctctttgcttaaacttattctccttatgcttcttcaatttttggtacggattatcagcttgcttattccaacaatttattcacaatttcatgcaaatatctattgccgatcgaatactgaaactttggaatgttgtcggtaaaaattataacctctctagaccaggttgaaaaaaatgttgcaaaaaaatgtataatctaggtgaaaactttaaagaaggctaaaatttcttgctcctttacgtgacaactcatatacgtagttctgtatttgaatgtaatgaatgaggccacaacatctatagtgttgattgaaggtacggttttacattttttgttggttgtgttggtgatgatttgaggagaaaaaggttataaaatttcccaaaatagagcaatggggctatgataatagacaggtcattatatttagggaattcgtttcccatatttgagagattgttactatttggttagctttcacatcatgaggtttttgttgactctaagaacagtgagtcttcttcgtgtacatgtccacattgtttttaaaaaaatcctcctgtttcagtctcttgttcatttatgcgatcatcacttgttttcctgttttaatgtccaatccaccatgttgtatagttttttcggtcggttcgaaatcatcctaaaccaaaagcaggttgaatccaatcaaatgaaacgtactaaactcgattttagcgaaagctagttgaaaactcttaactttaagtataaaaacttacaagacacttttgtaacctatggaatttgggaactctaaactagtctatgaagtttgtagaataattccatagttttgttttttaaaatctccgtattatattttgatgaggctttgtgcctagtaagacccaaagctagtctattaaactagctattgcctatgttggctatgtcactatgtgctccgaaatgatcgatgtataattgagcaatgtgcgtgtgtttaggtatagtaaaatgaggagcagagcatgcacgtacgtgttgttgaattgatggaacatggtacgctataaaatcagttcgtggtgtcgcatatttgaaaatgaaccacagtagactcgcaaaacatttctctgttgatatgaattggatcctatgcattaatttctgaatctgtttcctttcccgacattatatattgtatatgttccacatttaaaactgaaaattcaattctaataattctatcccctacagttattgaaacagacgtcaccaaaaaaatcaacacctttttttaatggctttttataaacgaaccccgaaaacttgtaaaaataaaataaaaaatacttgttaacttaaataagtagataacatatacttttttttcttttcaaatgataacaaaataaaagtgaaggtaattgggttgggtgtagatatccttaattaacctgctaatggttagtgttactttgttagtgcgtatctttgaaaaagtaactatccattctcacatctactgtatgacacaaatttagtgtaaattaagaaagtatatattcaaagttattgaccaagaaaaaaggaccataggaaatgttgagttaatctctgcagatggaccgtacaagtctgcagcaaatactctgaatctgagataatgtattcctctgccaattgatatctttttggtcaaataaatacatctacgttatgcttaaagtctcaccaaacctaggtatttcctttgtatatatgggataatatatgtttcgtatatgcatttatagctgcacaattaattaataataaaaaaagaaatactttacattcttttttaaaattgcattatggtgttatgaatattcatattgcgacagaaattctaacgataataacttaataagtctagccgatcccttaaaaaaatgatttataacagcgaattctgcgacatatggttggatagttaattttaaaatcagtaaatggtagaattgatatggcaacaagtagtcaagactatatgaaaaacggactcgtttgggaagatcattaacattcacattatgaagagaccggctatgtacgtagaaagagggtttcatataaaccatcaaaatgtcgagagtgagagataaatggggattggtgaaaagacatgtgaagtgtgcgtgagagatataattgtggttagaaaataaaagacgcaagagtcaaatcaaatgtatgctttgagcctttttggctgttatagttgggactacttcagatgtttagtttcatcctcattactatttccaattttcggtagcaaccaacaacaacaacaaaatcattaattatttttttaaaaaaaaaagattctgtaaattgtaggtttctttgtaaaggaaaaacaaataaacaaccaatttgtgatggtttagtggttaattcaaattggttgtgagatagaattcaaaactttgataatgcatgagcagtgaccactatgaatgtattaaatgacaagaatacctaacgcttaattcatatgtatcaagcggaaaatagttaaaacttggggtgaaatcgccttgttacttgaacaaaaaagaaaaagaagaagatcatattcatagttcgaaattcaaacaagataataccaagattttgtttggcaagcaatcgtagaataatatgatgttttgtttggggcaacaaagaacaaaagcagttgaactaaaaaaaaagatgtttacggatgtttaacaacttttcatctctctccacttttccaaacacatctccactgctcacaacgtaggaaacgtgttccctgtcctttactctttctctgtcctagcatttttatttatttctttcatctctatacgtttccacattcctagttttttcaaaattaagtagtgacaattattgtgaaaatgttattggattttattgtaaatgtagattatagctatttggttataacttaaaccagagataataatactatttatacaataatcctaaattaaaatatctagaatgtaaattaaactgagtgttgaaaacaatttacaatgcataaatacaaatgtatagaaatatatatcagctttcaaatcagtccgtgacagtccatgaaccttttaacagttgtataacagcattttgtcagaaaacaaggtcacaacatatacatacacgcacatagcttagagccatacgtaataatatcacacaaatatcaattatgatgttcaaagtcatatttaatatttgctcttctcctccaatgaggatggagatggtgcatgctgacgtggcgtctctctccataacaccttgcttcccgtcttctttgtcttcgtcctcacatcatcactataaccaacaacaacattgtatcatgtcggaagatcaacaccattcgatggatcagaccacttcatcggactacttctctttaaatatcgacaatgctcaacatctccgtagctactacacaagtcatagagaagaagacatgaaccctaatctaagtgattacagtaattgcaacaagaaagacacaacagtctatagaagctgtggacactcgtcaaaagcttcggtgtctagaggacattggagaccagctgaagatactaagctcaaagaactagtcgccgtctacggtccacaaaactggaacctcatagctgagaagctccaaggaagatccggtacgttaattctgtcacttgattaagcttttacaagattcacgttcttgagattttgggtgttaatgttgagcagggaaaagctgtaggcttcgatggtttaaccaactagacccaaggataaatagaagagccttcactgaggaagaagaagagaggctaatgcaagctcataggctttatggtaacaaatgggcgatgatagcgaggcttttccctggtaggactgataattctgtgaagaaccattggcatgttataatggctcgcaagtttagggaacaatcttcttcttaccgtaggaggaagacgatggtttctcttaagccactcattaaccctaatcctcacattttcaatgattttgaccctacccggttagctttgacccaccttgctagtagtgaccataagcagcttatgttaccagttccttgcttcccaggtttgagtttttgtgttctcttttctttcagtttttaattccatatcatttcttaattttcttccattttttgtactatttaggttatgatcatgaaaatgagagtccattaatggtggatatgttcgaaacccaaatgatggttggcgattacattgcatggacacaagaggcaactacattcgatttcttaaaccaaaccgggaagagtgagatatttgaaagaatcaatgaggagaagaaaccaccatttttcgattttcttgggttggggacggtgtgatcatcatcgatcatgaacaagactggcttgagttagttaacaaaagttatgagatgatttgagtccttgtcgatgtagttatgttgcgttaataattgtagattaaatgttgttgtccttagtcacatgcaacattccttaccccgtgttaattagcacgtacatatataccactcgttggttaaaatcaatgctttcatttatgtagatgccaaattgtctcacctttaccaaaattgatttgaagtgtaaaacatttgtaccactttatagttctaactaactcttatcttatatgaaaatgtcagattccgtcattaatgtccaaaaattgtatggagtgagagtaacaacatgcttcgtatatgaagaggaaggtgacatatgttaaaacagggacgatgatgtggatataagaaacgacaaagaacgatagagaagtcaaattaaaaggaataatgtactacattgtatttatttggagtatgcagaagtttaataacaacatgcgatattgatgaggttgcaagattcaggcacagattctgcaacagaaagtccaaacatccactctttaatattctcacacccattgcatttttttattctctccaaagcaaaaacatattttcatttcattgccccttacttatgcgtctcatcgacctcatgtcacccacatggccccttctcctagttattgttcattgtaataatcatttgatttgtatcatgatactatttgtatacgtcattgtagttttagtccagcttaacacatttctatgactaaatcgaaataattgattgatttatgaaattaagattaaatttatgtaataccgtttttcactaaacacttcccgttgttaattgtttttttttaaggttccataagatccacaagaaaaggataaaacggtaaggagtgtgcaatgtgcaccacttaaaatctattgctattccaggcttaggcccattctcggacccaatttcagttttgtttggaagtgtttcaactttttctttttttatgttaaccgatgtgattcaatttctcgagcgagagagtaccaatatagaatgaatatctcaattttgtttctaatttattagatgttcttaaaacgataagtgaaaagcaataacgtatatattggttgattaaaatttaaatcaaaacgtcgaaaacagataagtgttgaagtaaatatcaaaccaaaacctctatcaaaggaacattcatgttaatgtagttccttatgtaatccaataattaaatattcatgactttttctttttcttttattattcaaaaagaaaacaattttttctgtttgtttccttaaaaaagctgaactactttacgagaacatatacgtatggtccaggtgaaagctgagtggcctcctacaaagtctacctaactttattcctttctttcacatttaagaaatctatttcataactttagtctttagtcgtatgataataatgattccagttaataaatcatttgcaatttttatgatgactagaccttggtaacgaattttccaaaacccttctatatgtttgagctaccgatgttgcgtatggttttaagtatttgctctccaagtacatttctattctttattctttctctccactcgagcacctcaaacttttgtgttccttcggtatccattgttaaaaatgagaactcaccaacaacttagaacagtcttccggtttgggaaaagaacatgcgtagcctccctgcttattctttaaacgtaactggattttaagctttttgtgcagctaaaagaaccagtctttatggacctttaattttcacatatttgtagagctcaaaaacaaataaaacatttatttactttttgtggaagaatagtatatgagatcaactatataacatgaacttgggttgcctctcaaaatgtgatatgctataattctattaaattattagacaatcgaaagatttaaatgctgacagtttaacaagtaatatttttgttgttttaaagttttgtaatctgcatttaagtctcatttgaaaggacattatatttacgtttcatgatcatggaagactcgaaagtattaacaaagattggtgtcaaatctcaaatgattatgatccaaatcttggaattacatggttataaaaataggtatagagcaacaagctaagtatccatactaataagtagaaacattacaacatatcaagtaataatcaaaatgagtagtataaaagattagtgaaggtgcaaaaagaatggaaaaagacattggaaaaaaaagaataattgctttttagaaaaagtgacttttatgctcttcttttagctttttttcagtgccagtggttggattcttctctttaatccaaatatgaaagtgaaagatgctctgctttctttggtttcatattcctcttttcttatctcttatcttagattagtttgacccatttacactaagtaccaaaatcgtacaagctaatagtctggtacctcatgctcatctgacatgtatttaccagagaggacaatttggagttgagataatatttatctcatgattcatgggcaaaaacgtaattgtaagttcaagatagatcacgtagatattaatctaaaggtttatatatgttgcaacttcatcacacaatggagagaaatatctacagctccaaaaatatctctgtttgtgtacaacagtaaatactatatctactcttagttccaaacaacaaaactatctacacagctttgccttcttccacaaggtaacaattagccaaactcaaatctctcagttcatgaatatatatctatattagtgtctgattattgttgcatgctctccctgaagttcatagctctagacatcgctgcagggtttgcttgtagactgtgagaagtttcggagaccaagctacttctgttgctgtttccctttgtgtcaaatccattgaacaaactgaatccttgcgtttttttctcgggttttgtcggtaacttagaccacacagcgctcttactagcttcgatattcattctaagagattctgagaccaatcttgctcttgtagtagttattgttgtattagtatcattgattcttccttcagtttgatctcttgaccgttttcctaaacatgatgaagtctctgaggtagggtatatcggaaccgtgcatccccagtagaaggggacagggtagaaactagcgttaggacccgttggactccattggtaaggccaaggagaagaattattaggtaacattacttgcggaggaagaaacccttggtagcttttattttcttgagaaactgaatcagcacttatctttgctgtatcacctgactgatgcttaccagtctctgtaaccgaagactccgaagaaccgaaactaaggatcgtccccgagttattattatcacaatcctcagaagtgacttgcaagtaatggtttgaagaaggccatcctttgttcttgcgacgacctgagccaacaggaacgttcctcatagatccaccagctgtccaatacctctgacagttcctgcagaagtaacgtggctggttcacgttgtagttgttgtaataacagaatttggtgtttgcgctttcacatctaggacatggaataagcttgtccggtttcttgagagccgttgatttctctcctgatgtagtacttgtggtagttgttgttgtgatctcgctctgttgatcacagttgttcttggaacttcttggtgatgaaatctcagatactgcttttggtggttcgtttagatcggataatatatatggatctttgaatttgttactctcttgctcactttttttaaccggaacctgaattttttgtagaattttgattagaattagcaaagagatataaacagtcaagcaaacattaatttttttagcctttataactcataacagagagagaaagtctcaaattttagggttaaaaattcagatcgagatcgacccatttgtagattccctcagccaagaaacttttatatattcatctcaaaatcataaagttcgtttatagattaattaacacataacaaaaaaaagaggttaagattctcatgacataccctgattggtccaatagttggagaacaagaagatgaagaagaagacgaatcctccttgcttggatcagaagaaacatcgtgaacaggggacaacgacgacggatcataacaattcacatctaaaagagatgtgattgtcctcccaaacaactttatctccgtatctctagatttagacataactaattatgaaagttctagagatatgaaggtctaataaatggtttcctctggtttttttttctctatgaagatcggagggaagaaaaaaagagcatgaagagaaaacaaggggcttgaggttggtattaatgacgatagatagtgcattagaagggagagaggaagagagaaaattacacgtcagaatagagagagagacatgtagaaataggagagccacatgtttgtgaagaaagtgggcattttgagatctttttcacgctctttttgattcccctttctagtggcgttttaaagattttctcacctccccttggttttgccacgtcggattttaaaaggaataatagaagaaacacttggttcttattcaaaatggtgtaaacgtattgaaaaagataaacctaaaaacagatgataaaaagtcagatctacgtaacatgaaagtcatactaataaacaaattaaaacacatttcgaagaaaaaaaggttttaaactatgacccgaattcatctcaagttcatgttttttctaaacccggttttacaaatccgttgacgtatgtataagtctacattaattattaacaaatttgctaaaagtaattagtaaagtagtttggttgttcaatagttatcacggattggtgtttgaattc

SEQ ID NO: 1234 - DNA, 44430 bp, Arabidopsis thaliana
gaattctgcgacatatggttggatagttaattttaaaatcagtaaatggtagaattgatatggcaacaagtagtcaagactatatgaaaaacggactcgtttgggaagatcattaacattcacattatgaagagaccggctatgtacgtagaaagagggtttcatataaaccatcaaaatgtcgagagtgagagataaatggggattggtgaaaagacatgtgaagtgtgcgtgagagatataattgtggttagaaaataaaagacgcaagagtcaaatcaaatgtatgctttgagcctttttggctgttatagttgggactacttcagatgtttagtttcatcctcattactatttccaattttcggtagcaaccaacaacaacaacaaaatcattaattatttttttaaaaaaaaaagattctgtaaattgtaggtttctttgtaaaggaaaaacaaataaacaaccaatttgtgatggtttagtggttaattcaaattggttgtgagatagaattcaaaactttgataatgcatgagcagtgaccactatgaatgtattaaatgacaagaatacctaacgcttaattcatatgtatcaagcggaaaatagttaaaacttggggtgaaatcgccttgttacttgaacaaaaaagaaaaagaagaagatcatattcatagttcgaaattcaaacaagataataccaagattttgtttggcaagcaatcgtagaataatatgatgttttgtttggggcaacaaagaacaaaagcagttgaactaaaaaaaaagatgtttacggatgtttaacaacttttcatctctctccacttttccaaacacatctccactgctcacaacgtaggaaacgtgttccctgtcctttactctttctctgtcctagcatttttatttatttctttcatctctatacgtttccacattcctagttttttcaaaattaagtagtgacaattattgtgaaaatgttattggattttattgtaaatgtagattatagctatttggttataacttaaaccagagataataatactatttatacaataatcctaaattaaaatatctagaatgtaaattaaactgagtgttgaaaacaatttacaatgcataaatacaaatgtatagaaatatatatcagctttcaaatcagtccgtgacagtccatgaaccttttaacagttgtataacagcattttgtcagaaaacaaggtcacaacatatacatacacgcacatagcttagagccatacgtaataatatcacacaaatatcaattatgatgttcaaagtcatatttaatatttgctcttctcctccaatgaggatggagatggtgcatgctgacgtggcgtctctctccataacaccttgcttcccgtcttctttgtcttcgtcctcacatcatcactataaccaacaacaacattgtatcatgtcggaagatcaacaccattcgatggatcagaccacttcatcggactacttctctttaaatatcgacaatgctcaacatctccgtagctactacacaagtcatagagaagaagacatgaaccctaatctaagtgattacagtaattgcaacaagaaagacacaacagtctatagaagctgtggacactcgtcaaaagcttcggtgtctagaggacattggagaccagctgaagatactaagctcaaagaactagtcgccgtctacggtccacaaaactggaacctcatagctgagaagctccaaggaagatccggtacgttaattctgtcacttgattaagcttttacaagattcacgttcttgagattttgggtgttaatgttgagcagggaaaagctgtaggcttcgatggtttaaccaactagacccaaggataaatagaagagccttcactgaggaagaagaagagaggctaatgcaagctcataggctttatggtaacaaatgggcgatgatagcgaggcttttccctggtaggactgataattctgtgaagaaccattggcatgttataatggctcgcaagtttagggaacaatcttcttcttaccgtaggaggaagacgatggtttctcttaagccactcattaaccctaatcctcacattttcaatgattttgaccctacccggttagctttgacccaccttgctagtagtgaccataagcagcttatgttaccagttccttgcttcccaggtttgagtttttgtgttctcttttctttcagtttttaattccatatcatttcttaattttcttccattttttgtactatttaggttatgatcatgaaaatgagagtccattaatggtggatatgttcgaaacccaaatgatggttggcgattacattgcatggacacaagaggcaactacattcgatttcttaaaccaaaccgggaagagtgagatatttgaaagaatcaatgaggagaagaaaccaccatttttcgattttcttgggttggggacggtgtgatcatcatcgatcatgaacaagactggcttgagttagttaacaaaagttatgagatgatttgagtccttgtcgatgtagttatgttgcgttaataattgtagattaaatgttgttgtccttagtcacatgcaacattccttaccccgtgttaattagcacgtacatatataccactcgttggttaaaatcaatgctttcatttatgtagatgccaaattgtctcacctttaccaaaattgatttgaagtgtaaaacatttgtaccactttatagttctaactaactcttatcttatatgaaaatgtcagattccgtcattaatgtccaaaaattgtatggagtgagagtaacaacatgcttcgtatatgaagaggaaggtgacatatgttaaaacagggacgatgatgtggatataagaaacgacaaagaacgatagagaagtcaaattaaaaggaataatgtactacattgtatttatttggagtatgcagaagtttaataacaacatgcgatattgatgaggttgcaagattcaggcacagattctgcaacagaaagtccaaacatccactctttaatattctcacacccattgcatttttttattctctccaaagcaaaaacatattttcatttcattgccccttacttatgcgtctcatcgacctcatgtcacccacatggccccttctcctagttattgttcattgtaataatcatttgatttgtatcatgatactatttgtatacgtcattgtagttttagtccagcttaacacatttctatgactaaatcgaaataattgattgatttatgaaattaagattaaatttatgtaataccgtttttcactaaacacttcccgttgttaattgtttttttttaaggttccataagatccacaagaaaaggataaaacggtaaggagtgtgcaatgtgcaccacttaaaatctattgctattccaggcttaggcccattctcggacccaatttcagttttgtttggaagtgtttcaactttttctttttttatgttaaccgatgtgattcaatttctcgagcgagagagtaccaatatagaatgaatatctcaattttgtttctaatttattagatgttcttaaaacgataagtgaaaagcaataacgtatatattggttgattaaaatttaaatcaaaacgtcgaaaacagataagtgttgaagtaaatatcaaaccaaaacctctatcaaaggaacattcatgttaatgtagttccttatgtaatccaataattaaatattcatgactttttctttttcttttattattcaaaaagaaaacaattttttctgtttgtttccttaaaaaagctgaactactttacgagaacatatacgtatggtccaggtgaaagctgagtggcctcctacaaagtctacctaactttattcctttctttcacatttaagaaatctatttcataactttagtctttagtcgtatgataataatgattccagttaataaatcatttgcaatttttatgatgactagaccttggtaacgaattttccaaaacccttctatatgtttgagctaccgatgttgcgtatggttttaagtatttgctctccaagtacatttctattctttattctttctctccactcgagcacctcaaacttttgtgttccttcggtatccattgttaaaaatgagaactcaccaacaacttagaacagtcttccggtttgggaaaagaacatgcgtagcctccctgcttattctttaaacgtaactggattttaagctttttgtgcagctaaaagaaccagtctttatggacctttaattttcacatatttgtagagctcaaaaacaaataaaacatttatttactttttgtggaagaatagtatatgagatcaactatataacatgaacttgggttgcctctcaaaatgtgatatgctataattctattaaattattagacaatcgaaagatttaaatgctgacagtttaacaagtaatatttttgttgttttaaagttttgtaatctgcatttaagtctcatttgaaaggacattatatttacgtttcatgatcatggaagactcgaaagtattaacaaagattggtgtcaaatctcaaatgattatgatccaaatcttggaattacatggttataaaaataggtatagagcaacaagctaagtatccatactaataagtagaaacattacaacatatcaagtaataatcaaaatgagtagtataaaagattagtgaaggtgcaaaaagaatggaaaaagacattggaaaaaaaagaataattgctttttagaaaaagtgacttttatgctcttcttttagctttttttcagtgccagtggttggattcttctctttaatccaaatatgaaagtgaaagatgctctgctttctttggtttcatattcctcttttcttatctcttatcttagattagtttgacccatttacactaagtaccaaaatcgtacaagctaatagtctggtacctcatgctcatctgacatgtatttaccagagaggacaatttggagttgagataatatttatctcatgattcatgggcaaaaacgtaattgtaagttcaagatagatcacgtagatattaatctaaaggtttatatatgttgcaacttcatcacacaatggagagaaatatctacagctccaaaaatatctctgtttgtgtacaacagtaaatactatatctactcttagttccaaacaacaaaactatctacacagctttgccttcttccacaaggtaacaattagccaaactcaaatctctcagttcatgaatatatatctatattagtgtctgattattgttgcatgctctccctgaagttcatagctctagacatcgctgcagggtttgcttgtagactgtgagaagtttcggagaccaagctacttctgttgctgtttccctttgtgtcaaatccattgaacaaactgaatccttgcgtttttttctcgggttttgtcggtaacttagaccacacagcgctcttactagcttcgatattcattctaagagattctgagaccaatcttgctcttgtagtagttattgttgtattagtatcattgattcttccttcagtttgatctcttgaccgttttcctaaacatgatgaagtctctgaggtagggtatatcggaaccgtgcatccccagtagaaggggacagggtagaaactagcgttaggacccgttggactccattggtaaggccaaggagaagaattattaggtaacattacttgcggaggaagaaacccttggtagcttttattttcttgagaaactgaatcagcacttatctttgctgtatcacctgactgatgcttaccagtctctgtaaccgaagactccgaagaaccgaaactaaggatcgtccccgagttattattatcacaatcctcagaagtgacttgcaagtaatggtttgaagaaggccatcctttgttcttgcgacgacctgagccaacaggaacgttcctcatagatccaccagctgtccaatacctctgacagttcctgcagaagtaacgtggctggttcacgttgtagttgttgtaataacagaatttggtgtttgcgctttcacatctaggacatggaataagcttgtccggtttcttgagagccgttgatttctctcctgatgtagtacttgtggtagttgttgttgtgatctcgctctgttgatcacagttgttcttggaacttcttggtgatgaaatctcagatactgcttttggtggttcgtttagatcggataatatatatggatctttgaatttgttactctcttgctcactttttttaaccggaacctgaattttttgtagaattttgattagaattagcaaagagatataaacagtcaagcaaacattaatttttttagcctttataactcataacagagagagaaagtctcaaattttagggttaaaaattcagatcgagatcgacccatttgtagattccctcagccaagaaacttttatatattcatctcaaaatcataaagttcgtttatagattaattaacacataacaaaaaaaagaggttaagattctcatgacataccctgattggtccaatagttggagaacaagaagatgaagaagaagacgaatcctccttgcttggatcagaagaaacatcgtgaacaggggacaacgacgacggatcataacaattcacatctaaaagagatgtgattgtcctcccaaacaactttatctccgtatctctagatttagacataactaattatgaaagttctagagatatgaaggtctaataaatggtttcctctggtttttttttctctatgaagatcggagggaagaaaaaaagagcatgaagagaaaacaaggggcttgaggttggtattaatgacgatagatagtgcattagaagggagagaggaagagagaaaattacacgtcagaatagagagagagacatgtagaaataggagagccacatgtttgtgaagaaagtgggcattttgagatctttttcacgctctttttgattcccctttctagtggcgttttaaagattttctcacctccccttggttttgccacgtcggattttaaaaggaataatagaagaaacacttggttcttattcaaaatggtgtaaacgtattgaaaaagataaacctaaaaacagatgataaaaagtcagatctacgtaacatgaaagtcatactaataaacaaattaaaacacatttcgaagaaaaaaaggttttaaactatgacccgaattcatctcaagttcatgttttttctaaacccggttttacaaatccgttgacgtatgtataagtctacattaattattaacaaatttgctaaaagtaattagtaaagtagtttggttgttcaatagttatcacggattggtgtttgaattctctaactatagtttagattttttttcactgcgattcctttgtggccgaaaacataaaaatgtttggttattcatgttgctccaaaaaaaaaaaaaaaatagtttggttattcctagctttttgaaatcaagtatgggttttgattcgagattgctcagttatcagttttctgaaaaatgttggatccgattagtaatacaaaatgatacaaaaagaattagcgggtaaagaaaacgttaattaatactaaaattattcaaaacggtacaaaataattgtaatagaaagcaatgcgaaaaaaactgagaataacgttttgataacacttttgttgtgggtaatagaacgataaatcccctaccacaacagtatagggttgccaatcagaactgatgttaatacaattgcaaattaacatctgaaaattctatctcctctagacagaattaggtacaaatacatatctgacatgattattacatgtaaatccgacaaggcataaaactatcaatgccaagctgtgtaaacacgtggcacatgacccacacagtctccgaaacatcctacatctaagcccacgtcagctgtaatacaccacgtgtggattggtccatcacaactcacaactcttaaaaaggttcgtctgccagaatctagctgttcgtcaagcatgtgaccaatgattatccgacacgtggatttaatatgaacatattttctggtgtagggttttgtagtagcgtatccaacataacaaaagcatcaatgtgtgttctttaaattaatggaaaagtaatcaaaaagatttgaagaaatgtttgtggtagcaagagaggctatgttctggttgtgtctgacacgtggcaatttccaggtaagagataaggctggaccatatctttttctcttatcccgttaagtcttttcgatcgtgttttcttttgtttattttataacatttgtttcataatttgcaattatgtatccctacttattttccaatattccgatagttgcgtgttactttttgttgtgtgcagttacgatcgaaaagtaagataatagatgttccatgactaagattgacataatgaattgaaagccgataatcattttatgaatgttaaggttcaatgttcatattatttgattgtgaaaaagaatatgtactttactttaaaaatagaatgatagatgaacttttgaaaactaaaagctatgatgtctgagtcggaaaatgttttggaaataattaagtttgttatattatatctacatacttagtatccaacaaaataaaaagtagtaaaagggtaagtgtgatcaaatgcatgtatataatatgtatgattttttgttcacctttgtaacgtggatggactctaaaacttttgtaatgggataaaacttgggcatgatctattaaggaggatagtctatactttataggcccgtatagaaaatgttcaaaacggcgaagtctgcagtatactggcccaaatttgacacttttgagttgttgacccaaggcccatttaaaggcgcgaagctaaacgacgacgtttagtaaagagttatcttttcactatctctcatttgatttcctcaatttctatcggactactacgatcactgcacagagagcaagattttggatgcaagatcgtatatgtaagttttcgaaagaaaaaaaaagttatcatgtaattttttaaaacagctctaagatgaatctagttgtaagcgaaaaaaacattattatgatcgacattacatggtaattgaattacctgccctaataacttgtaaaactttcattgaattatattgtctccaagtgacacatgaatgatgtcacgtttgttcgacaatggatttacggattttaaaatattttaattgaagtttagatgttcttttttgcgcatttggatctgtgcaacacaagcacattcgattgaattgggtccctttaaggctaaaagagaataataatcgatgaggcatctctctttcagactgctttcgatccaatttcaacattattcaagaatctccttttgttttcttctttaataatttacatctatctatcgcttattcattttatctcatgacttcttcattacaatggatgaaaaagatacgttagattaatctaaagggtatttataataaagtactttttttgtataaatctttgtaaagaagaagacagtgaagtctactatagaagttatcataaggagaaacataacataggatgatcactagttctgtatatattgaagttttcacggctgatacgtcttaaccatatatatccataaaaccgtcatctcaaacttattgtaagataattgcatctgagtacaatgttttggttgttctcatagttctttatacatatgaaattaggtttagcatataagatccaggcacgaaatttcgatggtatgatggatcttgtcactatatatcattcttaaacgcggcatgtagcacttgattctaatgtgtagatcacgtaacgcttcatcatgtggtatgatgtataaaagcttgattcgatttacttcatttccttagataatggttttcaacaagttattagagaatatgttttcgcttttttcattagaagaaagtatattaaatatttagttaaagagaaagttttatgatcattatcctctcttggctttggtgaatttctttgcttgtttttcaaacattcgggccacacctatgatcgacatatatgtttatatctctcacattcatatgcatatttatgcatgcatgtgtgtgtgtgtgaagttggattgaatgattaataatattcctttctttaagaaatgaacaaatgaaaggtgtccactaaaacagaaactcgtagtaggagaagatgcttcaccacgacatcaagctaccacattgggtcccccaattactctcttagttttctccttctttatttctaaagagaaatcagaatcttacgatttttatgcctcatagggacatataccataacaaatttatttcattgctgcgagtgaatccattccttacttaggagaatgtgaatctacctaatatttaaaatatgtatgtatcagaagttaaatttgtatatcatttttagtaagagaaatgaagacatgaaacaagttattgcataaatggagtgtatattgttgtgtaaacatatattacaaggggtgattgtttacactcatgaataatataattaagcaatgtatattcagaaagaaaagagggattaagagaataatcattggatttcgattctaaagacgtcaaagccagaaaatttaaagtttgatcagattctctgcttttaccgacggctctctataagccatcataaatatacaactcctactttcttttttctttttcttattttgcagtatcttttttcaaggaattgtatttgcaacattttaggttttatatcagatgaattcttttatcttttaaagctagctaagattttcttgtttatgttttggaatatatttatttagtgcttctacaacacgacttaccttcgaaaagacttgtgtgaaagagaagaaaaaaaagtcatttatttaagtttacattctaattgtagttatgatgtaagaaaaaaaattcttataattatggttaaagttgaaccaacaaaaacacgttacgagagtcttgagagttgaagttttggatggagtccactttcagtacatgtagtttgattggctaacaatatttactcacgtaaagttgccctgcacataacaccaaatgtatatgtaaaaacaaaaacgtcttgaatttgttaataaggaatgtatctttcaaaagacttttaaatctctttcatgattcaatggctaaatcagatttatcgtatagtttgatgataaaatttaatattaatatagactttcaacacttaagcaactcgttagatttcaagcttttaatgaatagatcttacggcatgagacgacaaatattaaatctttcatcaatgattaatgtgtggttatactgaccaaaaaattctaagcatcataaaaggtcaacatttttatttggagacatattacacatcaagcatatacacttaaattaaacactattttccttttctaaattttgttttaaataaaatattgtatgtattaagtcaccgacatgaattttttggtgggtttcgtgttaagatttttctcacatataatacttgaataatatgttggaatatttatgtaataaataaataaaaccttgcaagagaatgcagatccgagaacacctgagagagattcataagtggatcatgaaacttcagtatatagtgttgtgttggggtgccacctttctggctcattatatatcttgttgttgacatcaatggaccatatatttcgtcatgaatcaagaccatgcatagagttgttacaatttttcatatattttcagtcaccgtttttgacttatggaaaatttattaaattaatctagttattacacgaaatctggctggattcactttcatttgtgtgagtggttaaaaagaaaaataaggcagagagaggaatggattgttctttttaaagttatattgaggttagattccctcacctctacatacaaccaaaagaatctgccaatcactcccatcttttatttccttgaaaaatatatgtacataaaaatactatatagcctaactttacaagaacatctaacatttttaaacgtttatatagacacactattttcaattcatttagggctgagctgaacatatatatattgatcaatatccatattgattttatatatctcgtcgtcgactcatataccggatccaagacattatgttccacaactcaacaaacgataagaaaagtttttctacccaaaagtcaaaatagaagaaaacactaaaaaaattgctatcacatagttaaaagtagttcatcagcatcatgaatacaaaagatacatggatatgtgtaaacatacgacatgcgtacatataaatttggtaatactacatatgagtctatcattttcttctgtcgacatcgatgagtctatatatatgtagattcttcgttgaaaaatgttatatgaagggacatatatacaagtatggtgggggcaacattacggaagagcaagccaagatagagatgagacacaacacaacaaaccttacactttttctttaccttctttttaggagcaattcttgtatttatacaccacctttacttaattattatacaccattatctatcctgatatattaattatacaaagaaatgtccgtgtggtggaatatatcgcttgttatcaaaacaaatttatagaaaattaataagattcgaactatcaagagataacttatataaaaattgttcttaactgatcattcccaaacaatccacccatgaacacgtattttaaaaaatgttactagattttaacccgcggtataccgggggacgatttcttttttttaaaagcaatatatattaaaatttgcaaattttatttttataaaatatttatattttacagtttataattgttattaagtaacgctataccacgaatccatgagacaattgttaaaaaactgaagttgtaatccctattaacacaacatattaataatattttataattttataaatattgatacaaatacatccaccatataacccaattccaaaataaaacctgttctataatttatttatccgtcctgtgatttttttttaaagtagtaatttttaaaatttaagaattatttttatatataaaagttttacaaattgtatcattctctaatacatttatattttataatttaattttatatatagtaacattatacataccacataacatttttggttttatataatcttttctaaattaggatgatttgatatgtttaatactagtggtcttaaaaaataataaattaaagatttaacccgtattgaaacggtggattaattatattttactttttattaatgttgattcaaaaacccgtcactccaaatctgtcttgccaaaaagccatttattttattaatattaattttactaatgatatgactctgaattataatttaaatattttagctaataacataggagtacaccatatttatttaataggagaatgtcaatgcacttttacccaaatccaccaaaaaagtcttgcaaaaatactatagagataagaaacgatagtcggttttgataggtataagattagcaaatatattagttagcttaaattagttaaaaaatacaaatcgaaaaggatattacactttattcgaatatagtatcaaaacttatataacacagagatttgataaaattttaattgttgaatacttttttttgtgctaatttttatgtgattaagatttaattgattttgtatataaaatattaaattgttttacgaacttatttgtttataatttggtaacagatagatatttgagtattcagtatattttgcttcagtttaggaaatctttgatgacccgtctttagatccaataagccctataatctagatattaacctgtagtataccgcatgtaagcttatattttagttaaactaaaaacttttattgtaaagatgatttaaaaatatatgatattattttatttgattttaaatgtatagtaaactgtgagttgtatatgttttgttgatattatctatattgtttagtgtttaagattatacacttgtagtttgattgttaatttaagagtttcacctgtagtataccatcttgtattaatatcgatctaaacccgtcaattctaggattttccagcttgtattaaaaattgaattacatcatacacataaaaaaatttaatatgttattaattattatagtatataagattataaattttcaatataatatgtatgaaattaaatataaatatttcaaattatgacccgttactcagtagaaagttttcttaaatctatttttcacccgttataatatttttttcatgtattgaacagtttatattcgttttaaaaaattctaattatggaatatgcgaaaaaactctaattatttttttataatgatgatattattttttcgcaaaaatagaatcatataaagatgagaagtgaattataataattaataaaaaattaatatgataatttagatatcaaatctaatttgttgattttaattggttactttttttgaaattaataatgtatttcatttttctaattatatcaaattaattaaaaattatatatcaaatcttatatgttgattttgattggttattatttttgaaaattaataatatatttcgtttttaaattaaatttaattaattaaattagtatttgactttttaattcttaaagagataaattaatttactctttaaaattttatttctaatggcatacctatgtaattacttataaaaattaaggttatatttaaaatgtacttcccaaataatatagtaggatatggtataacgtaacactgcaacttatacggatcgtgcaaaatcctaaaaggccattttgcaataatataaccaacaaaaaatcatttttacaaaacatgaaaagaaagtaacatagaggaccatattaaaataggtggtaataattgcaaacaaagaattttcacttgcacatacgatatgtgtccattaggattgatcgatgtctatacgaccaaaacctaagtgtacaaacctttcttttatctgatcttattgcctcatatatggaagaaaaaggtaacaccaatttacaaaaaggcaacaaataagaagaaaaaaaaaagtggtgtgaaatcgggaaatgatcgaagaaagagaaataaaaaaacacatactaaccaaaaaataataataatcataaagaaagaaagaggaaagggtcaagagagcatatattctcttctccaacagaaccccactcatgtttccagatatggagtgaaagaagaagaaaagaaaaagaaagaaaaaaaacatcaaccactccaaagatttatatatatatctattaatctccatatctttgccaacaaacccaacaatctttgaaaacaaatcaccctttcgtttttatttaaatttcttgggtcgtttcttaaatttgtatgtgtttattaatggagatcaacaataatgccaacaatactaatactactattgataatcacaaggcaaagatgagccttgtgttgtcaacggatgctaagccaaggttgaaatggacttgtgatcttcatcacaaattcatcgaagccgttaatcaacttggaggacctaacagtacgtacttttgtctttttttcatcttcattttcatgtttcttgattgtctttttttaatatatttggttgttctgtttatgtttgtagaagcaacacctaagggtttgatgaaggttatggagattcctgggcttaccttataccatctcaagagccatttacaggtttgatcagtattcaccagaatctttaattagatgagtctttttttctattgtctcttgaaaatctaatttattctatctttctgcagaaatatcggttagggaagagcatgaagttcgatgataacaagctagaaggtttgatgttttctgatcaaatattaacattgataatgtttttagagaaaagatagaaacaaattcttgagtttggactctgatctgaccaaattaggttaaaatatgttttgtttcttgatgagcagtttcctctgcatcagagaatcaagaagttgagagtaaaaacgattcaagagatctccgaggctgcagtgtcaccgaagaaaacagcaatccagctaaagagtaatgatcagaaaatcaaatagtcttttatagatagattttagataaagatgaaaattaattgtttgttcatttgaagcagagggctacaaatcacagaggctttacaaatgcagatggaagttcagaagaaacttcatgaacaaatcgaagtaataacatcaaccagaacctcctaattaactacaattaagcacaataatgtctcttttggggtattaaaatgttttggtttcaggttcagaggcatttgcaggtgaagattgaggcacaaggaaagtatctacagtccgttttaatgaaagctcaacaaactctcgctggctactcatcttcaaatctcggcatggattttgcgaggaccgagctctctagattagcttcaatggtgaacagaggctgtccaagcacttcgttctcagagctaacgcaagtagaagaagaagaagaaggtttcttgtggtacaagaaaccagaaaacagaggaattagtcagctgagatgttcagtagagagctcgttgacatcttcagagacctcagagacaaaactggatactgacaataaccttaataaatcgattgaacttccgttgatggagatcaactcggaagtgatgaaggggaagaagagaagcataaacgacgtcgtttgcgtggagcagcctctaatgaagagagcttttggagttgatgatgatgagcatttgaagttgagtttgaatacttacaagaaagacatggaggcgtgtacgaacataggactagggtttaattaaaaaaaaaacattttactaaagttatataaaaatgttttaaaagaatccagtaatatatatgcgtagatttctatagattattgtagagattttgtgagtaagtcgtggtgaagaagaacgcatgggaatattctatatgagtcaacaacatgttataatatactatatagaaaatgtgtgatatgtgtgtatagattaggtggggaggcttgtggatgtggtaaaggcggatttggaggaaactttttatgatcaatgaaagaagcaaaatgattaaattagagtgagctttttatcatgatgttccgaccatgataagcatgttggcttctcagtggttgttttatgacaagacaaaccaacacttgagtcctgcgaagcaatattcgaatatctatccttaattattttactaattagccatcttgaatatttcttccaacctcatgcgagagaaggtgttacttgtttattagtatagaagaaagagagtcacgtgttcatgaaaacgaggcttatctgtttttttttttttttacccaaatgaagaagtaaagaaagatgtatcacctttatgtataacccatggtgttccggtggtttggatttgctcttttggtaacttcctaggtaacattgttaagtatatttgttgggataatattttttcttaacagtttcactcctaaactatagcaatattcttacatgatttgacgtaagggttcataaaaacttcatattaacgtatttttttaaaaaagattccttaaaacttctgtgtttaacatggagcgttttctcatttaaacgatttacaaatatattcacaagttttatgaatctatagaaaattattgattatgatattttttttcaaacagatttccaagcctgctctctctagtaatagctagcaagtttttcaaaagtttgtcaatttttttttttttttgaaattttcatgtgtttaaaaaaaaattataatgggcctagagccgtacatcgtctcaacttctaatttcgccttttctttcacccggcgtgttagtgagtaatcgaaccattgtgcatagctaagggaaaataattcgtatttgatgcatatgagtatgactatgagcaaagttcaatacggtcacctcgcgaacatttgagagacagaaatatgaaaatcatttagacgttttttcattgtaccgttcaagcatatatatttgtagaacccgtgacatctatcacctatgtagccaaaatccaaaatcttattttgtctgaattccattatattttgctttcccactgtttgaaataaaatggaaaaacgttcttggtatcgtccaagccgtgtaaattattatagttctgatattgcagtatacggtcggtgcagtagaaaccatctaacaaagtttatgcatataagtatggcaaatttagttggctgatttcaataatgtttagtgattagaaggattgagtcaaaatgttgtttcggattcgaaacaataccaaacaccaattaatttttgccaaccaaaccaatttttaggaaaacttatagacgttggaatcgttatatcacgaaataattctccttgtgacaagttagttacacaaacttgtaagaattaataagatttaactataaccaaacatagttttgggtgtaaacttaacgtcatacatcacttgcacttgattgatgtgtaacgagactgtctgatatgatgatatgcacatgatactgttaccaccttttcgcatcttatgtcgagcttgatttattcgaatgtagccaaacaagatatgttaaaagagtacaatatgggccgagtaaactaatttagtaatttcacaaaaagaaaagtatcacttatatttcgcactaagtcagttagattatgcttaatgcccatttactcaaaactcgaaagtgccaaaaacatgggccgaggaagaaaaataatcatattcaagcccatcaatatacaggcccgtttttcccagaatgtcaaaatgggttgattaatcaagaatgcacaattgtaattctcataaatagaaaacagaatctgacaccaactacagtatttcataagttggacatcaatatgctagaaacaaggaattgtgaatcttgtgatggcaagagaacccacacaccaatttctattttctccaactaggtccattttagtccgcatgaggctaaagcctaaacccccaccgacgcagaccatggacacatctgcctattcattttagagtggtcaaccacaagccggtccaaagcctaaaccttcaaatcaggacaaaattggacccctaaaccaaaattgggtcaaaacaactcagtccattgcaacatccctaattcatttgctattgtcatcgctcatcactcatcagccagttgttttaatgattgtgtattggacctttatccaccgagggaatatcaccatcagctataatccaataataacctcaagtttgctttgttttactttgctttaaacttcttttggatccctccgaccacatcaaagatctgattggtcacatcaaaaaaaccctcatgggaataagattattattaatttaaattcaaaaaccaaaacaatctccatcaacaacattcaagatttcactatcttacaatatttcaaaaaaaatgtatgttttgggtttttttaagtaaaggaaaagttgcaaactttaggactaacctcgagaatgctgaaaaagcaaagggaggggaactcaaaatcagcaaatgggtatttttgttttttggaccaacgactggtctcctgcttgctttgtttttgagcctgcaaacaatatccaatcctcagttttaaaatatgttactttgagaacagaacctgatgcttcagaatgttcttagtttgcatgtgattaaaaatatttgttataaagaaatttaaatgacaacagtaaagaaaagtgtagtcagataaagaaaaagatcttccctcatgaataaatcagataaggataaagaacaaatcataattaagggagcaatatatcaaacagaagtggttctttttgaatcattgcattgaggattaagatctgttgatgaatcaacaaggtgggaaaaagtactaagagtaattagcataaccaaacacaaacaaagtactaatttcttgaactttggcaagcaaatattgaatccctcatgctagaatctaatggtaatttctacactagagacaatagattttatcttagactactattacatagtattgcaggcaaaagtgactatgtggagttatggtatgtgttttttcgatattggtgtgatatttgtgagaagatgtaaagatgaagtagcacaaataaacatgcagccgatgttgttgcttaaaaaagtgagctagggatcctaaagtgaaggggaggaagatcttagaataatataaagaatcattcttaaagaggaaaaaaataatgtatttgtttcttttcgaagagggttactctgttgtacctcttttttgccaaagtttaatgctttatatgagtagctcctgtaggctgtgtagtaatggaatagtaccaacggtttgcatggcccacggctccggtcctctgtgttcctgccgttttaacaaaacatcaaacaaaaccactttccttaacaacaaaggaattatacatagccagaatccacaacattaaagagtgtaaacttgaatgattaagatataacccattgttgtcaaaaagttaaaggtattgtatacttcaaagtacaattttgaaatcaaggaaaaagctttcgatacaatgaatatgcaatgccattgaaccgtaactcaacttttcatgctgtttttttcgtagtttcgcttaaactattcgtcaatataattagaaacgaatacaacatataatggaactatggcagcataggtaattgggttataaccaaagcagcttatagatggtgtatacaaagaatctcactaaacatgttcactggtaaaagtgttcaagaaagtgtaagtgtgtcagtttaacagtcgccttcaacgacgtggctagttaggaaggtctccagaaacccaaattaggctaatttccagtcaagattggaatgagatggatatggttagacaaaagcaaaggataaatgtagagatgtagggaaaccaatgaagaaagatacttaacttcccagcggttttcgtgaactgaactcttttgtacaatcattgtcagattctttcataacagccttaatctacttagatttccaaagcaatgttttttaagtgaatctaaattccccagggtcacagggacccactgtgcttttacactttaaagcttcctccaaatcccaataactgatatataacatgactatatctacaggaaggaacacacacaaaatcagaactcagaagggctataatctcataactcctaaccttctcatttctttgaagaaaagaaagatactctgaatcttcttgtctgcctaagagcagaaatgttgggttccagtacaagatcaatgttttttcttctcgtctgcataggattactagcagacaacagatataatgtctcagccatgagacatagagagtttttcctcaaagaaacacaagcagaaaaagcaggagttcagacagaggaaatttctaagctcaggagcatcggtgttcaattcaaacacacccttgaagatcaagaaatgctcaataaaaaccgacgcgttctcgaggaagttaacaaagataaaatcaaagctgaggagacacaagaacgaaagaataagacagaagactcattcaaatcaagcaagagacgtgtaagacgaggatcagatcctatccacaacaaagctcagccattttcttaaacggcgcaagagaaatcaaatacagaaaaaggcaatatactatagaaacgcaagaagaagaaaagggcataacaatcaaccttatcaaagctggaggtaggttagttggttattctcagggtttatttttcaagtataggttttgataagaacacacaatatggtgaagccatcagattatgcagaacagcattatctgttcagatacaccaagagaatacatatttgttttcaagatatttctttgaccaagtccccactctattgtttgcattagttcgtataagttttgttctttctgcaatgcttttgactcccaccaaaacatgtcctatgtatataacatatctcaaaagttttgattttgctacaacttcactatgcaacctctattttcacacaaatcacatttgcacttgaaaggtaaacaattctgtctttctaacaaatatcaaacttatcatttgagtgaaaatgaaaatctaagaaattggaattctaaggattcttcatgaacgtagccttaagatcaaccttcaagaaatttacaatcacatgaagattttagtggaactaatacctacattgtgatgcgatccaactaataatcggtagatcaacctctcaaaatcgaagtattacttaggcgccatgaaaaccagcggaatacgaggacttacagttattctccgaatacatcttccggcgagtttaactccgccgccggatcagcagtttcctcatacggtggggaggagaatcattggcacctagccgcaaggaacggctcgctacgacggttcagtcgccgagggcctaacggtgctaccagagagcttagtttagttgttaggcccagttcataaaaataactctctttgggcctaggcctttagatatttttttatcctgcccagccttgatgtgtttgatttgtgctcgatgattaaagttaaatccatcttttaactttaagaaaaaatttgcataaattaatagatttatcgttgtccatcaataaaatggatttataattttactatacaattttaatgatggaaatataaaaatagtttttaaaaaaaatatgtatcttgtttgaatctaatgttaaattgtattcaaaaacaaaacaaaaaaacattgatacatatgaatgtaaatttttcttaaaataaattattaagagattctatgatctatcttcacctcttcttcttagtacgctcaaacggatttcatgttcttgtcaatcaatttaacgattttcttcgtggtcgaagattggtctcgtgcctcctctcatttctttatcactaaataaagagtatcgtgttttgaaacagtacttgggaataaattttgttgtggaatcaagatctttactcgcaagctctctcgtgatatccttctattttgtctgagttatcagctcttcccacacctttctcgaatactggcattgaaaaaacaaatgctctctcgtctccaacggatttttacaaaatacgcaatttgtatccgcattttggttccatttaatcattctttattatgttgcaactttgcttttcacaaccagtcaagtgacaacatcatactttggagtagctttggaaaaactaacttctttgtatccttgcatctccggtttagctatgcatatttgtgaccacgtctctttagagacaaattgcttacggtagttatcgttttttatctagtctttgtttctgtttatttttctagtagtgaattttagcatttgttatttatctaattaagtcttactttgtgtcatttacctacttattcaataggtatatacatagatagaaacgttacgcaaaaatgaccccatgatcatatgacatttaaaatttcggctacaaatgactttttctccaaccttagtggccggtttgcgggatgcgcgtgctatttcggtcattgacaagatcgttaggagattgttctaatccgtctttatgattctaattgtgatacgagtaaataaattgttaaatcaaagtctctgtcaacgaattattagtaaaacaataaatacgtttatttaattatttttattgtatggtcaaatatctcccgattgttgtaaattggattctaattaagcgtgattggtgactaggtttatgataaacgacaaaacgtaacaccaactgttattcatttattctcctcgcaaacaatgctttaattagtctcatttcagggatcagactcttaactatacattaatgaataatttatatgcctttcaataagattttaagttaattaaacgagtatccaaagcttaacgaaatgaatgttgatgtctgatttgttttgttactttaattctaaagagtaaagaccttagtaattataattaataacaaaattagccatgcagtttgatcttaccaataacattcacatgtagtaacattgtaacttataagaaaaggttcatcatttttttcatgaatggatcatcataaaagtaacaataactagtcacaaaatgttccttcaatttttatttttttgatagaaactatatttgttgtaaaaacaaaccctataagaatcgatatggaaaatggctaatgaagattcaaaataattgtggggtacttagaagaggaagacttgaagacatacaccacataattgtgacccaaaagctaatcaataacgtaagcaaaatgcgaaagaacactaaatttcggcgccacactaatgacaagaagtgagaataaaaggtcggtaagagataagagtctttccaaagggtggttaaggaatttagacatttaaatttcatgattaattacgaaacatgaagtttggcaattgtcacaacaaactcttctttgctccacgattgagtcaagtattaagtattcgtgcgaaagaagttcttttagaggtgttttcggtaatctacaaaatcttctagttgtttagcacttttccttttggaacgaattagtacattagcataagtcaaatatttcactagaacacgtaatacctatactagtaagaaattttattgactttattgtttagttagattatcgttataggaaaatttacgattttagacctctagataagaaaatggtccctaaacagaatcaaaattgaaaagattaaaacgttttagtataaaaatgcaggggtgatacagtgaaattaacagaagtatggggtggtaacgtaaactcttaaaaataagaaactgtaatatgtacagtggaatatgaaactgcagggcagctgtaattgtcctttagtacgatgcatgtaatgggctattgccacgtatacactttggactcaaatcttccaactaatcccatcctctccttcgaatatattcgattaattaaaattttatgtcacgctcagaaattattcatcttttttatttcttttacacaacaagttacccactggtgaaagtgaaaacccatatcttacaaatgtcccgtaaaatcattgctttctgataagacctcagattcaatattttatacaggttcaaagtgtatagtctgtctatataacgtatgaatagatatcaaaactagtgactaaaatattcaaaaaaatctctgtttcaccaaaacaagaaaaaaaaaaagtaaaaaagaagttgtgaattttcattgatatacagtgagtgttttctttcttttgctgtatgttttggacgtttgtgagtaagcacttattattattttccaagtcctaattatatttcatcactgccatgttctttaccgatataattacatcatcgtcacatgcacttacataattatccttttttaataaataaaataaaactacaaaacctaatcttctcattaatcacaaaagcaaaagatttaagtaaacacactataaagacagaactaaacaaaagctatggatttgtcttccaaaccacaacaacaacttctaaactctcttcccatcgccggagaactaactgtcaccggagaaatgggtgtttgttacaaagagtgtttgaaaaaccacgcggctaatctcggcggccatgctctcgacggttgcggcgagtttatgccgagtcccacggctacttccaccgatccttcttctctccgttgcgctgcttgtggctgccaccgtaacttccaccgccgtgacccttccgagaatctcaacttcctcaccgcgcctccgatttcttctccctccggcactgagtcgccgccgtctcgtcacgtgtcttctcctgttccttgctcttactacacctcagctcctccacatcacgtgattctctctctcagctccggtttccctggaccgtcagatcaagatccaacggtggttaggtcagagaacagttcaagaggagcaatgaggaaacgaacaagaaccaaattcacgccggagcagaagatcaagatgagagccttcgcagagaaagctggttggaaaatcaacggatgtgatgaaaagtcggtgagagagttttgtaacgaagttgggattgagagaggagttcttaaagtgtggatgcataacaacaagtactcacttctcaatggcaagatcagagagatcgaacatggcctgtgtctgaacactcacagcaatgatggtgatgggtcttcatcttcttgaagaaagattcaagattcgggttaaaccgaattaggatactttaatttgggaaaatatgagcattaaccggtttaaaatcatataatagtgtcttttctctaacatgtaatcgatcttgatataaatatttatgcggtttgatcttttctattttcatcactttgacagagatgtggtcagagatcacaaatgggtttggtaataaataagtttttaaatcggaggttgaaacgaattttgatagaccatttctaattatagtaagtgcataagcgctaattgtgatcgtagagatcaaaagattcgtttctttgtttactttctgattattcaatgttatcttctgtattattagaaataaatctcctgaactttagagatagagtaagtaaagtttgcttaatgaagatacgacgacgtggttattacgaattgcaacaaactatggcgtggcggaatataattaggtcactgggcggcacatttttgttgttaatttatatgatatgattaaaagttattaaaatgctggcttatctctttccatttagggataagctttggcaacaccaatcttgcttatttatcctaattaagtacaatgcagatgttacgattactaaaatatctactatgtgcaatgatttggctcttcccgcaccactgatattaaaaattcgttttttttctttcattcatcatgtattaacgaatcatagcgaatgctttatcacgtataaatggtcgtaagttcaatgccggagacaaagtattttaccatgtatgtacgaagtaacgaagcccaagccttaacaaaaggccggtacgaatatccatgccagatagatcaatgtatgcaaaagctctatgtagatacgagtaactgcatgcaatgattaatgatcaatatatggtacacaaattgtttaacatgcatttggcggataaaataatttacattatagatcggtatatgtgtttatggttggatgattgaattttttgtatgctactaattaagattccgattggacaatattccaatacctagctaatatcgattttagatgttagtggtccgattaattgatgatgtagatatcaaattcttatatcagtggatcaaaaatatgatacacgaagacatgttacataatgatgaaaaaagtagcaacggataatccccataccaacagtatgtaacatgtcttcgtgtatcacattttttagatgatatttcaaaaaaaaaggtttttattagttagatgttttcttttgttggaatatgcaaagaggaaagcaatgtaaaaaattccattatagctaaagcccattgtagtttttgatttttgagactagacccaataacacactaaaggacactaatcgaaccaagtatcttagggatccgttaagtctttcaccaaccggagacttggtcaagtataagtataaccgttgaagcataccataatccaagtcaaagatcagaatccttcagtggggatcttgcatccaaaatcgatatgtatagtcacggtggcaattttgagccaagccagagacgaagcagctcaggaaaactcatcatgctttactttggattggtaaggacactgataagttgatcaccacatggaacatctttatcatctatctagtgtgtatttatgttagataaatgattatcaagagaggtcttcttgggttgggagatgtataaggtagtgattaagatgtatataaacacatttaaatgagtcaaatggttaaataagtcaattttttgtttgaagtaaaataaaataaataagtttcttttataaagtaaacaaaatcattttaccttctttacaatttataagataaaacatgcaccaatcaccatttattaaatctagtttccattttacctacattaaaagaggatgggatacgtcagcatcaatgtctggtccaaatttattgagacacgtgtagccttgcatctctattgcacgttgaaaatgaaacgaaaatgataattaatttgcttaacacctaaaagaaaaggactaataaacgatcgcactcgaaattaaaaaggaattttcaatttcaacgtaacacgagcatctgccaaatgctctcgtataatagtcaatcaattttgtttttggaccgtgacttggccatgtttggacggtcgaagaccaaaatctctcacgcgactatctacaattctacatgttacccaaactcattaatacacctataaggctacaagtgttcaccagcagctacacataacatgaaactgctgatatttttcgttggtcgcccccccataggcatgtatgtccgggctcgaccgtgacccgatcatacctttacttgatctatatcttccaacttttctaaatagttatgaaacgctaattatctttactattacaactactttttttttgtgatataactataaatatcattaaaaatgaaaagtttagggattacaaaatgtaacacctataactttttaagtcaaaaaacaaggctacaaatatttatgaagacaccaaagtgaaatcacctaatccaaagttgcattaaatttctaaaatgcttcatttgtcttcgaggactgattacagttatgatatctttatccatcagctcaaaagtggtatggtgagacgagactgtgagattgtgaagaacattattccactgcttccaaatgtgataaattgtagtttgagatgttcgaactacccatttaaataataaataataaattctttaaaactactcaaatccgaattttactcgtttaataaattatcctattttaataacaaattaccatcatcatatctcttatttgcatttcacaaacattattttttaattctaaaatctatatacttttaccagcttggtatccgatattatcctatttttggcttgttcacccaaatgtacaatctgcaactttagaaaagaaattaggtttaaagatgatattcatgaaagaaaatctcatatgtgaccaaagaaaacaatttaagaaaatcttagattatgactttagaaagatgatattgtttcttttctgacaaaaaaccaaaagagatgattttattaaataacagttgaaactccaagagaaaaagggcaagtgaaccaatgaatgttttgaagcaaagtgacaaatggagaagaacccgaaaagcaatgtaaagtttgactcttgagttctcccacgtcgaaccatgtccgttctccgataaaaaaaaagagtaagtttcattacagttattcgaataattttaattcaaatcctaatgtatttgatattaatattcatttttttcccaagaaaacaaaaaactttattctcttcttccttttggacatcttaagcacaaggcaaaaaaacattcaaatcagaaagaaaaaaaagaagagaaaaattacaaaattgaatgagaaagcgaaatgtcacatatatataaagaagagttgtgtaagagtgaaataatttcccatccacaaatctcgcacctgattccataaattgatcagtttttctttctttctttcaacgcatatctagtgactctgtaacactttctatgtccgaattcgtcttctccaatagtaagagattttgacaattttcttgggggagaaaaaatcataaaaacactaatcatgtgtacccttgaagacgttttgtgtactattatgttaacgcgttgaaattaacgatgatgggtattgttacgacgaagacgaagacttatacaactactaacttcgatttctccaataaaggttttggtgttggtggtttgaaacagtttgtgtacggaaacactttcattgttctcgatgctttctgggtttctttctctaatctcttcaggtaaacgtttttgcttcttctttattattctttgttctctgtttttttgagttcttattggttaatgggtttgtttttatttagagttaatccagacaaagagacaagcttggtcttgttcgagaaacagaacacaaaagattcctctgtttttggagatcatcaagatcaaaaccaaatttgtggaacacaagacgatgatcagatggaaagctctctggtttcgattagcaagagatgcgagttttattccgacaacaaaagtatcgttggttttgtagaagaacctaaagcgtttagctttaagtttcatgagtattctgctattactgttcaggaggaggagaagaagaagatggtgagtttctctgatgaaaaaacgagttccatggttttggagaaatcagaatcagatggttttatgaaggaacacgtgaaagaagagatgttggtttatgagttcatgagttgtggtgttttaaaagagtcattggttcacgagaatcttgttggtggtgaagacaacttgtttgatgatgatgatgggtttatagaactaaacccaagtttacagatttcaaactttgcttatggagaagaagaagaagaagagtttatacacagagaagaagagatgaaaatgggctttgatgaacaagaagaggtatatgatgagtttgatgatggttcagattcagatgatgatgagtttgagcatagtgatgtgattgagaagttgaaaacagaattaaggactgcaaggacaggaggattgtgcactattcttgaggaatcagagactccattacaagagctgaaaccactcaagattgaaccaaaaccagatcaacacaaagacagaattgctgaaattcacaaggtttacaagaactacgcggttaaaatgcgaaaactcgatgtcatcgattctcaaacaatgcattccatcagtaagtcaatctattctcaattcaattttcaatcaatgttcttagcagactattacatcattagcaatgacgtatctacagagtcttaaatttttgtctgattccagcttttactttgattgtgaggacatattgttgaagaatgtctctttccttcttaaatgttttctcaactactcaaaagtgttagttgagtatatagttaacatttttggatttgatttaacaggtttgctaaagctaaaagattcatctaaacctagtagaaacactgataaaccgcctaaatcgtctctgcatcagaatatatggccattcaagaaacatacgcttgaatgtgacccgagtgagagacttgtgaaagaagcaagcagagactttgagactgtctatgtaggccaagtttgtctctcgtgggagatgcttcgatggcaatacgacaaagtcttggaatttgattcacaggttactacttatcaatacaacttagtagctggagagtttcagttattccaagttctgcttcaacggtttgtggagaatgaaccgtttcagaactcctctagagttgagacttacttaaagaaccgtcgccatttccagaatttccttcagattccacttgttagaggtaacaaaacatgttttcattattctttatagtatatactgaacctttcttgctaataccataatctgcaaagttttcagatgaccgttcttcgaagaagaaatgtagatatgaaggagaattcgcggtaaagactgaaatgttgagagagattatccgagagtcgatgagtgttttctgggagtttctttgtgcagacaaagacgagtttacttcaatgatgaaagtttctcaccaaactcaagtctctccacaggattctttagaccttgagctcttgacagatatcagaactcatctccaaaaggtatttaaaaacttcaaattcttgctctcattttgtcagattacatcaatgtttaacaattcactcaagaacctgttcttggcctaatgtagaaagagaagaagctaaaggaaatacaaagaagccaaagctgtatagtgaagaagttaaagaagaatgaatcaaagagtagtattggtgtgaaggatgaattactaatagctaaaattgaactgagactggtttcaagagtgatgtacatgtcgaaacttactactgagaagttacattggtgtcaggagaaacttgaaaagatcagcttcaacggtcggaagattcatatggaaccatatttctcgttgttaccttgttgagccatctctgcgtatagattagatcatagatgttggaacaatatggcttcatcagatccaggaagatgtctttttgttgttgttcatatcttcctgagaacaatagtatatctaatgaatgatatgtggtagcttagcgtttttctttctcctctaatcaccacaacatctggaatcacctcgaagaacattttgagaactagaagtaaagttgattaacatttggtacatgaacacaaatcttcttgaacgttgttgaactagtgattactgattaatgaataattaaagaaaagacaaacgttcgaaagatgggcctttgggccaagtcatatttggattattatgtaagcattaacaagcccataaaatgtcgtccattgatgatcataagtcaatatgtaatctgaaccgtccgatctagggctttaggtgttgaagtgaaaaaagaccctatataaagataatatagcttataaagtctcttctctgctccgtcaagctgaggaggataaaaaccctagggtgagtgagacagagagaagcgaaaatggtgcagcgccttgtttaccgatcacgacacagttacgccaccaaatccaaccagcacaggatcgtcaaaactccaggtctgttctgtttcttcaatcgcatatgctgaaattcacaaatctgtatccatggatctataagatttgaaatgtattgacgtattgatgatttgcaggaggtaaattgacgtaccagaccactaagaagagagctagtggacctaaatgtcccgttaccggcaagcgtattcagggtgttagtattcttcagattcatattctctccgatttgagtctaaagttacatactttgtttgattttggattgacccatttgattgttttgaggttattctattgattgatgcaaatgtagtagtttaggtttggtttgtttgtgcttattgacggtcttgtgctggttagatgaattcaacatcagtagataactttatcataagctaaatgtagtgccgctttgtctttttcaagttttctctgtggagtaagctttaatcttggtggcagaaataggtaaatcatcttggaaacttttcactaggtttagatttgtttgttttgccatcttgatggtaaattgtattagttttagattctgtattgtattgatttcttcttgtgcttattgacggtcttgtgctggttaagattaatccacaccagtacataactttatcataagctaaatttagtgccgccttgtcttttcaagttttctccttttgtatgtaaggaatcacttttatacttggtggcataaatcttcaaacatcttgtaaattgttcatagtttggtttacagtaatcttaaagttgatggagttgtttcagccattttccttcagcatctaatttatatctctttggttgtttagattcctcacttgaggccaactgagtacaagaggtcacgtttatcaagaaacaggaggaccgtgaaccgtgcttatggtggggttttgtctggttctgctgttagggaaaggttcgttcttgagttcaattttgtatttgctttgtgcctttgtaaccaaagacaaatcttaatggttgttcttgtgtgttacagaatcattcgtgccttccttgtggaggagcaaaagattgtgaagaaggttttgaagcttcagaaggcaaaggaaaaggttgctcccaagtgatctagaccctattagtttttatgttttatggctctgttctagcgatagtactggttgcagagaaaaacattgtgtactcatcaaaaaatttaagcttttttgtattggttttggatctttggctctgtctacaattcgtttcggttttcgtttcttgttcatgttgagttcacatttcacgttttcaattcttacccccgaaacttcctattggttacaaatgatttatactctttttttctcttttgagcctaaaactttaacttctgcaatatttgttacatgagtgattatctataatagatggttgtgcaaatttctttggcctcgtttattttaacccccaccaaatttagtagcgttctttcttaacatctcccaaagcatatctttgccacgatggagtgatactgattgatttgtgccaaaaacatgattcgtttacgaacttaagcacttcaatatcatcacaaactaaaagaaaacagagaattcgtattaactaagtacttagagacaacaaccttgtacgtttattggtgatgactacgaggatcatcagagaacgacaactttggatgatgtagagagtcttggaatggcaaggagttcttttaggatgacagaatcttctttcttcacggaatcatccaagcatagggtcagtttcttgaggatggttgaattctcaagtaagtaactcactagtttcatctccatcgcctctcctttcaatggcctttctatcttaacatactcgagagatgataggaaacgcctaggtcccggcaaaataatattttctcccttctcctgataactagcagatttctgcatataccgagtgaaagaaacacaagttcaagatatgataaactttcaccattttgcatcttaataagaatttcatggttcaatagacaatactcaccacgacaagagtttttagattcgggcagctctcaagaaagattggcaacatttcccacatgtagccgtaaaactcaacacacaagacagataggttacggaataagggtagtcgttcacatcttgagaaatcatagataacctgtaaggaaaaaaaaaagtatcaggaaagaataaagttacacattcaatcaaatagcaaattcaacattgtagtgtacctcaagagtactcgaaaaaatgatcatatctttaatagtagagatgccgaggagaaaattacgtatcatagttctctttggtagatcatctggattaaacttattcacggaactcaagttaaacacaatatcgatatccgctttgacaagcttaccgggtttattaagtataaaacttgcaactcgatgatcacttagcctcaaatactcaagcttgggagcatcaattgaaacaacaagatcttcaaccacaccctcatcactatccgcaacatgagtgaacctcaacagagactgagaccgcacacgtaaaacttcaatctcatcacaaaaagacctctcaatagtcaagctttcaagaaccgggcatttcgtaatcagcgtttctaaccccatatcgtcagcaaacttagttataatcagatccataactttgagtgaaggtaaagaaacaaactcgggactagccaaagttaatccacaaagctttaaagataccaaactctcacaagtgtaaatgcttgaaggtaactgaacctcccaactcccatacgaatcatccaaaacatcgatatgttgaactttacgcgtgacgatagtgttgatccaacgtccgataagaaaaatgtcagggtcatactcgtcatcacaatcatacttcaagataaatttttgtaagaatgattcactgttgaaatcgagaaagctatcaacaaaactcaagaatgtgttgaactcttggaaatcagtattgtctaggtctaaaccaggtacgtgtttccagagatttctccatctacgggataaaacactagtcttaacaacatcttttgtgggaagattcaagagtacctcacatagcaaacaatctggtaatttgcttatccaatcaacttcatcagatcctttcgcacgaacatgtttctctctatcttcatccatgaaaagaaaaaaaatatcgaatcgataagaaaccctcaaaaacttaagagagtatcgaatcgacagttgtacaagaaaaaaacgagtctacagttaatacgacatcgttttatagtataaatcgcattgtatttgtataacgggccttatgggctttagagaaataagaacataaaagaaaacgcattataatttgaaacgatgagtttgatgaagagatcatgtaaacatgtagttgttgaacaactttgagatctgatgtggttgtgtttcttgtgggacaagcaaaaggcttcgcaggtactgttttatttagtctagacactactaacgagtagcaaagaattgctccatgtggtaatcaaacatctggaggattattaaatctgtaatatttcatcttgcactacaatacttctaagaatatccaatactaaaatgtgaatgtgaagaaattataaaacaaaatcaacacaaaatctttcaagaatggcctcgtagatggatagattataaaaaaaacatgtttgttgtagtaatattacatgcaaaacaaaaaccgaaagtagaacaacaactcaataatgtttatatacaaatctcaaactccaagctaaattcgctcttgagaagaaacgcaaaacgcaaaaaaaccagttctgtttctgattttaaaactacacctccaataacacaaagtatcatccatttctccaacctcagggcagatacataacatatatccaaactccaaaatcttaatcgtctttgaattctttagtcgggcgagcttcgaatcctccatcttctcttttctcaagcgagtaaggcatgtaagttccaagaatccgatcccacatgacaaagaaaggctgagagaaattgtatttggttccatagagctgatgatggatatcgtggtaagccgagttgttcttgaagaccatatggaataagtttccaggtagccagagaccgcaatggtcgtccacggttttgatcgtggcgaaagagaagaagaagatggaagttcttggagacataccagagactaggaaagataaggcgcctccaattgtatccaagagaagaccttccactggatggttgtataaagctccatatgcataagggacgataagacggtggtgttgagagtggatatgtttgtataagaacttgttctgatgcatatatcgatgcatgaagtattgccatgtgtcgaggactatcatggcagtcacaaactgtcttgctaggaccaagaaggaaaactgttgcgctttgtctgcttcggcatcacttcccgtcacctgtatagacaatgaagaagcatattagaagaaggttaaaagcaaaaactagtacaaacagaaaagaagatattccatgatattgatgagtcaattctatcagcggcatgtctaagcaaatccatacattacaagtactcaggatcagacgaattcaaaccaagaaccgatgatgccgcttcattccagttcaacaaaagaaccgatgatgtagtcattccagttcaacaaaacaacattccagttcaacaaaagaacttgcttaagcttaaagatcacaattagcaaggtttactatgtttgttggttttctcatcagataagctgataagaaccagtcctctctgaatctaacacaagtaaggaacagaggaccaacggagcctaagatagagtccttggttgaattctagagcagcctaataaggtctgccaagtctaaaccctattgccaaatcacagaacaatccctattgatactttcctctaaagctcttaactattgttagaacagtcaatatatgatccaactttaagatcattaatacataacccatttctctttatgggtcgaaagacaacatcaacccaaaaagttaacctttttaaaaacaaaaatcttaaccatccaattccacacataaaaagtcagcgtcagatatcaaaattccccaatatgttttacctaacttttcacttcaatttcacaaaagcaaaacaactcaaaaatgggaaaagagaaaaacggtaccgtgaacaaaaggatagcgacaacagcttgaacaacctgttgaacaagaacacctttcacaacagaagatttcgatacaagattcttctcttcttcttcaacctttgaatgcaatctataactctctaaagaggagagcgctacataaatcccagaatacaaccagtacaccacaatcggagcaacagtacccaacaattcatccgatacagcaaaacccatcatcattcctaaatctcagcttcttcagatcctcttcatcaaccaaaacgcaaatgatgcaaaaaggatagattattttcacaggaaaacttccaaagttttgatctttattcttcaattggggaaatttgattattgaaacgatgattggggattgttttagggtttgggcgttgttgagttgacaaatcaacgatgaagaaagaaacaaaacaaaggacgatacttgcgttttggtctgagagacagacgtggctgaactgtactcattgaaaagaaaaaagaaaaaaatatctaattatccagtgtggttagatctacagtgagttatctacgtggcggaatctcgatcgtatatacttttgatgtgatttttaacggttgattcgctaagaagaatctcgtacttaccgtgtttgattattattactgttagcgatggcgtgattggttgttttgttcctcgttttagtttcatgtcgtctttgaaacgacgccgtataagtttaaacatatgtgacgaatgtataaaattcatctttactagctctcataattaatgaattaatcaaaaaaaaaatcagtatccgaagttttactaccgataatactaattgaatgaaggcaatctcttatattttatgtttctataaaatagaagagattcttaaccatgagagataaatggttaagaatgatagataactagatattatgagaaatttttagataaaaccttttcaagaaactcattttcgatataggaaataaaaccattgtcaataaacattggaaaatagattgggagattatggaaaatcagtttttttttttgtctcttataaaatagggtgatttgcagatatagcatttttttactaaataattaactaactaacaccataaatttgtaaatgtaataaataaccttcaaggggtgtgaaaagacatcactgtcctgatgttacgtttgtcagcgaggaaggaaaatgtttagtgtgaggtgacgtggctttattattagtgttgaggtgagaaaagaaatcaggtggtaggagagaagttcctttttctctttcttttttctttaccccttcccaattataattcatattatctaatctttaaaaaattaattcaagttcatgatatatcaattaaaagttgtatagttttctacatatatcatgacttaaattttttaaaacagacacaaaataatttagatgtgaatagtgttgtcaatgaataacataacgttctatatagatacacaatatttttttatggaaagatattaaaccctaagggataatatatagggaacccaagggtttaaatctaaaccaataattaaatcacttaacatccttaatcaaaacaaataattcattttaaaacgtatataaaacaaagtatacgtaaatagtatatttacaaatagaatagtatctctcaaattgcaacaacaaaactcaatttcatcaccaagacaccaagcgcaacaacgaaagtcgattccctgaatccaaattgtgttcctccctctgtaattcgaaacccccaaatcaaatctcacccaaaagtaattaagagactctgatttgaaaacaaaaacaagtaacaatgtaggtgtaaggactttactggggagaaagagagagggggagggaaaaagaaagagagagaaagagagagggggagagagagaaagagagaaaggagagagaacggaagatagaggtacacataaagaaagatgagagaaatagatagaggggtaaacttggaattaatatacaaaatatagaggatatcatttttttttttttgatgttagttccttaattataaattttttgttggttagttttgccaattcccctataaaatagaattaatagaaaaccagctgagaacatgaatgaaaaaaaaaaaaaactggtccaagacatagcattgtgtcttagtaatctactggttcctattctactcatgtagaagtaaattaataagtaaacaaaacaaaaaagagtttagataatggtagagaatttggtcgcggaaacaacttcaaattcggcctcaatcatcaacgtgtcttctttgtccaagtaagtcttccgaattttatctaaggaaagaaatttacaccaaccgtaaccaaagtttgatcccttgtgccagtagttcactgcaagaacaaaaaatgtgaaacagttataatgagagtaattaatatctcagtttgtatatcgaaagattataaaaagtaataagataataatgcaactgtcttttagtaattacatcggcttgccacgtgattggatccaagcgggtttagaattcgcacaactacttgcgtgaaaatcttctcatctggttttagtgtttcattatcagctaaataaagaaacacggataaatatttgccttttgctctagagttgcccttcggaaacagctttagaaccctacaaaagataaaattacgaacattcatacacacatgtctatagagatacatttttgttaacgatttttatatagatactcaccattcccttcctcctattgaaaatctgtttggtttggaacactcattttctttccactgagaaaagttcttaacactccaagtgaccttgggataagagagtttctcatcatgaaaagagaggatttcccaattggtaagaggtggagcaacaatgacatcaacaccaaactcacattcattaccctcgaataggtatccattttgcggttaatgaatgtttcatatggaaaaacttttggcaatccccacaccattttaagtgcatcgaaccgctttatttcaacatctgaaagatatataagatacatccattactgattttaaatgtgaatttatagaaagagaagcatgagatgtatacttcacctttagtaaagtacttgttttgtttcttgttgtagacaaagaagcggagttccgcaaacacttcagttggtggtttggattccatcaagcttgagctgtctaattccacgtacatcgaaataaatccacttccattgtcctttacgttccctttcggatatatgatcaatctcctgttttttttttaaaacaacatattgcattggctatataagatataatgattaatgctaaaccctgaaaatacaattatccataccagttatatcaccagaggagaaaagacgagattggtatttatgaccagagaaggaagtagttttctcaagttgggagaagttgtgaatcttgagagaataagaagaaggaggatgatctctccagtttttcttgatagtagaagaaactggtgctgagcatgatgcacccatcttattctacccaacacaatgcaagtcttaaaagttaaaactatgattgattaatgtataaataggattcttggggtgtcaagataaactattagggttttataaaaattatcgcttaacaaaaaaaacaaaatacattttatagggggagaggaaaataaagagagatttacgtctaaatacttgtaaacgcatcagattatttggcataagtatttcatttcttggagaagatttttaatttgttggtaaagtacatatcttttatagataactttacaccagatttcatcagttgtaaataacccattttttctctaagaagattttcataaattttgtgatattaacctttaatattaaaaaacgtaaaacatgcgagaaaaaaattatgatcatgaataaaaatattactacattattaattatataaaagtttacttcgtagatggcaaataatgcattctgttgccaaatattgtataaaattctcctaatattcatgtccagtttgaaagattaaacagtgtgctacttgagtggcttaactggagaaattataaaagaagagattatttacgtataatcaaaacgtttagagtatatcattatggaagcaacaaaggtccttctagtaaaaactcaaacaaaatatataacatattttcttataaaagcaaatttatggaaaactagagaactcaaattataacaaactggtccaggacatatagcattgtgtcgtagtactatagtagaagaatggtagatgactgatattctaaaaataaaaagtagaggttagataatgggagaatacttggttgcagaaacaactttgaattcgatttcaacattcaacgcatcttctttgtccaagtaagtcttccgaagattagctatagacagaaagtgatcccaaccccaacccctgcttgattccttgtaccagcagctcgctgcaagaaagtaaaatgcaaaacatggttagtgagaaagacaatttcaaatgaatatctccgtatatataagaagacttatttttttagaaaatacattgtacttcgacgtgattagatccaagtgggttaagaactcgcacatgtccttgcttgaaattcttctcatctgattttagtgtttcactatcagctaaatgcacatatagggataaatatttgccatctgctctagagtttccctttggatacagctttagaaccctacaaaacattaagtatggacttgttaacattcaaatacatgtgtatacatacttgttagtccataaacaaaatttagcaaaattatttatacttctcaccattcctttcctcccatgggatatttgtttgatgtgtaaacatcctctttcaactcagaaaaattcttaagattccaagagaatttgggaggagagagtttctcatcaaaagagagaatttcccaattagtaaggggtggagcaacaaggacatcaacaccaaactcacattcaccaccctcaaagatgaatccattttcaggattagtaaatgtatcatatgaaagaacttttagcaatccccacaccattctaagtgcattgaaacgctttacttccacatctaaatatataaacatcgcttactcaataatatgtgaatttatacgtaaaattttaaagaaagagcatgagatttgtagtgcagcaccttgaatagtaaagtacttgttttctttcttgttgtagacatagaagcggagttccgcaaacgcctcagttggtggtgtggattccatcaagctggtatttatgatcagaggaggcagttgagttctcaagttgggagaagttatgaatcttgagggaataagaagatggaggatgctctctccagttctccacaattctagaaactgctgccgagcatgaacccattttactcaatgacgtcttctaaccctaaaaacaatgtatatatatatatatataatctctttttttggtaaatatatatagaagaatcttggag

SEQ ID NO: 1235 - DNA, 87148 bp, Arabidopsis thaliana
aagctttttcattcttctctttttcgtggaatttaagacaagggccatcaaattttgattcttatcaaaacgtctgcacattttatattaccgaagatgaacctggtcgatgttttggacctaattaaaagacattgaaattaagaataacttgtgccatgtgttaaacaagttgctcgatatattctatgtttcattagcacacactagggattggaaaaaactacattttaaaatggaggcattacccctaattacaaaaaaaaaaacacaagttataaactccggcattagtaatttaaccttttgtttaaaaaaccgtttgagtgagttaaacaagttgtggactcgaggctcagcgatagaatgtggattactcacaagaatatctacttgatgtggtttcgacctgatgaaactatatattagcactaataatcacaactaatggtatgtatgccactcatttaatagttgactgataatataaaccaatctagattcgaccacccagagatcttgtatagatgtacgtatgttttgtagaatcaaattttctgtctcgtgaagagacagaaggaaaagaagtactaattctcttgtcacaactcttaaacccaagttcacgtccaggttcaaacactctcccctcacactaacgtacatgagattctttagttctcgctataaattagaatgtcacccatcctatcttcctcaaacaaaaatagatctaagatcttatatacctacattctaaccatacaagaaatatttatgttcatggtggtaactagcaacaacacaataataattcgactagatgtcctctagagttctcctgaacacttcattggaaatttgttattcagtaagctaacagttaattccactgaagtgtttgggggaactcccgatgtcatttggtgatgccaagccatgtatgtaaaatggtaactttatactctctctactaccaactatattgttttgaatatacttttctttttgttttaattattaatttgattaaacgatccacaaaaatgagtgatcggaaaaattcgctctaacatcggaatggttagaaaaatgatcggaaaagatgaaaatcacaaaacaactcaaattaacaaattacaggttaagaggatcgaggttgtatatactttttagtttgtataaacgattgtattatctttaaactcaatttaaagcacacatacattttgtttataaacatgaaacaaaataatattaattaaaataaatctttaactttctaatgaaaagattaatctctagttttattacattttttggatgtttagaaaagctatggacttttgatcctcataatcttaagtaacctcttatcaattctgtttccatatcatcttgcaatgtattaattgtcaatttgattagttcttcaatttggctgcatccataaggattaaattcagttacctattaatatatgtgttgttttattgtttaattatgactcatctttccttcaaaaaaataaatctatagcaatatccccttcttatgaacttggttaggaacttagatttctttactttttatcatggtatctacgtacatgacatggttcagtgtttggccacccacgatatcttagctacgatgaagagattgtgtattgtgcaaaggttttcgtagagaataaaatatgatataccactaagtgatgatttgatcttaaacgtaatcgtttataaactttaacaaaaatggtgttaaattgctggtaaaccaatgcaattcaatcatttaattgccaataaattttcctactaacattattatttcttaattactaattatactattaaactaactaaaggttaattatataaaataggaattcaagatattaaatgacattggcttttccataatatatacatctacatttcaaccagacattctataatcttaagagaaagtaccaaactattaacacactatgcaaaagtatataatcagactcaaaagggtccttagatctcctacttcccaccttaaacgcagaaatatctcgaaccttgttatactacgacatatgagatgaaggagacatgactatattttgagtagaacccatcttttttgaagaagtctcaagctgttgtaaagtggataagacatcagccatatccggtctgagcttaggttcggtattgagacaccgcaatgcgatgttggcagctgcacaagcccctttgtgagggtactgtcctccaagctttgtgtccattattctaaacacttttcttctgtccaccaaataaggtattgcccaatccaccaggttacgttccactcctactttcgatttgtctagggtgggacgacccgagagtagttcgagcaacaccactccaaagctatagacatcactcttggaggttaaccggccggttgctatgtattccggagctgcgtacccttgtgtgcctatcacttgagttgtcacatgcgttctatctcctgttggtccagcttttgccaacccaaaatcagatagctttgcattgaaatcctgcatttacaagacgattttaagattttgggaatcaatgttatatatttctagtgtacacgtccgtaagtggcaagaaaactcggtttttacttttttctatatagacttacgtatttgtttagaaattatatgtttagaattctaatttcactattttccattggagtgctttttcatttatattttagtcgtaatgagatgatggctctttgacgaatctcaaatcaaagcacgctctaaactcgacaaataatctacttcggtcaaactagaacttaatactatattcggatttatgaatttttaactcaaaaccaactggcaatgaggaaaatgattcatatctttcatatattagtatactactctagatttaataaagtggagctttctattttcttttgctttaacaacttcctaaataaaatatggacaagcattgatagtagatggcgtaccacatcaagtagaatattagaggccttgaagtctcggtatatgactttagcttcgtggaggaaagatagtcctctcgctgcgctaaaagctactttcatcctagtcttccacggaattggctctgcgcctcctacacaagcaaaaccaccaaaaatgaaaaactcccgatagtcaatataggataacttgaatgtaactctagctcagcccaaatcgatccttacttacttcgaaatagatggttctccaggcttcctttaggcatgtactcgtaaaccaaaagtcttttctctccctctaagcaatatccaattagcttcacaagattcatatgatgaagtctcccaagataatgaacctcagtctaaaaaaacccaccaacacttttattatttcatttgactacaaatttttgtttctatagatcaaggatgatgaacttaccaaccactctttgtgtccttgaaacccttctgatttaagtttcttgactgcaacaaccataccggaccctggtttcgaaggtgacaacgagcgttcaccgatccaacccttatagacacaaccaaaaccgccttcaccaatcatactattcggcttgaagtttctagtagcggtttttagctcgttgaatgtaaaggcctttagtgttggagatggtaagagctctccttcacttctaggtgtcaaatttgaccatgatgaagtagtgaagctattgttgctataagaaggtatggtgagacttgagagtcgagatgactgattcggtttgcgggaaattcttgatgaccctattgtcaaatttgagaccaacataagtagaaactttagttgggaattaaatgaaaattttgatagaagctttatataattaaagagaattaaagaaacctagtatcaactatcaaatatccatcataattctcaaaaggcgaaattcgagaagagaagtgtggttttgattcttacctccaaaagtgctttctctattacctactcttgcagaagagtccaagcaattccccattagagagatcaagaaaactgaaatcgaggtttcttttccgatgaagtaataagagatgaatctttatggatctcagaagtagaaggaataaaaacagagaaaattagaagaagaaacagaggatattaagaaaacaaaatgagataaagacaaagaaaggttttgtatgatgataaatttttgtctgtcgttgtcgttgtcgtaggtcaacaccaaaaacgtgtgcaccacctatcactactttggtctgctgcattttctaattttccctttttcttcttccaagttatctatctactaatctcatagaattttctagcatagtaattaattccaaaagtttatgtcagatcatctttttcatatccgttataatgtttcaaattttataattgacgatatatttatattttcaaatatgaaatcgataatatgccgacacccaacgatttccgaaattcatagaaatttgaacaacatcagttttcgtaaatggtttaactcgatattattagatgaactttctatccatttgaacaaattatgtggaccaaaaattcttgataagtgacgatataacttactcggatcacaataatttaacctacaatatatagatcacaacgtacggttcttcattcatattttaaaaaaaaagtatgtgaagatatcaaacttgaaaacgtactttccgcacaagtttctggaaataatcaaaaaaattataaagagagaaaaggcttgaagggatatgaataggatatttgttaattataagaatgttgcaagtaaattgcgtaagggttagtttacaaattacaacgaaaagtcaatgaaatgcgttgtgaagtcaattctcatctccaaaaagacgaattgttgcttttcctccaagcaaagcttcaaaacttttatatgcaattttctgagtcaaacgtctttatatcgattacttttctctatctagcagctcaaaagccctttttcctttctttaaaaactaaaaagtatcacacatctctcctactgggctttgaaaacgccagactcaatagtgccttacatttaaaagcccatctacattgaacagtagcacaaaaagttattggaaaaactgtcccgttccaatttttggtttggtccaaacactgttaccgtttctttaatgtttaaaaaaaaaaaaaactgaactcacaaaaatcagtattttcttttaatttgtgtgaaacaaagttaaaagaatgctaatttagcgtttgacattagcgtttctatttaaacaataaacaatattttacataataggattttaaaaaaaatagttttcatataattttttattgttttttcgacaagagatattatcccatgaacatttcttttttgtttatagttagcagaatgatcatttacttgaacaaataaagtggaggatcatttggtgaacaatacaatcggaaaataatttcacaaatctactcaaagaacctacattttttctcttgttatatagattttttttaactactttattaacgcaaatacaacaacatatccaaacgatcaaggctaagcacattcacacacatatttaacctatccaaacgatcaaggtatcaatctatgtaattacacgctttgaatatatataccgagtaacaaagataaggcaaacaaaatttgaaactaaaactttcataagaaaacatccatttttcataaaatataatcaagaacattttttaaaatatataactaaactatatattgatactctttcactcgagctaatcaagccggattgagagtttaaatgtcatatcaagggaaatatgtatgcatctaccaatctaagcattagtctcgacctttttggtaatagaatttatgatttcaatttagaagtggtcactcaataggaagatccctcacgaaagtcggtcccaaagtccaacttgagtttttggtattatcatatattcatatatgtgtacataaaataccgtaattcgaccgttgacaaaataaattaaaaataatgaaaaggtaataaaaatatatgtggcaacgtgaaatggcaacgaaagatcgtttgctaacacttaaacaaagtccaaacatcgaaccactatccttcatgtcgtgccagtcacatgcatcccctctctcttttcccttttctcactatattttatttacactaatataacactaaaagagaaaagtaatatgtatacttatgcttacaaatgatatatcatcgtttcttttatttatatatattatcttgctcatagttttgtatttttcgttggaacttacagcatacataacaattctaaacaatttcgtgtacattgtttaatgttaaaattttagtagccatatttatgcccagaattttatatttcccactatagcctacgtatatatcgattataaaaatatacttattacttattagtaaagttcgtatatacaaatataatacccagttccatggatatatctctttgaaagtgtttatctttgaggaaatatattagatatctaaacgttcattccgtatataacatttatagtttactagtaaatttacaatagtataaaaataaaatgataacgctatcactaataaatggatcgttgtaacttgtatgtagcttaaagacaatatatcttatctacttttagttgatattcttctgagccatttttccattagaagtgagtagtttataaggaaattgaagcaccaagcacatggccacatagccagctcttctttacgggtaattctttgtttggtcgtagctacactacaattatactataattataaaaaattgtttcaaatacatgttggcatctgatacactgtcaccaaaaaagattagattaaggaaatgcacatgatcccataaagattcttgtattaattaatgcataatggcgcatttaaatctctctcatcattttatcgccaactttaaaatattgtgtcttcctctagggtttcagattctgtcacatgcttgcttcttcttccgtataattttttataatttttaaccgtcatttactatcttcttcgactcaataatccagattgttataaaattatacgctaacttggaatcgtgaaaagtggatttaaaagtttgtcgtagtcaaatttaaataccgacaaatcattatagtgacttaaaatgtattaataactatgtggatgaacgtcattgttgaagttgatttccattggacgctctggttatcgctgtcaattgtcatctgaattagcttagacttgtaaccttgtacgtaacatgtcagagatattttgcttcagtttgattctcgactataagaaaacgttgtgaactcctaaaatatataaccactaaagatgattgtacgaataagtgtcgtgtcgatataattacgcttctgagcataattgatggatttgacctctgaattgtgtccacacaccattcattcattataaagtactctagatttacaacttcaatagaaactttgaaatatgaagattaaaagagatatttgaaactgatatatttatatggctagctagttcccacttcaaacatctacatggtatggatatggaatgtgtgttaaagttcatggtatggatttacgatcgtttaaacaacttcttataaaaaaaattaataaggatatatttataattttctatatgtgatgtttaagtattcaaatcatgagtggaccaaggtaggggtaagatataaattattaaatttaaagaacttatagcataacttgtaaattttggtgtattgacccactataaccatgttcgatactcacatttcagttaataactattttttaattaatactctctctatttcaaaatgtaagagacatttttattttgtttcatattataagatgttttgcaaggttctatacaaatttaaatatatttttattatttttaactatttatatgctgtaatattttttatgattggttagatttgtttttattaaatacaaatcatattttttttttaaaaaaactatctaaatatttgtatttttatcttaaacatcttatattttaaagtaaagggattaatagttatgttgtatttaacgaattttggggtccgccactaatagatttttttttgttttttaccggcacggatagaaatcttatgacatattctatcccaaaagaaataatcaggcaacaagcttttaactacaaaagttcaaaaatatacgtacccaataacatttataactagatagcaaacgtaaggaatgttttaccacatgtacaattctatgatataggattttatcatacagacacatgcacacaagaagtcatttcctagttgtacaatttataagtatattacgtggaagtgataagagtgagcatataagtgtagttgaagcatccaagtttacaaagggtccattaaccaaaaaagcaaagcaaaccaaacacggttagctaaaaagaaaattgtactttaggaaagaagtgggtgattctagtgggtcgcaccaacgcatttcgtttgatatgttttgttttgaattcttatagtcatttagagactagagagatcgtgttgaactagagctacatagtatcatttgcagtattttttttagttaacaccgagtatcaagatattttcttatggacctttgggttaacaccaataattttcaacatgggggtttgaacatgttaactgttttgatttttcaaatctaatgaaagttaaaatatcctttgattttaatctaatttaggattctataactggcgacacttcagttctctggttttaaaaagttggcaattcaccactagttctttagaagaaaaaatcaacggtgttctagcctacaaccgcttttatatatggcgatcaatttttttggttcaacatcgttgaagccaacattggccttagtttctccacatctttgggtattaagcaacttttatttatagattttgtcgcattcttttgtcgctagcatcttttaaaattttaattgattttttctaatgattggttcaatattttttttaataaacatagattgtaagtgagatttcaaatttatcaccaaaaggaaacatcgaattctttaagaaatttccaaaagtttaaaagtgtcggccatttgaatgtggaagatgaaaaggagttaaaaaggagaagagtcgattaaaaaggagagtgacaactttccaaccccaaattgtttgcttgctttcttccaactctctttgtcctcttcctctatctcccttggaatctgtgtgcgtctaatgtctcttgctgcttcttttactctcatcaaatctataatctcttctacttaaaatcccatattatcttaaagaaattgaggatatctgatttcttaaaatatttttgtgttgatgaaccaagacttctaatgggactatgcatttaatatatgtcattgatagatgagtactattttacacggtgacacattattttaatgcatgatatgttacttgatacctcatcaatatttctgcgcgagaacgaatggcattgtcatcaaaccggacaacaaaggttttcatcaaaccaaactctaatttgctgtcttttttaatataaaaacaaactataatttgctgatagtgatgttagatttttttttcttaaaaaaaaaaaaaagacacacacggtgaaatgaataatgtaactgtagaataagagaagggttatgaaattgatggtctgcggcatcgtcagatttaaatatcgtacgtcttttgtaaggtctcgtgattacaaatttcactcgtttagattttgtcccatcatttttctttggtccttttaacccgctcgaccaaatcatgacatatgcagaatttatttcatggatttaaacaaaaataatgatttgtttcatggaaaatgtccttttcatttgtgctattccatttatttcttcccacttctgaatatgacgactacgaccacatggtgccagtacccacgactaaactatataatatacaatttattttatttttctccatacagaaaaatgttgggccataatgatattattttttatataatataatggatattacccatttttttacatctcatttactcaaaaagtaaacaaaaaacctcagtggtgtttggttgcagatttcaaagtgagctaatgatatagattccagtttttgaaaacatgcatgggttcttctgatcaaaattccaaatacaaaaaaaaaaaatataaatttttttaaaaacaaaaacaaaaaaaacaggtagaccaatttcaattgtactgttgctgatcaagccatggccaaaaaccagaatggtcatccattgcacagaacatgttactgatactattctcttctttaaccatactctgtcctgaagatgagttttgaaagaactgcattgttgtagtagttgtcgttgcggtggctggcgacggtgggaagaagtgtcgaccaactgtctgtggtggcggtgggtggccaccggttaatgtactgtcgtttgatggcggcgcagttgagatatctagtctgagattatctgaactgttatcacttctgttactgcaagatccttcagtttctttgtttagatttattgattctgtttgttctctgttttttaatcccattatctgcgtaattaaagacaaaattttaaacataaacagagttactgtacaatgtgataagcataaagaaactattgttttcagatctctttccagacaagagtgaagaaaaaaagagataatgatgtctgaaaagtcatgaatcatgtccagttttttaaccctacctgaaagcaactcctgatccaaataattataaaccagaaatataatttttaaccttttttaaaaagaaaaaaatcatcctttagatggaaaataactgtaattattgatcattaacccaaaaaaaaataacacatattgattttttttgttaatttatgagattaattacctcagcttggagtttctgattatgagtttgaagaagatcattttcagctttaagtgtatcaaactgtcgtttaagagtatcataatctttctctagctgctttgttttccaacgagctcttcgattttgaaaccaaatcgcgatctgtcttggttgcaaacctaaggcacgagctagctgcattttcctctctggttcaagtttgtttccaagctcaaagttcttctctagtgtcttcacttgttccatgttcaatctcctcttcttctctcccatttgtgacccatcatctgaataatcctcttctccattcatattgttccctgtttctaaatcacaacacccttccattggagatctcttacctagaaacgaagcaaatcctgaaacagaacagaacagagcattagaaagagatagagagaaaacagaggagatgtgtgtggaagtttatgtatatataccatggagatcttgaggtagagagcaagaaggaagaagaggagcaagagatggagattgatgaggatgatcatcttcgtaagaggtttggatcatgaaatttgaagggaaaaaagacattccattattacaagacatcttcttctgttttgcaacagaagttagtactgtttgcttgagattttggtcgtttctctttagttttttcttcttgccaatctttgtcttaaagccattatcatggtcttataaatctgaagctctttgtgtgagagtttgaaatcaaatggaaaaaaagaagaagaggaaaaacaaaagagagagagatagtgaaatgtatcggcctagactataccacttctggtatttaatttcttctttatttcgttttatatagaaaggctgagagagagagagagaggacatatgagctgagaagagaaagagacgcactcaattgattctctcgttaaaaaaaataaaaataacacgatcaaatacaagcttaaacttcatttacgttaagccaaagtatatataattattaactccaattttatcttcattttcgacaatcgtttatagatagatatttttttaaccattgttggcttccaagtaaaagtgggatccaatttaatttaccctggtatatacttactctttagtctttaggatagtggattattgtgtggtgcgctgagattcatctataaataaaatttgcatcagaccacaacaaaagacacagtttgaactttgaatatgatattgaggtgtaatatctacttttagttggagatagaacaaaaaaaatggggttaaaaaataaataaatgtaattgcagattaaaaatcgtagaattgaccaaaacatgtaatcttagtgttttcgttgtgttattactcatatcaaattggcataatcctaaatattgttgaaaatgaaaaaaggaagcaaattacaagggggtttagcttgcgtacaaagtggaaaatgaagagatgataatcaaaatggtaagaagagaaaggactcttctttttccccttgggagagacatgcagagaggtgttctctctcactcatcatacttgtcctttaaattttatctaataactttttcttttattagatttgtccttttttttgtaagtccaattctcatcttaaatcataactatcaaagttgtgtctctctctctctttttatcatctaaatttatttctaaagaacttaatttacaatttatttttcgctaaatcatttgcataggctgagaacatatgtaataagtagctaactaacgcctttcatacttctattgatgtaaattaatttcatatatataatgatgtagtgatattggggtagggacgaagctggatagtgaatgggtccaatgttgatcctatttaatcacgctagtacgtatggactatatatagacccatcaaataatcgtattgtgtctacatggattgacctagacctgtggatctagggattgtacataattttattttattttttgtgggaagaagagagaagtgatattattgattttcagatgttctatgatgctagttttgattattttgatgtgaaaaaggaagattgaaatatttaacaaaagaagaagataatagctgcacttgtaaaccatagtataactgtgattttttttttagtcggatatatagttactttaaatttgttcgttttcattcttcaaataaaaacgattgcgggtgaattggaaagatcaaggcagtcagaataacatcagagttcataagaaaatatattattttaggtgtccgtcttacaccacccaccttatctaatacggtcttcattcagaaccttagtttaatcttttagttcagaatatggaacgtatatagttaatctttataggtaactgctaaagtctatcgctaaaaaggtgaaaaagtagaaattaaactaacaaaatatagtagtgtagaatttctctatatgtattgttacttcgtttttatttagaattcatcatttttgtatgaaattaaagttcaataagtctaaaaagtatgatcggtccaaacataattgaaatttggtctgaaatagaatggaaaagcaatcaccatctcaaaatagcgtttaaacgaaaaaattatattgaaactgtaaatagacttacaatatatacaaaagcatggattatacgtatgtccatgatcaacaatcttgtaacatgtatttgaaattctagatcatgtctatgagaatcatggtacatcaaatctgatctcatcaaacctattagctttgacctaacctatcaaccgcaagacagataccaaaacgaaacaagaaatcaattgactactggtaatgctatatgtatatatgtagagtaatattgattgaccaattacaaaaaagttatacaattagcaaaataacaataataggaataatcaataagtatcacaaaagtaaaattctcgctaagagagaagggtttctcgtgctatgttggccgattgattggtatcatatcaaatggaagtgatgcaaaaaattccaaatgcattatattagagagttacaaatataaaatctaatgatgcaatttcttaaaacccttttgttgttttccatttatttaaagttcatatatataacagacctgttatatgttagatagcttatgtacacatgaatgcatatgtgcgtgtgtatatgcatgcatagacagacgtataaagatggtgcgtggggtacttaggttaaggaaaaaaccaaacaaaactactatttgattaaccccacataagagctgttctatcttgtctctccctcctttcctcttccattcctttccataatcaatctttctttttattttattttattattttcttaatttctcttcccaacatcccttgtgccgtattcatcgatgatgtttactctaacatcatcaaccacataattattaacattttaacgttcattttcactttcgattagactactattcattactttgagactacttatccgtctctaactgacatttcacgcatcacatcgtgccgttctgcaatcaaaacttttgtatcaaagtacttttacttatccatgcatacatatagcttcacaaatacccgaatatttattgaatgagtatgatttaatttttattttgtatggaatgtgaatgacccaaaaagttatttttttttttggtaaggaaagagaaattaaagaagttataaacaatctggtttttagaagacgagtaaaaattgttaatttcaactaattatttttagtactcaagtatatattatatttattggcaaaacataaaagatgtaaacatctagatacattttaatccattcgaagaacttaacaaaaaaaaatttcatacattatattacattcggtgtggtacagatcgcacggtcaatcaatctaaagatcacttgcggtgattgagcgacgttgtatgattttatccatacttcatattgtttactgttatgatccattcttcacaagattgactagacgcgatatatgtgcactcttatcatcaagaagtgaaatatagcgtatgattagatatgtgaatttaaaggctagtcttacaagttgctagcgaatttggaaaacttgtatagtcgtttttttttttcggtatgatcacccaactttgacgtatctatttcagacactataaaagcatatgtttcgattactgtttatccaaatggaaatgtctcgcccaaaacctcaacatgaaagtcaggaaagtccaacaacgtagttttcaagaagtcacaatatgtccctcctctcgtgtcacaccactcctagtcctagcgaactagctgcatagtgtaaaatactttatatatgaaaaacttagacataaatatatatatacgtgtgcgtgtgtgatgcatgtttattgttttttattcaggcctatatgcattctacatgttttagatcaagatggtgatacagagacactactaatacaaacacttgcataaatcctctatgattatgtcattcgtattcattattttaaaaagaaaatttacgtcaatacttgaaatacattaattgatatatgttttcctagttttggagaaaagggtggtgttcatatgttgcaaaacacaaacatgtaaatacagcaaagaagacatagtggacccatgacaagaaataaggcccaaaagttgggctaatttcagccatcacgacaaaggctacttctcatttcgacatccatattattctattcttgtacacttctctttcattcactcgtcattaatatgccttcaatctaatatatttaaggacacaattatacacacgtccatatataaacttatattgttgccttgttggatatatataaaagttattgtaattagtagttactagttagagtaattttcaggtctaatagtgatgagattaacgtattttcttctttaaatttcagttatttgcaaataatgtcactgctcgatttcctggaataaaggagctaataagagtatcatgttctccttcatgttaccatttcacgtttgcacgttttttttttttttattatgaacaagattacgatcacacgttcggtttgttgtttagtcgttccaagtgtataggagttttatccacacaaaaaaaattttgataggaatgtgtaattccataaagatttccatcgttacacactaaagttttatcttacgcgccacgccgtttgtggagtaaccgagtaactaatttactactagtcttgatgttggtaggattaaataaaagaatcatggagataggatacgattgtgtttgaataattcaatatgtttatatctggaaagatctacaaatttgatatgatcactaagattgtgggaatttattcaaatccaaaacacatagttacaaatcatatacaaatatggaaaataaataatgtctaataacatttgtgtaacatcatctttaatgcgagtcatttagaaatgtaactttttttctttctgatatgtttatttctggaaatatatacaaaattgacctgatcactaagattgtgggaataattccaaaccaatatagaaagtgataatttattaaaaactgaacatttgtgtaatctttttttttttttttttaatgtaatgtcaaattatattcaaaaaaaacatatacttttttacaacttgtgcttcatgtgtaagaaagggagagtgctaaaaaaaattctgaaattgtccaaaaatgattagatctttcgtagagtcgatgttgactaccccgggaatgaacccatttgtgtaatcttttaacatttattaaaaacaaatcatagatagctaagattgtgggaagaattccaaacgaaattaaattcacactaacacatttactaaaatcatagatagatatagaaagaaaaaacttttctactaatttttttgacatttgtgtactcattatagcgagagaaagagatgggcctcaaaacttttattaggcccaaacgttttaaattcattataaaaataaaacaattccacgaaaatttcgaaacccatcactttggcgcttatgtgacgcgcttatttcgccctcaatctcagattatttagtcctcacactcgtcacacccccgcttcctagggtttcatttcgtctctttatcttccttcgtctctttagcttccttcgattctctgactcaatcatggcgccgaagcgaaagagacctgcgacaaaggatgacactaccaaatccattcccaaaccgaagaagagagctcctaagcgagctaagacggtgaaagaagagccggtgacagtggtcgaggaaggggaaaagcatgttgcgaggtttctagacgagccaattccagaatctgaagcgaagagtacctggcctgacagatacaaaccgattgaggtaatttcatacatcggaaactggaattttgggtgtttgtgtatgaaatagttagatctagttgaaatttgctgagatttgttgcagatctgttgatttctgaaggattttttgtttgttttgtttcaggtacagccacctaaggcttcgtcaagaaagaagacgaagtaagttccttgaatcctttggttcttgtgtatagtcagattgagaggctttacttttgtttgattagaaatgttttttgtttcgtaaatagttgattaagtgaattcgttttgtagggatgacgaaaaagttgagatcattcgtgctcgatgccattatagacgtgcgattgttgatgagcgtcagatatatgagctgaatgatgatgcttatgtacaggtatgactctattacgtctaaattgcatttgttacattttaaagcgtagatttatgtggtacattgaagaaaatgagttagagaggagaatgtgcatgacattgtgtttcttggtgtttgagtttgatgactattgaggttttaccacttttttaatgtgccaacatggttttactgtgtagaaaattttgatgtgtagggtaaataattaaccaaagttgatcacattctcctccctcaccactatcaactgtccgcaataaatatttgtgcattgtctctgtttgtcatgctttgtatatctccaagtccttatgatagtagttacctttcgaagctgagttctcatctgtaacaataactagctgattgttatttagactggcattgcatattatgcattggctatatgaacgtttatcatgttgttttatgtttttcgtacagcgtaggtagatgctttaccatatataacttctgtttttaacaactgagttttgtaatttttgtgcagtctggtgagggaaaggatcccttcatttgtaaaatcattgaaatgtttgaaggggctaatgggaaactgtatttcacggctcggtggttttatagaccttctgatactgtaagaataaaaaaaatcttcttcttcactttctctttaatctatgttgaattgtctgaagttttttttctattcttaactttcaggtaatgaaagagttcgagattctgatcaagaaaaagcgtgtgtttttctctgagatacaagatacaaatgaattgggattacttgaaaagaagctgaacattttgatgattcccttgaatgtatgttcttacttcactgttacttgtagtgtatgcttttggtatacagtatcttagtacaatcttccattgatactgaacttatttttgtttctcatgccaggaaaatactaaagagactatccctgcaacagaaaactgtgactttttctgtgacatgaactatttcttgccttacgatacatttgaagctatacaacaaggttagtgcttttaacaattgatcttcaagtttagaaactgccaactggattagataaaatgctgcagtttttgaagataactaagcatttacagatctttcaattgtgcagaaaccatgatggctataagtgaaagttcaacaatatccagtgatactgatataagagaaggagctgctgccatatcagagattggagaatgttctcaagaaacagaaggtcacaaaaaggcaactttgcttgacctttactccggctgtggagctatgtcgacagggttgtgcatgggtgcacaactgtctggtttgaacctcgtcactgtgagtcatttttgcttgctaataatcttctcagatttgtttaatctctcaatgcttaacttttgctttttttttaaaatgattctcaagaaatgggctgttgacatgaatgcacatgcatgtaaaagcttgcagcataaccacccagagacaaacgtaagtttttagttttcctttctcccaattcgattgactacagaaattctcaagagcctaaatcatttcattttaggtgagaaacatgaccgcagaagatttcttgtttctgcttaaggagtgggagaagctatgcattcatttctctttgagaaatagtccaaattcagaagaatatgccaaccttcacggtttgaataatgttgaggacaatgaagatgtcagcgaggagagtgaaaatgaagatgatggagaagtttttactgttgacaagattgttggtatttccttcggagtccctaaaaagttattgaaacgtggactttatttgaaggtattgttgctctgcttgtacaaatttcacattacatctcatggtttagccttgttatatagttaatcatctctggtgttttgatataataggtaaggtggctgaattatgatgattctcatgatacatgggagcctattgaaggactcaggtgagcaaaacattaagaatgtttgcattaaagttatatatgttaatgcgttgttaaaatctctaaatttgtccttgaacagtaattgccggggtaaaattgaagagttcgttaaacttggatataaatctggcatccttccgttaccagtatgtattttttatacctgattcttttgctttccttaaacttctgaagctagtgcataattttcagatatttaatctaaaagccaataatctaagttattgtatgtgataagttctatgggtcttatgttgttctgcgtcagttaattgttgaggggtgatagatttagtcacagaacagttgatgtttagagcaatatcctgacattgtttatatgttgttgatgtttagggaggtgttgatgttgtctgcggtgggccaccatgccaaggaatcagtggtcacaaccgcttcaggaacttattggaccctctagaagatcagaaaaacaagcagcttttggtgtatatgaacattgtagaatatttgaagcctaagttcgttttgatggaaaacgtcgttgacatgctgaagatggctaagggctatcttgcacggtttgctgttggacgccttctacagatgaattaccaagtgaggaatggaatgatggcagctggagcttatgggcttgctcagtttcgtttgaggttctttctatggggtgcactccctagtgaggtaaaattcttaatgttttctctttgttttatattaatgaatagatgctgttcttaatttgtatctttctgtttcagataattccgcagttcccacttccaacacatgatctagttcatagaggaaatattgtcaaggagtttcaggtaaactggtatattagtacctttcaatttgttttagcaaattctcatatttatttgtaactaatgcagggaaacatagtagcctatgatgaaggacatactgtgaagttagcagacaagcttttgttgaaggatgtgatttctgatcttcctgcagtaagtattgatgtttttagcaaattttgactaaaattaggtacagtttgtcttgaatattttcttacttcctatgtttttgtattaggttgccaacagtgaaaaaagagacgagattacatatgacaaagatcccacaacgccatttcaaaagttcatcagattgagaaaggatggtaagattcttattatttttttgggcaaacagtgtaaaaacatatatttgacaactattatggcaactgatgttcattaacaaattgtttctgaattttttcaacagaagcgtcaggttcacaatcaaagtccaagtccaaaaagcatgtcttatatgatcatcaccctcttaatcttaatataaatgactatgaacgggtttgtcaggtccccaagagaaaggtacaactttctttatactcgattgacgatcatatatttttttggctctggtctgttttagtgtctaggaatattctgattatttcaaaacatcttttggtatcagggagcgaattttagggactttcctggtgttattgttggacctggtaatgtagtcaagttggaagagggaaaggaaagggtcaaacttgaatctggaaaaacattggtaagaatgatcatctcttttttttggtctcatatcaagttacttttctcctgattggctggctatgttattcaaacaggttcccgattatgccttaacatatgtcgatgggaaatcatgcaagtgagttttaattctcttttcttcgtctctgaaaattctgtatttgactattgttttctgttatggaaattgacttaagcccttcgctgtttccagaccttttggtcgtctttggtgggacgaaattgtccccactgttgtcacacgggcagaaccccacaaccaggtgagacctctcatgacaatcaagtatttgttctgaattttggctagttgttattctagtgttctaggtttgcatagatttattagtatgcatgttacactggaaccaacttaaagagtataattgtttgatgttgctggtgattgattgcaggtgatcattcatccagagcaaaatcgggttttatccattcgagaaaatgcgagactccaaggctttcctgatgactacaaactctttggcccacccaaacagaagtgagtattgttaagaccttgagtttatgtgtgttcttggtggatttattgctgctatagttcttaagactaatcttacataatttctgtttttcaggtacattcaagtaggtaacgctgtagctgtgccagtagcgaaggcccttggatatgctttgggaacagctttccagggactcgcagttgggaaagatccacttcttactctgcctgaaggttttgcattcatgaagccaactcttccttccgagcttgcatgaacactgttgattcatcgcatttttcgatttatcttctattcattgttttcctaggatttatctttagaccatttgctgcggaatttggatttgttttgtttaagtttcacgactttcaagtttagcaactctgaatttctggtaactttgttttaatcagatgttatggatttgtgggattctcgttctttttgtctaagaagagaactcatcttcggttcggttttattactgtttcttgattaaaggcaatgttggattcgttcggctacaaaaactttgtgccttttaagatatggtccatttaataataggccgaactgcaaatgtgatctgttttggtaaacattttgtgcctcttatgaatgaattcaagttaggcctattattaactgtaccctatctttttcaattcagtaactttcaattctacataaaacacactatacattcttaagcgggaaaaaagtttttggcctaacgtacttgaattcattaacttacaattctacataaaacgctatacattcctttttcgatgtggtaaattgttattaagaatgaataaaaccatacaaaaataagcatcaaagtaataagttagcagaattgttaaagacttgaagtaaaacaaatacttttactagaatagagaacaaaccaatgtttatggatcatagaaaagactataatataacactcactagttaatcaaattgcatagaatacaagaatggtccactactcgaacatcgtcgttattgtcgggcatggtctattaataatacaaatgcatcatcgattaagttgattagttatattactttactttccgagaacttcctagttaaatccaacacgctataatattgatagtgtgaagattgtaataaaacggatacctagttcctatcaatatgttaatgtccattaatatattatcttcacctaattatagatcttatggcctaatcactagttttaaatactagtctgaattttaggctaaagaaagtgaaaatatcacgttatatgttgagtttatgtaactaataaaaatagattgaatgactcggacagacgtggacgtcccttttgtatctttctcggatataatcaaattagtggttgtatgcaatagtttcttccaataaattgaccgatctccttttatatggatctgaactaattatctatctttaattcaatgagttgatgatgtttaacaagtttaaatctgaatctatacatatatgacaacaaaaacttcatgataatctattcaacttcccatcatgtcttcatattcacaaaaagtatactcactatttcaaaatataagatgttttaaagccattttattttgtttcatttataagatgttttgctagtttctatacaattttaaatgtatttgataacttgttacaatttatattctcctgttttttccatgattggttaaataaaaataatatttttgaaagaattaataagaaattatccaatatgtgtgtttataccttaaaaaaataaacttaaaatatatggagtaataattatataaaaacaaatagattcattcatcgttctttaaattaatatttacttgttctatttggcattttggtaaccaaaaaaaacaaacgagacacgtacggtatgattgtttagttatcacattttattctggcttatttaaaaactaatgtatttgaatgtttattgtacgttggcaagtccctgttaatccgaacagcgcaaaaatccaaaacaaaaaggaaaggcgtgtggagttttgctcaagtggttgagtcaccaacaatgccttgccttcgttcctactctcaagttgtatgatttttctcctaaaaagatcagtgtaagcattaaattcctttgttctaggtcttttttattgtatataatggcctgaacaaaaataatcaagatttcaaccgagaatttagaaacataattccaaccttgtataaataatttttcgattggtgggatttgagtaaggtttactattttatgcatgtagaaatgttagttgtgaatatatgtttgcattaggttgtctttcgtttgggaaccgtacatcgtcactctatatgatgcgtgtatatatagtaaaatcaattcaaaaatctttttaagacacaaaattgagatgcgaggaggtttgggttaggtgcatactgcaaactaacctcacgtggtggatgttacttttctttccctcacgtaccgatctaattgtaccaaattccttatgtatctatttttctactcaaggtcttactacatgtccggtacaaaaatcagaataaatactgttcagcaaatgatgtttttgcaaatctattatagataaatcaataacataacaccacttaatcggaatttgtaaaaggaattgaaatttaggtgggtgactctgagaaatacctccaactatgtcaatctattcaagtatttcacatgttaaaataataattcgagatatcaatatggtggctcgatccactttaattttagttcttatccttcgtatagcttaaagcacatgtacaaatatatgaggtaggacgacgtcaaagcaataaagcatacggtataacataaagagacaaaaccagtatcacaactccttgacatatcgaaaacgtaacagggattgtggcacaaccgacaaccagtgggtttaaaatcggtaaccaatagtctacatctaatttgttgtgaattcaagtgaaatccgatagattcttaaagagtagaaaataaataattgagacgaatacatttttgtttgtgtgtataattgtttatcgttaaataaaaaagagtacaactaaatcctaagatattttatataaactctaaaatttaatcattgtcgaaatcaaattttattatcgttaaataaaaaagagtacaactacacattttatataaattctaagatattttgtgtgtataattgtttatccttaaataaaaaagagtacaactacacatttttcttactagtacaagtttcgactcaaaactgtttagaattgttccgtttccaaaatgtgtatgcgctaaacctgttgattaagtcaataagtccgggtgatttagaatatatatacaaagtataaactacatggtgtttatttgtttgcacttgggtgaccttaaaggcatcgtgatttgttgtcttctaagttctaactgttttagattctttcatgtttacaaatggtttgcagatttgaatacaccataacataaataataatacttttatatattatgtaagcaagaattaaagagtatatttattgtttcatgagcaagcattatattcgacaatcggcagtggatgcaacatgaacgcatattgtttaccgattttattttattttgttaaattagtattaatgtgttagagtaaacgaagctttccgctaaatatggtattactatatcataattatgcactatctctaaacatttttatttaagtgagctttttacgaacataatgcgagagataaggaggaaaatatatgtatatttttttataatttgtccaataaaggatgcatgtccaaatcacattcatgaatatgtatagatctaagccatgattaaccagaactttattattctttatgtctctgatatatcaattttcttgattactagaaaaaaaaatctaaagcggttcatctttacaaggttgtatatatcgttaattcgtgggaaaatcaattgacaataaattaatggattaataagaatgcacaaacattaaaacctagagatgagtttggtatataatcaaaataatgtatctttttttttttttttttgtatcttttcgtcaatctggttacttaaaccgatgtagatccatcctctaattaagtagccaacaaaattaaaacgaacaaattattcaagtatttatgtagataaattgtttgttaaatcgttaggtttgcgatataatgcgcaaacattgatatacacgtgaatgagatcctaattaggtctgacgaatcatcagcatgaagcctcactcttggtttactttaattaattctcacgggagacatctttaatatactttattttctttaatattgcttccatcgatacgttacttcttttgctcgcaaaataaataaaatagggccccaaaaaaggtaaataaatataagtatcgaagaaaccgagtcatcatcatgacagatcaggctttcacagcaaatgcacagtgagtgatattttattgttacattttttctcgatttacacgatttttagtttcttacacagagcatatcaagtcagtaaagtaattagattacattaaaaatggaaaactagtatttatctatattatttattcgcactcaaattgctttttttctaatcaacaaattttaagggggagtttgaatgatactagaatataatctattttaatttggttgtgtttaaataaatatattagtaattcctaaatttaactactttttaacagtcagagtattgcatgtataaaaaaagtaagtgaaaaaaaaaccgtctactcaaatgataataatttagtcatatgttcaagtcttcaagatacaatacggaaataatataattaaggttgtgagttcgtcggcaaaaatgagttaaacataataatgtcacatgattatttcctgctattgatttaaatatgtattttttatattcatataaataagaagggataaaataattaaggagatcacatgtccattcatttttatgccgatgaacaaccccattttgttattataccaaacatttaatattcgcctctcgaaaccgataagtgagagatgcgtacacacaacacgtatacggtacacacattgcatgtacacgtatacgaaatgactagaaaaccctcgagatgcaaatcttcgttgaagagaataaaaacttaaagacaaaatatttgagattcgagatctgatctgaattggtttcgtagatagattcagagtttttgataccttgatccaaatcaagatccaactatttttgactaaaaacacaagatctggatccgtttgtatatgtagtatacatatttatgtataagactttatttgtaacatctgatttattattatgatatatatatagttaaactatatttaaaaatctaaaatatatctatattttttctaaaggtggtataattgaaaaatctgttccatttttttcgtcaaatcgatttttaaattaggcaattattcgacggtcccgaatccaagcaattgagaagaagaaaaaacgaataaattagaatatagaacgaaagaaacgagtagagtttaatgacaatggacaagttgacataatatcaagaggaatggcaagtaccagtgtgctattacagaaaggctacgagaagtccccacttcctcttcttccccaaacaaataaaccttccttcgttttggaccaccattattttttatttcaacaaattataccttttaaagataatacaacttttattttatttgtatacattatttgtatgaccaccattagttagttgtcatctcgcttgatatataaaattctataatcatttaaggaaaaaatatcaagctataatatcttacgttatagcttgaaattttaagcttttaactacgtcaagttctgaaaattgtcctcccaagtttaacaacaattcaaccgcactggtaatagatttgtccttaaccatctatatgtcccttaaccgataagaagagttcaactaaaaaagtgggtaggctaataaagtaaaagtgaaaggacaaaaaaaagaaaagcaagacacgaagaagtgtgtataaacaaaacccacttgtgtaaccctacctcgaaccatgtagttgtattcatcatctcaccagtcacctctctttctctttttttgatttgctgttttcatttttatattctactatctttttaactgtatcttgctttttttgtttttctcccatacgttttagaataaattttggtccaagtcggttcgataaagcgaaaaattataatagtataacctcgtgtatatattttttcacagatattataaggtcgtgtaattttcaaatcgagatcgacgttaaaaggtatattaagcagttggttgtacaaagaaaatttatattattatgcatattttgtttgcttcctacttttagtataaattgaaactagtataataactttcgatttgtagtattttttacaagaaaaagcgtaccgacgttgaaaacacaagtttcgtagacttatttaataaaaaaatgtggtaccttctttttgtttgggcaaacaaagatgtggttaccttcttttctatcgattctaaaggtttttttttttgttgagcaaacaaggtaattgaggtttcattgacactggttcttacatttttgttaacgtcaccaagcaccagtagtttgccttttacatagacgtgagtattaaaaatttagaactaaaatgtttaatccaatggagtattaaattctcgtttacaatatgttcaaacagaatattaaattttcgttatcacaacgtttcagagacgaaatggtttaggcggtggttaattacatagtccattttaaacgataagaatctgttttagacagaagataaaaaacaatgagaagctgtcactttccatgtgcaatccacatacgtgaaaccacgaccgttcgattatccttcgtaatatacaaactcctcctggaatgctaatccaacggtagatacaaccacatatatatttaccaaatctctatgacaacaacttataacctttttttcttttgtctctcttacaaaatgtaaataataatatacacaaagcaataaaatacaggagcataatcctttcgaaacattataatattacatgacaaaaatgttaggccactgcatttacattttacaagtcccactgaacaaattttctcaccaagtacttctattatgaacttttattatttttgtcggagatatctacttcatatcttcatccccgaatgttaatatatacacaaataaactaattgctttgttagaagttttataaattcgattggtgacagaaagtgatataattattttattagtacgaaaaaagtcgatagaagatgataaaaattcggttagaagtgattaaaataatggtacgaaagtttatgaattcgattggtgacagaaagtgatatatttattttagttgtacgaaatatcgatagaagataatacagttagaagtacttaaattaatggtacgataaaaacaatgacactaatctcttcgtaccagaaatttattaaccgtctcgctagatgatacagaagagaagacagtcacgtacaagtacaacgttagcggtcaaagctataagattatcataagtcaaaagtacaacatgcttaagatctaaacaatatttttataatagaaataaaataactgaataggagtattatactaatcgtgacgagacgacaaattgtagaccatgtatttaaattttgcctccgggttatgcgaaaaaaggaaaaagcattcacatgtctctctcctgacatgcacgaaccaactaataacttcttattatactaatcacgttattatcttattaaaaaataaacccattttgaccacaacctttctctatataaacattttagtctcctcctctctctttataaccacaacgattttctctctctcacgatttaaaaagctaaacaaaaaccattgttttctctatctttcttctccaaaaatggcagaaacaacaacagtaacatcttcattgaagcgtcaaagagatgagcaagaacaagaaatcatcaaaacacaagaagaaacgaaaagacaaaagccttcttcatcttcttcctcgtacaaccaagttctaactctcttaaaagatgaagccgagaatgacataacttccctaatcaccacgcttcagcaagaaatttctaatgaagagcaaaacgctgccgttttcgaagaaaatccttctctctcttcttcttgctcctcttcctcttcttcatgcacttcgaaagaagatgagtacgacggagataaagagaaagtgatgaagcatcttcttgaagcaactgacgacgaactaggaatccctaacactgaatttggcgggagtaattatgagatgattaagagtgagactagtcaggattacgttaatgggtttagtttattagatgggtttagtgttgggctttgggagcttgaggatgaagcagctaattattacacgttgctacaatcagaactgttcatgtagagaagggtaaaataggaaaacaagaaaaagaggatgggtgaaaagtgaaagtaaaagaccaaaatatgatgatgaagaaaaaaagagattgttttctttggaaattattcatttttcattattggagttttgtttttttctttccatgtgaatttgacaaatgtcctcttttattcgtttagttactatatgatttatattggttttgattaatttctagtgggactaatgataatgatactattttgttgtttttgtctttaaacatttcaatcatactaattcaaagaacatctaccaaaataaataaataatattaattcaagtgggtttaaaccggtcccatcatccaggaccattatgttttcatcttataagtcttcatagtaatttctccaaaatatttataaatgtaaatcagatttaaacttctattcgcttgacatatgacaaataaaaacttctagttgcgtaccatgttgtagtatgttcaaactgtccaaaatacgtgtatttaacgaatctacttttcttataaccgggataaatttcaaaccaaacctagagtaataatttcgatttatgcagaagttaaaattttgtcatataagacattacgagtggtagaaaactatgattgaaaatttcggtaaaaaaagttaactctagtataaaattttcacttgatcaccgtattttggtcgttactattttttaaaagataatttacttcaatcttgataaaattataaataagttttacgtagacctaagcataatcttgataattgaaatagaactaaacaacaaattactctaaaccctctttttgtgaaaaaaaataaaaataaaatgtaaaccctctttcaaaaaaaacaaaaacaaattaatcaacaaaatcaagctagaaaatattggttttagtcagtttagtaatctagaagtatggtccatgcattagtctagtggaagacaatatagccatacctaagttaatggaggctgtagacgagtttcgtcataaaatagtcaataagaacaaaaattcatcagatgaagctgagaagttgttgtattttttttttactttttttggtaaaaaagttgttgttgtagtaacttatcctatttatgtatacatttgaattaagatgaatggtaggttattcgataatcgcaatatagtctgatcagatgacttgggtaaattctgttatataaatgcatcctcgtttaaattatgaaattgtcggtacacagtccgcttatgcgatttcccactgacgctatgttccaccagctcccggacatcgatgattcaatagttatctcattgaacatatctattgagttttaatgattaactaatatgtcgtgtttgtcgagtagtggacaacttttgaaataatatctggagtacattattgtttgtagctaatttcatatcatacaaaataaaagcatagttattaagttttgtatatagaacatacaatattggttgcgtgatatatatacttggcattaacaactatataatatctttctaatttcctatctccttttcgttggctatggttgcgttgtaaccaaaaataaaatcaagtcggtataaagaatttaggacaatgccgatcgagacaataataatatgagacagagagattatatattctcgcttgattacatagttgaacttaaaacattattgtcacactaatcacttattgttttcgtttcaccaaagtatatgatcataaaaatcaaaataacaaaatagacaacaaaaaacgatcgcatcatgtccgccattctacctttgtttattttccttcttcaaaaatagaatgtagatacgattggtgacacaagaggtgaagtttgacaggagaatttttggaagtaaaaaaagacgtatgaataggagagacaagtaatagcaacaaaacttgaataacgattgaaatagtataaaggttcgaatagtagtagatcgatataattgaaagtgttttttttagttatatatgaaaaacaatttgtctttagttatctatttggttcaaggcggcgattttgaataaccaagattttaatttagaaatctagatcgaaagaggaaaaattctatttgactttggttttcaaaggatttttttatacaataaaccaaataagtattcaaaatgaatacgacgcccacctttttttctttatagataaccaaaaaccgtgtactacaatttaggctaattttcaaaacttgtgaaaaaacggtcgattaatatgacacatactttacataataacattcaacacttgcaatggttttactttatcttgtttgtttaaatctaagacctttgtctggagaaaatgatatataaagaaatgggtctaatagagtaattataaagtggaatattttcatactgttattaaccaaaactaaaacataattatactaatattttgtttgttaagtttcactacgactaaactagataagagaaatcaatatggactaatatccacaaacaaatattctttagcccaaaaagtctacaaacgaatatggaccgaagacaatactttgcttctgtttcaggctttgtataatgctttatttcacacaggaatacatacgtataaaaattggtgaatctgaagcatatactttcatagtagttgggttttaggacctaaaatctcaaatgctatcccaatgttaatccaaaattttacaaaatgaggctcaaagttttttggtcaacctttcaatgttcgatactctctgtattcttatcttcagtggaatcaagttctttaacaccactgaatccaagttcagccatatcctgctttgccatcaagttcctgcataataatatcactatcatgatctaaacccatccaacattcctcgatacgagtacgacccaagtaaacatgaactagagagaaactatgatggtgacaaaagtttttaaaaaaagacgtacttagccattcgacactggagatatttcttagagagatgtctacattgttcagatttgtgagctgaagacttaagacaacctagatattctttcttctcctgaaaacaaaaaatgaaagctagtagtgaataaacagaaatataaccaaacaaaggtcataagaaaatcgtttgttgaagaataccgcatcacactcgtgcaagtgatccaaagggaaaatgcccttctctggtggtattggtcttaatcctctgtttcctccaaatgctccacctgccccatgaacgcgagtaacgattcagatcgaactttatagtgatcatcattaaaacctgtttttcctctcttctaactaaatcaatataggttgtagtgtatttgattaaatacaaaacaagatacaacattagtgggaaatctataaagtatgaacctttgttgatctagggttttgggttttactaataaaccaaactcaagcacagttatcttgtctccaacaacatagagaatttactggctataaagattaattccaggactaatcagtacatacacaattgcagatgatgatatcaatttgcagtgattagttctaaaagctatctcacaaatctggtatttaaggtgatttcaatccaatttcaatcatcatcacatcttcaattccagagaaatcggaatagaaaaaaaagaaaagaaatcataatgagaagagaagaaaacgcacctgtactcatatcgagccttggaagttggaagagttgggagatttgcctcttgatcggttttagtataggagttctataatagaactcttgcactgtgaggctcgatgctcaaatgtcaaaaagaaaggtcagttatcccagctctttcatttttggttcaggcccataatggcccataccttcgagtttcatgtacttactggatccattctaatatctatggttaatgaggccaaatctctcttaattaaacttagagagttgctaactaatttggaaacgtgaaggaaaaacagttttgtggttgacaattgatccacggttataacaaagagtgatccgatgatctttgcaaaatgataaagacggactgaattaggaataggatcaggtccggagatttttcttttttgattttgtttggattgtgtatgtttcggagttggtcaaacgtctctatcattttgaccatgcattagtctagtggaagacaatatagccatacctacgttaatggaggctgtagacgagtttcgtcataaaatagtcaatcagacattactgacggtaacatctcgcaggtcctacacatttgacatcggaattgtttaatcaaaggcgtccacacacaaaagaaacctaaaatgttctcaacagaaaatcggaaaaacaacattctacacatttgacatgataaattgaagatcgcaaagttgaataaatggcgattcatacactgatccaaaacctagcaaattcatatgaatcacataatgacaaaacacgattctaccaaaacccaatcgattcaccatttcacatttagaaatgataaattgaaaactggctatgttgaaatcaatggcgttcacacacaaaaaccttgatcgacataatttgaaatcttatgaacacagatttaagcaaaaacacggttctaccaaaaatgaatcgatttctaagaattcgaattgagattgttggtaagaaaagaagattgacttacttcgtcccatcgtgttggatccgttcggtgttggttttgcaaaaccctagaatttacaaatgagaagctgtgaagttattttacaggtgcggcaaaaacaaaccctaaatttagcatacgtaattgcttacccaaaaaaggcccatttagatattattattagatgctcggtccaggccttaatatttatagtcaaagtcaaagaagaacaaaagatcaatatgttaacaaactttgtagccaaattttgggtgttcttcccgtgttcttctagagagttaacaattccatccacatcaaaaagaaatatgttatcagtttgttctcttatagacagtaatgagtaatctttgtttcataaagaatgttgttatgtgtcatgtgtgtgttaaaaaaacagagaaccaaataattggtctgcaaaatatcaatggaatctacaagaaccacattcagaaactcagatcatggcctccaaattttgaagtctagggactcatcataatccatattacaaaacacaagatcacatatgcacgacactaaaagaatgggatcagaacaaggcaaaatcacaatagtctcaaatgatttaaaacagatatactcaaacagtttaaaacacagtcttgttgtctattctaccgcttctcgccgcacaaacaagtagcagcttgaagagcgaagtacgtgaggatgatgtccgctccagctctgcgtaaacacatcagtgactccatcatcactttctcttcatcgatcattttcaggactccccctgctttgatcatcgagtactctccagaaacctgaaaattcataaagagtttgaaatcaacaaaaacatcctgggaatgttattcaataagttttagaagtagagtataaggaaagtacttggtatgcagcaatcggtaatggagacttgtccctcaaaagccgtatgatgtccaaatatggaagacctggcttcacctgtaacaaaacactccagttatattaccaaactctataatatgttttgctaaaggatgataaaagacttaccaggagaatgtctgctccttcagcctcgtcttcacgtgcctcaatcaatgcctctctgtagtttgctgggttcatctgatacctgtagttcaaaacgtcagtttgtaactgttagtgttagcagaagaaatgcaaattcagtatcgatgagggttgatgggatttacgttttcttgtctccgaaacgcgggtttgagtccagggcttcacggaaaggaccgtaaaacgaacttgcatacctgttggccgaagattcattcaattagacagaacaaacaagaacatgcttccagaaaataaatgtatgattacttacttggctgtgtatgacatgatggagacgttttgaaatccttcagcatcaagagctgagcggattgcacctactcgcccatccatcatgtcactcggactaactacgtcagcaccagctcgagcctggaaagagagagagaagaagaaatcaacctcattggtaagaaaaagtttcagacattttaactctttgatatcgaaaaaaattacctgggaaacagcttgtttacagagctggtgtactgtttcgtcattcataattacacctacagagataaaattgtatcaaagctccagttaaaacgttatagatggaagttgggtataaatacttaccatcctctctaactatcccatcgtgaccatcagatgagtaaggatccaaagccacatcagtgtagataatctagcaacagaggagaacattagtcacaattgcaaattaaccaatttttcatctcctggtataattaacaaaactgggattacggatcttacaagatcaggatatttgtctttaagaagacgaattgttcgaggcaccaaaccattgtcattgtatgcctcatcccctgttgaattctacaaaatgaaaaccaaaacaaagcgttaaatatacaactcaagaacatatgtacacaaatagaagagaagtgtgaaacaccttcaaagcctcaggaactttagggaacaaaacgatactgtttaccccaacagctcgagcctttgcaacctgtttgcatataaaatcatgttattgtaacacagcggcaacagatacaggaatcatcatatcaaaacataaagccaaacctcttgtacaagaccatgcctccagccaagtctgtagcaaccgggcatagctccaataggcgtgtcttcctcacctgccacactccaaaaccttataatgtttcttaaagacaagagagagagccattgaatgtcagaatacaaaagaaaataacaaccttcatgaatgaaaagtggatatacaaaatttgcaggggagatatcagtttcctgaaaggcagctctagtaacaggggaagcgcggttacgacgtgggcgtcggcttagattctgaaagcattcagtaacaataagccacttataagcttcaaccttacagctaaacattagattctgaaagcatgaagtaacagtaagccatttaaaagtttcaaccttgcagctaaacatcagattatgaaagcataagtaacagtaagccatttaaaagttttaaccttgcagctaaacattagattatgaaagcataagtaacagtatgccacttaaaagtttcaaccttgcagctacttattgttcactatacggagatacagagatagctaatacacaagagtgatgaaatcaattaaagaagtatagattgattcaaattatgttcttagataatagcaaaatcatctatacaatgcaactagagcaaattcacaatgaaagtaagagacttggatactcacaagaggcttaattatcggtgtcccaaccggagcagccggtttaggtggaaccggaggagcttcaggaacatttccagcagcaacggcagcttcacactcagcatcactcattccaagcttcttagcatgtccattgccggattcactagctcttacgacaagattacgacgttgactagttgcaatgcgagaagaagcaacactcactttactcacattcgatctcagaccaatatagcttttgcaatcgattcctctagtcgaaggaaagctgcaagaagcattaaagatgggtgtagtagccatgaatctgcaacacacacacaggaacacattgaggattttataagcaaattgtgatattgaatttcgaaattgaggtttcttagatgtacccgtgactaagaatgcaggtttgaattgaaagttacagactttagatcgtatattgactaaacaaagcaagatttaggtgaaaaatgaagaagaagaagattaaagctgttttgttcaaaatgaaaacacagaaagcaaagagaaacagagtaaagttgtgttattcaaaccttgaattgttaagaagttgttgggattaaggaagactgggaaaaaaattgggtttatgagaaagatgataactttggatgatcgccgattttgacattgacaaagaagatagagactgatgttcacgcgctttatctacgagtttgagaactgggaaattttaagtgttgatggttttggaactgggcttgatagagttttaatgggcctgtattaattagatgaaactgggcattctaaagtattgtccagttacaaaattttaaattctctaaaacggtctacaactttatatcggtactctttttttttttttttttaaatttatcttgcaaataatggaggaagaaaattcaaaagatggaagaagcgagattgtttcagtaggcctacgaacacatatagccataaaggcatttcttactagtcttgattgagaaagacaaaagataaaagacaaaagacgaagacttgagacttaatttctgtccaaggaaacggaatctttctaatctacctcttcgtacaaaaaattgtctgctttacaaaacaaaaatattcaggaaagaacaagttctcttgagcaaatcataaacatgagttcttataatagtttttctctttggattctcttctctttgcaactctgttttattctagattctgcggatcgcacagtttccttatgtcaacccgactgtggaggaatcaagatcccgtacccctttggaatgggaaagggttgttatctggagaagtggtacgaaattacttgtaatacctctacttctggaaagctcgtcccttatctttccgtgatcaacaaggaagttgtgggtatctctcttccgactgaaggcaggggttctagatataacaatccataccagtccgttaacattaaaaacccaatagcctcaaaggagtgctcaagcaatggagaagagcttggatcacttttgaatttgacgggtacccctttttatgttagccagcacaatgaactggtagcggttggttgcaacaacacggcatcgctgacaaatgtgaagccaagcatagtgcaatgcacatcaagctgcagcacaaaaccccatacgcatatcaaagattatcttgcagtactaaattgtcagaattacaatggctacgagaagaattgtaatgaggacagcagtatggatgaaagcattatggatgaaacaagctgcaatggtattggatgctgcaatgcatacatgcgcggcggtagtattcaacagattgttggtgtcacaatagaaaacaccataacgagagggtgcaaagttgccttcttgacaaacaaggcagaatatttgtctaataaatctgatccgcaaaagcttcatgctagaggatacagtacggtcgagctaggatggtttatccatacgacgaatcattcgtttataaagtctctgggatgctatagtgtaaaagagtacaacaatgaaagatacactagtacccagagaagaattaacataacaagttgtatatgcgatgacaatgcttatctaagctatgcaagatgctcatgcactaggggtttccaaggcaacccataccgtttaggcggatgcaaaggttagtaattattgtgtttatagttaaagtttttattcaacttttatatggccatgatcaaagtaagcatatgaaaaaatcgttcatttgtttgattacaatctctttatatttggaaattcagatatcaatgaatgtaaagaagaagagggcatgacttactgtgggaccaacaaatgtgtcaatttgcaaggacactttaaatgtgtgtacaacaatcatcggccacttgctataggtaagtcgtgggaatttttatgccaaaaatccaaatacacgcgcatgtccatttaaagctcttttacaatggtgatgcccaacattagttatttttttaatattcaacaatgatgatcaagtctgtgtttgcagggcttggtgctagttttggctcattgatctttgttgttggaatatacttgttatacaaatttattaaaaagcaaaggaagttaaaccaaaagaagaagttcttcaagcgtaatggtggtctattgttgcaacaacaattgatttcaacagtaggcatggtcgaaaagacaatagtgttcagttcgcgagagttggagaaagctactgaaaacttcagttcaaacagaatacttggccagggtggtcaaggtacagtgtacaagggaatgcttgtcgatggaagaatcgttgcagtaaaaaagtccaaagtcgtggacgaagacaagctagaagagttcatcaatgaggttgtcattctttcacagatcaaccacaggaacatcgtgaaactcttgggatgttgccttgagacaaaagtccctgttctcgtctacgagtttattcctaatggtaaccttttcgaacatcttcatgatgagtttgatgaaaacattatggctacttggaatatacgtctccgcattgctatagatattgcaggagctctctcatacttgcactcgtctgcatcgtctccaatctatcacagagacgtcaagtctacaaacataatgttggatgagaaatatcgagccaaggtgtctgattttggaacgtcaagaacggtgacagtggatcatacccacttgacaacggtagtttcaggtacggtgggatatatggatccagagtactttcagtctagccaattcacagacaaaagtgatgtctatagcttcggggtcgtgctagtggagctaataactggagaaaagtcgatttctttcttgaggtctcaagaaaacaggacattggcaacttatttcattcttgcaatgaaagaaaacaaactcttcgatattatcgatgctcgaataagagatggttgcatgttgagtcaagtgactgcaacggcaaaagttgcaaggaagtgtctcaatctgaaagggagaaaacgaccaagcatgagagaagtgtcgatggagcttgatagtattcgtatgccttgtggagatatgcaactgcaagaatgtgttagcgaaaacgaggaaggggaagaacaaaacaaaggacttgtggaagatatcatgagggcagaatcaaggagcaaagagtttgttaccgctccagcttctcactacaataatattgctgctgcctcatcttcttcgtggtcagatgttgaaccattgtttcctcttcaaacacggtaaaacttcatcttcgaacacgaccgtataatatcttgtctttgcttttatatttgttttcggtgttttgcaagtgtctgtaataaggaatcttgtttgtatccatttccaaacaaaaaagaaaacacgaaaataattttatagtttggttattatgatatgttttacgcattaatacaatagtcacatagttatttcacatacaaacctcttaaatcgtattggttccacgaaactagcagaaggctttattgactattgaagatctgaaggtttatgaatcaaatcaggacaatatgagtcgaagaatctcccctgaaaacttaaacgatttctcagtctcttccaagcaatgactcttttcttctcttgtccaccactgcccattcaaaatccacattagccattagaatattcttctttgttcaatagagtagtgtaaagttcaatacctctgcaactttgttcagtttttgcctcacattttgcaacaactgagaaagttgaccgtcccatttatagaactcgagttctttattatctagtatcttcttagatacctgcataactgatcgtaaactttcagaaaatattccaacttcgattccaaatgaatatagtacctaaagttgttttctttacctttgttccaatcatctggccaccggcgctatgagcaaagtaaatgttgtagaagtgacaaatgaatgcttgaggatcattctctgctaaatcttttaaatactcagaatatgttttaccaggagccattggctctggaatctcataaccttgttccttgaaccactccaaatctttccgcaaactctctgctctttctaatcccgtgttcttgaaaccagcatctacacaacaaaagcagagattttgacaatgttacacaagaaaaaggacctacatttgcaaactgtaatctttctaagactgtttcaagaacttattctatgtgtgtgtgcatatgatcctagaaaattggtctgacatttgaatgcaaatcaagtccaaaacatttattaaggatctaaacacaatcaacacaacacttcaattcataagaagtaaaaaaaaactcacaagttgggaaattggatccatcaatgatcccttcaagcgtgtcgtaaaccaacttactatccacaagaaaatgtaagtatccttccacagtcggctcccatttcgccaccggaccttcctctggagatctagattctttttctccttcccttgcttgatctttcgtatgcaatctcatcgccacgaatctcatctcctccacaaaaccctttgattctcctggatacttcttttgttgcttctccgttatagccgccgcagtcaccacggaagcttgaccaccgtttgcttttacagcaagatagccacgtggagcagttagggttcgggcataactaatcctcccggtcgttctcagaccgagatagctctcgcaagagagtcttgtgctcgctggaaagtggcaagaggggttaagtcttgttgtagccatgaatctgcaacatacacacacacgaattgaggatttcgtcaagttatatcgaaattagggtttgttggagaaacatgaaggaagtgtaagcatcaagcttttggaaaaaaaaataacaattgacgaatttaaacaccaaaatgtaaaacttcaaatcaaagataagaagattaacaaagatttttttagtatgtaaaaaataaaaattacaaccacataccttggaatttttgcagattgaataagaaagatgatggaagatgaagggtttctctggggttggggatttttcttaaaatatttgtttgtaacaattagtcaattaccattaccaacatcataaattggtatttttttttttttctaaatcagtcagataatattttttggaaaaatcgaaaatttagatttgttctgttttcttagttgtgtgattgaccttttgagtcaaccatgacaatgaagtacttgctctgattcgatatttgtttatcataaggaaataaaaaatactaagacaaaaaattgaatgaaatatataatttacatcaaacatttttttctatgaacaacagaaaaacatcatgttccaaataaaaatctgcatccatgtctctatttattctattgaagaagacataggagtcctaagaaactagaatgttgtggcgctcacacactttagctccattttcaccccaccacttctccgcttgttcttcggtaaattgtttccggctgcagcaaacaaaaacaaagtcttagcgagcttcaacgagatgtaacatgatatgtcatgttgtggagataagaagcaaatcatatacctgaagcgaacacgcttgagttcagtaccaccaccaggtaaagacaacaacgttaaatacactcctggttcgtcttgcacaaccttttctggtttatcattctgtttcctatgcccattagcgaagctcttacttgttagattgttctcattttgactatcttgagaaaccatgcttcttatatgtgtttggttactagtctgagttacagtctctgatttctctttgtctgtgtgctttgagttagtgctaatactatccttttgagattgtttttctgccatttccttcaactgcgaaaaccatagtaacataatgagaaatagatataagagacaaacatgtgtagtagagtctggaaattttcaaacctgagtggttagagatcttataacctcctttgcagatctattttcctctgcttcatctgctgccattgcagtcacaacttttaactgccttttggttttttcgagttcctcttcaagttggtgagctttcgaagcaagttgttctacctacaatgttcagtggatagatgcatgtttttagtctagaagcatttttgctttgatgtgatttacagctgacaatagatgatgtatacctgttcctttagaccagccatatcttgattaaaactgtcttttaattgtttagattctgcagctgctacttcataagatcgacgtggactagttgactttactgaaactggggatgttgtgcgagagctcattccggaaccaggaattttaaccatcatattcttggggattttaggcaaagctgttgatcctttggaaaatggcgaaccaacgggctgtaaactgccattcatggaagggaagacattactgttatttacttccggttttaagtctcgtctgtggtgccttctttcactgtaatgcaatgaagagtcagcagacgatagtctggcgttcactgagaggaacttttgagttaagctgtctctttctgaaacatctgtcgatttccgcatgttcaaaagttttctggtccgtgaagttggcgtagaaggagatgattctctcgactttttcagcttggtgaaacatccgtaacacactcgatatggtttgttcatgtcaggtgccagagcagctcgcagagacttcctactactgcatactttacaaaataccagaccacagttgtaacagttgtggcgttttcttctaaagttgaagggattgcggcaaccagcacatagagaatgttcagagccaggtacccatttgtgaacacaaatcacagcagtaaagtttgatccacatgttatagccttcacttgtttttctctcagaaaacccacaaccgcaggttctcttttgttctcaacgtttccatggcctaactggccatttaatccctttccccatgtgtaaatttctgatttagatgtcaaaactgcaacatgataagaaccacatgcaatctcctccacagaagcctctacaatgtctccttcaacacgttcaggaaaatttcccttggcggtaggattaccaagctgtccataagccgtgctacccattgtatacacatgtcctctggatgtacgagaaacagtgagactatgtccgcaggcaacttggcagatattttcattcgtcaatgaaattacacactcgggaagtagttttgtatcattgtcaccatgaccaagctggcctttctcgccatccccccatgtgaagacttgcccgcgtgaagagtcaacttctgcctcagatgcttcatttgtcacttctaccactgcagctgtatgccaaacgccacaagcaacctttgttactattagtccaattaggctttcaacttcacgtggaacacttgtgcttctccggtctccatgacccagagcaccaaaagttccatctccaaacgtaaacaactggcctgatgatgcaactactgctgtatgccagggaccgcaagcgacatctgatacatacagtccctgtaagtcaccagtcactctctttggaatccagcagctggattcattcccatgcccaagcaaatcgacgttatgagtgccatcaccccaactgtaaagatcaccagattgagtaatagcgcatgtatggaaatctccgcaggctaaagatttgaaacccaatcctctgacactactaatgaactttggtttttgggcgtctgtttctaagccatgtcctagctttccaccttttccctcaccccagctgaagatctctccttgtttagtaactaaaaccgcatgacatttaccacatgcaatgttttgggcatcaagtactattgttgattctaatgcttttggtaaaagggcatcctctgtcgtggagttcaatgaatttccagtaccgctaagtacaccatcacttatagattcaccccagacaaaaacatcacctaaggcatcaaagtcttcgtgatatgaaccatggctagaggtgctcacagcgctagatagactgagccgaaatgggtcattggtcgagaatcgtaaatttgaattttctacgtttgctggagtcggagaaaatggacagaagaggttgccactggcttctgtttgattattgttactggggggtgcagttattgcaacaatgtcagaaaacacttttcccaaccgagtttgtgtagaagtctcattagagggttgaataacttgatcctgtcgtaagataatgcaaagtataaggttttcgttcaaattcctaaaaaaatgaaacgtggtgttactcacaagaattgttacaaatggagacactcttcgtgcatgaggggttggacattccgctgaagtgatctcaggtttaatagtggttttccatttggagacttttacccgagtaatcaatgacttcaaaccaacaacccaaacttctgcttcatctttgtctttacatatctgcccaaaacatcatcaacaagggcaagatgaatattcaacaattggtgaatggtatttctcattaaggtggcacgagaactcaccaaatccaacgacctgtcaggacatatgagggagaatgactgatactctttctcggggcgtggatatctcttaaatgtaggctgaaacaaactttagctgttgagtctaagatgagagtaagattaagtcgaaacaaatagaacggaagaaagaagcatgaccatcttacaaagttgcttagttgaaaacttgaaatggtatagaaacatatttcagacactaacttataactaaggaactgtacttgtttatgagcatacatgaatattgcagagagaaactcaccgtgcgttgtccaggaacaattctcaggacttgactcagtttaatctgcttctcttctttgccagagtaccatactaatgcagactcgtcctatgacaaattcacatgtaatataattgagcaaaccaaaagaatacagaaagttctctctctctaaagagaaacataggagtccaagaaaaccttacacttgtgagctggaatggacaaaacttaggcttccctctacgtccatatttcaacaagtaagaccctttcttaagtgacgtaatggcctgaataggaaagacacacttcttaataccatacccactaaaagggaatcacatcaaaagataacatttttaatgacttaggtgtagaaagtgagttatataaacacatcaaactcaatgtgattcttcagagcaattgcgtattctaagcatatatgaacaaaagtttccatcttccaatgtttcaacagaagaaaggtgataaaagagtaaagtacctgttcaacgtctctctcagagaaactagttctcaaggaatcagccattgaagctgctgcaaagagctaattccctttcgaatcatatttctcaaccaaatcgtttaacatcactcgaatgtctttccaatcatattcctaattcttatctaacccattctactactttagcttcctccttcaaaatctaagatttcaaaatcccccaaactctcaactccaaaatgcacattaaccaaacaacaagaaaatacactctgaagaatcctcagaaacaaacaatttatactccaattcttcttcaccaaatcgttgttcaccaatatttttcaaatcctcgtgattatgattaaatcgaagacgaagcaaatcctaatcaatctgaaaaacctcaatgaagaatctctatgattgatcaatagcgaaagaacagaatccagaaaatatcctcgccggacgtagaagcagtaccaacgtcgatcgccggcgatgattcgagaggctattcgtgatttgagaacctacgcttctgcttcgctcccgtttattcaaatttttatttcatcattagctcctttcaaaattcgcatatcattaataattatctaagcccggcccattttgttacaagcccaactcgttaaataattgaatagtctaatcatctaagtgtaaaactggacagagcttggcccactaattttgactttaagtttgcttacacacgcaaaggagagaaaatgtttatttgatttttcacaaaaataagcagtcctaaataagggcttatacataatccacgcaaattataacaaccatagaaacagacaatatattgtcacatagcaaacttataaactgaaagtagctaattaaaccggtttaagaacttattagtacctatagtcatcatcaaagatcatgtgattattgattcctctactactcctacctctttcataactatccttctgcattcacaaaacacaacattcattaccaaatgtacattacatatgaaaatgattatgtaaatgtcaatgtgaattttacttaccttaacgatcattcgctcaaacgcttcggtaccgtgttgttccatgtatttttcagcagcagtgagaatgtcgtcgtcgtcgcgtttagggaagaaattgaatttcttgtgaggaacataccaaattttggtggtagctctttgaggatctctgtagaatggtctaatgaaatgtttgtagatatgttctgctccattgaattgtggtaacactaaccaacagatcccaaacaacttcatgtatggccatataggaaaccttatgataacaaaaacaaaaactaatattatgatgaatacatgttaagaagatattaaaagtgttaatgaattcactaaccactcgagaggtttggagaaagtgagttcaaagagagagataagtgcgtaaagaacccagtaagtaagccattgttcatcttctggtaatgatcttgtctctattgctttcactgatgcatatctgttcatttttttcacaaacataattagttttctcatatttttttgtaataaataattgaatacatacaaaagtgtaatgcctcgtgtcttggattctaagtgggtgtgtgtggatatacgtgcatctatctaagtcaagattcgtactcttttttaattattccttaatgacagaggatcaaatgtttcaaaaggttaagtttttgattctttttccacaaaaatttctaatgttcatatgaatctgaactaaagattggcctaaaaatgtgagttttgcttacaataaaatctctatcaactgatgcaacagatttaacacacaaatgtatatatgagagagattggttttacttacagaggatagacgagtgtaaccaatgggctgcaaaagcaaaaatgttgtaagtttcaactttcaagattccgttcaaaaacaaaaactccaaaaaattagtactaatctaaagagggtttcattttcaagaatctaagtagacaatgtagctaaacccagttagcaataaaactaaagaaactagataggatctaattaacacacacacaaaatatcaagataggatctgtaaagagaaattaaagaagaggcagagagggagagagatttacagagcaaggacatcaaagttctttatgagaacttgaagaacattatcatctcctgaatttgaaggcattgttactctccaatatcttaagctttccccttttttttcctctctctctctctctttcacttaccgtagaagtggaaaaacaaaagtggaggccaggtttcacttacagagacttcttggacttttatgaccactcgcttcttttctttttttttactttcaaattttaggtaaaaagaaaaatggatgaagaggtaccgaaaattttactcattactgtcgataattttatttccttactaaacaaaagtagaatattaattgcgatttatttcctttaattggtcttatatacttctaaaaaaaaactattagtataactctttactatactacattttgtaatttttattctaaattgattatgttgaatacattatgcgtctaatctatcaagtgccagtgtctctagacaatactttgacttttgccttgaaaaacacaaacctatacttgagtactctcttttttttttctcttagcccaatacgtgggccttacaaaacatttaataaataggccttatgagatcccatgtcatatatctagcccatcaataccaatcaatggggatggagaaaatatattcactatccaaactgggctggaacttagaaaagtatcatctaattagttctttttctttcataaatgaaaaggttcaaaacattttgtgattatagataaatatatcttctttatcatgatatcttccagaaatatatagaatgattatagtgaagaagaagaatgattaaacaaaatagataagcaagtgatggaatgatgatcatctaatcttttccagatcaaaaacaaagaacccacatgaatacactcttctataatggtacttaactacttataactacgtagatccatacatctatattttaagcatactttagtgaacattttaattccttttggacctattgagtaatgccagattactactacttgatctacttgttgtgccctttccttttgttgcagatttctttttactataaaataaaacgccgacatagaaacaatgatcggtcatgactcgtatcttattgtttatctagaaagtaatacgtaaacaataatatacaaatatcaaaaaagattcatgacatcatctgtgttttagtgtctatatatacattttacttttgtcatcgtgaaatctagtttagtttagccgccaattgatatgattattgagatcatcaaatagacgttcgtctataaatgcttgatatcaaccgttagtaaaaaaaaatgcatgtatgtcacaatatttgactttctttaattaccatatttgattaattgatagaacatatggatgaggttatataaccgacatgcctatgatgtcaaggaatggttcacaccgatctatagaagtttcaagtattatttccataataaactgatatataatttatattgtttatattaacaggatgtgtgtgcattattttagaattattaacgtcataattcccatgctcgttgatttatacacctttctctatgtatacccatgcatggtaagaacgtatcacatacattatactaaaataaatccaataatgtagaccgacacaaaatgcagcgatatggaccatatggttattacgcatgttacatagacttgtgtatttttctgtataacgaaaaattcctggttattttgtatatcatcaatgtatatgtctcaattaattatagacatatataatctatgtttcatccaacgaaaacacttcagaaataaatgatcaagctgaaatctataaccatcaaaagtttttagttctaacttcaatctataaatttgtttatagacattgtttttaaaacacatttttctctgattttcagcagaaaatgaaatatatattcttggtattttttgggtatccgaaaattcacaaatattgacgtataaatacaggttcctgcttggtgatgagtttcatagatccagagattgtaaatcgtacgtgagtcttcaaacatagcaccagactaattaagttcttagctaccttatacggataatggacctatatattttttttttgataattctccttgtatcttttgattcataatcaaataattttggtaatatcattagcaaaattaaatgccttcaatttttgcaacggctataaattgaacgtatccaaaccaccatgcgcataaacctactggcattaatatggcatcatatctacaatgcatcccctcgtcaacacacttataattaaccaaaacaatcacacttaatgctttgacctatatgattttgttactatatatatctacattatcttagcatagtcaccaatagaccagtcaggagtaagatgttaatcatgcaaagaaattaacatattaaaagagatagctagaacctgaataattgctcacaatgcataagatgtagcttcttcgagacaatgtaaccatgaacgaagtggaagataataatttggcatgcgaaataatttattgataatccgtactgaattaatatacatatataaaaattgttcaaaaaccctaatcaagtattagaaaactctcacactcaatagtaatgaggaaaacatttcacaagacaactacttcaagcaaaaatctctagaataataaaaccaaagccttgcatgcaaaaaccacaaactaaaacatatcgattatcaggttcttaattacttactcaatacattaatcagaaaaataaacaagatgaaatccgtagaatattagaatttagaaataaataaaaatatatgaaaaagaagcaatgcaaaaaaaacacgcttgttaagaacaaacaaacaaacgaaaggacaaaaaaagaaaaataaatctcacagaatatatttgtttgtgtatgtttgcctaggaatgatgactggtgcttccatcttcttgatggttgtgatgatgatctccgtcacggttttgctggttgttgttatggttccccgtctccgccaccggtcggtaagcagcattcaacgccgctaaaactccataatggctatgttctccaccgccacctcctcctcctccataaccagaagccaaaggctgtccagaaaacaaagcaataggagctgcaaaattcatcaaatgaactccactaccgccgccactaccaccactgttggggttgtaaacatctccggcgacaacaccggaatgatgaggattaatattaaaagcccaaagattctgtgtgttgtcaccactactccaaaacggtgccgttgcaggactctgactcgtaggtaaagatccagcagttgattgtactagatagttacccatttggttgtgatctaaaagctgtgaagaagaagaagacgaagaatgtgactcgttcttgggacgaacctgatgctgatgttgaagatgatgagtcatggactgatgtggtgaatgaaagtaatagctactaggagttgtacgaagatgagcagcagagagagaagatcttgagctacgaagtgagatgtttaaagaagtgaagttagccggaatggttccagtccctgtagcggctataaccgctggttctgcttgttggagtagccactcaatagtttcaccgtcggatttgtgaccaagctcacgtgtgagctgaaagacacgtgcagcacacatggcaggcatacggatccgacggcctcggccttcgactttggtgtgtcggtctttagtagaggttcgtttaggaggaggcttcttaggttcggagttaggttcggaagtagtagagatgatggctaaggaagtggaagaggaggaggtagaagaatcaagaagctggagagggaagttgggtcgatggttatgatccggatccggatccatgatgatgatgatgatgatgatcgaagctttggtggtggggaagtgggactatactactgtctctgttagatctttatgtgagccatagtttttttctctctctataaatctctgtttttttgctgatacttagagagagatagagaggttataatatggtccttaggacatgaaactcctttcagatgggaagcttagctgtgtctatgtctgagagagagagagagattaaagcaatgaatatgaaagcatggactttttttttctcttgctgctttatatcttttgtgttttatttttggaattttatttacattataaactattccctttgagaatttttcgttatttttggaaataaaagagatgggcttacgtggttctccaatctgtacaaatattcattcaaataaaatgtttttccttattacgtacagtgatcaaagtgagtgaaaataaatgttgttcgtgtatttattgtgtttggatacatagttttttacaataatacaattaccctatacgaacactctttttcattctttacaataattaaaaagtgacgtcagtttctcgtcgtaactgttaacttcaagcgatcgggaaattaattgcacatttagcgaaaatttcagcgattcagacagaactgagaagtttacatatattttgtacatatgtgacaacagaataataaatagatagaattattattgacagaatgacagtgattaatccatggctctatggtagttcacgagatccacatgatataatagaatccaactgctttttttatgaaacagatggattgttttttctcctctgtgactcttgaatgagttaccagtttgatattattatttataaaaccatagttacagtgctttatagatatataaaagcaaatttgtaatgcttctcttttgtttccaccattggagttatctcattgacatacaattgtcgttaaaagatgtagcactaaatttagaaaattattttgatactctgatgtggacagaacattgatcttttttttctgaaacgaatttttatatgtagtgaatagtgatgaagaaggctccttcttatgtgatgattattcatataagctgttcaaagaatcaaaatatacggtgttacatagattatactactaattaggaccagcgtaatatatatatatatatatatatatatatatatatggtaacgttaaaaatataattgaattagagaatacaaaagaaaaaaataatataaaagtaaattcgaattattatgaagatattttaaataaatattttttaaaaatctcaaatttgtgttttatagaaattgagtgtaacaaaataaatccaagttattacataaaccaacataagcatgcatataataattgccaggtagtatatttgaatatacatatgattttgttaaaagaaatggagaaaaccaattataaaaattcttacacatattaattttgagtttaggcaaattcatctttcttagtatatattgaaaattgtaaaatatatttgttataatcttactattctttttcaaatgtctaagctttatgaagataaaacttctcaaaaatcaaaatatagtattttctattgtggctaattatcgtctcttagtttagacgaatcattaacgttacgtgtaaggtgtaactagttctgatgatctcttaggaacgttgattagtctaactattagaaactttacgcatagccacataaaacctatgggatgtccaaacattttcgcccaaacatatttacaaatgacaaaattttatattttaattacttatatatgtgatatctttttatgttttaactagaatatgttcattgaccataattttccctcgtaaaatataaataactaaaagtatcggcctgcttgtagtaattagtaaaccaatcaaaatatcaagaaaactatatatcaaagactaaacagaaaagaaaacgaattgatagttaaaaggtgttgtgcatatttgacaaatctaaaaagcaaaacaattacgattcacaaatatgatcagaagatattatgaataagaaagtcagccgactaattaatcactcattaattattatcagtcattttctccactggcgtatctatttatgtacatatgactccctatttttcctcttcaaacaagaatcaatcacactttgccccctaaaaaggtttaggaccacaagttttacgtactaacaactatacttcgatcccaacatcctggtaattagttccgaccaaaaaaaaacatcctggtaattagtccatgaacaactctaaacaatttaaaaacggatttaggtctacattatgttattttatattgatcgcactcctataattcaataacattttaaccaaaacaaaacccataaccttcgtttagttgtagacaatttaaatatattacaaattaacatgtggtgatataataaatgttagaaagacaacaatttagtactagtctcgtcttgtgggtcatttctggatgatcaaggttttctgttattatatacatcaatctatgatctatctgtctaaatatacttttaaggttgtaaaatacaaattttatcatatataaaaaaaaatatactcagtagaagaaaatggagagtaaataaataaaagtggacagtgggatgaaacagactccacgtgcgtgtcctctgcatcattcactctctaaagacagtgaccatagcctcatccctcccttatggacccctcatctagtcaagtcaaattatttaatcttttctcaatttctcttctttttttttcatcttttgattgaatctaatttaccaccatcaatcacgaaccctatttcaaacattactgcgcgtaatcaaatatcatcctaattcttagcttttgttcgcattattttacagaaacttaatttagattattctccatagtggatatatgtattcaatcttggaaacaaaaaaaatcaaatcaaaccaaccgaaataatcgattcaacaattgagttatagtctagtttaaatgatttatttgtttactaattcattataaactgaatttaaatttgaaccaaagccaaaaaaaattagtttaagaccaaatttttcttaaatttgactgaatctcgaatccaaactgacactaaaaccatactgaactatacatacatacttactacttactagattaagaaaaaatttaaaccgacaccaaatatccatactttatagtattgaatacacaggttttacattgtattattttccaactcatctcatttatattatataagaaaaatacacttgagtataaaaaaaatgtatacaaaatggagaaaggaaatgggaaacaaataattaaaagaaaaaaggtgggctcccatccacattcaccagcaatgattgcctcactgcctttgcagctccacttctgcttctttcctctcttttttttttcctccaccttgctttagattttcttgatattgcccctgatcttttatatttctgcatcaccctcctaatgtttttgtacgatatatcaaattatcaatgatcttcaacccatactctcttattgcttatatcatttatcccatttttatttttaaacattatgcattatctaaacattgttataaagaaaatagaatatatgcaagtaaaagcctatttttggagtatatttgtaaaataatatgatgatcatatcgtaaataagtgaatggtgtgatttcatatgtttttatgcaaatgacttaaatttaaaatgcatataaacaagatcgaattatttaatccatgacacattgtttttcatgttgccatatatcatttgataaaagtcaatatctatttgtttacgatttcttaaccatatcatttttgtaaataaacctcaaaaagactatttacacataatcagccaaaaatatacacgtcgtgattttagtgtaataagcaaattgtccacaaaataagcacaattggtgattttccactctatcaacaaataaaaaatcatgtttccttaagcttattaaaaacagccagtccatcgatctaaataaagtttattaattgttgacaaataaaagttttatactttttaaaaacattatacagtttagttagatcttgtatcatataacactcatgatcgatataatcccactaagaattatcattgtggattagtgatcaatacgctatacctttcttttctttttgggatccacgttactacgtcagctcaaagttgaaacccccatatattataagtagtgtagtgattatatatatttaactattatatatgtttcgttatgtgtctcgtctcgttggtacagacaacttaacatgcacataattataaatacacgttttacattacgagaaccaactactatttaattttgatttttgatggttaattttggttatgaaaatattaaacgacgacaagtaattcacagacatatgtatatgtagagagagaaataaagagcattgaaagccatgtattgtccatgttggatagataggtaatgaaaggaataacattggcatgtataacccatgtgacaatagtcccctatttacaacttataatcaaacacagtttggtcgagaaatatctaaacaaagttaggtcaaaacgattgaaatcaaagttcaagtccggtgccatagttataaaaggatgatttaccattatggatccatcgtaaatataacaaagaataattctaaacaaaattgaggatcaacgatcaaaaccaagcgttggacaaaaaaaaacttgatcagtctaacttttcgtgttaatcgaccaatcaagtttggacgaggttcttcagagaatatatatgattggttaagactctcctatctagtttatcgatagacttgagcggtcactctccttaccttgatcgtctcatatcgaccattcaagactcacttactctccattttcatacttttgatcttagtttattttggatctaatatggtttggttccaatatgaatataagcaaaagttttgaagaaaaccttaagttttgatttgacttacttatggtgctagaaataattgcatagaaggagactaggagagagagataggaagaaacaacataaaagttgtcctctcatgaactgtcactacggctagcgacataatcacgttgcatccggaaccctagcattcatcattcattgtttgtgtttggaccctatctaatctatttctatacattttttttcttttgatagcatctatatataatctatatttatacataattcatgtctgcacctctacatatatccttcttcgtatctatgtctctactccttttgtttctttctacaactgtctatctacttttacatcttatgtatcaatttcacttccattggaactatattttatttttttcatcactagtaagtactaactagtatatggttatactatttcgataacatgacattaattttatttattagttttaaaatttatgtttctgacatatacgtgtataattaactaatatgcattaattctatacaaaagttttaagcgatatattcatttgcattaattctatacaaaaataagacagctatatacgtgtacaagcacatgtgcatgtacgtaaatgcatacaaaatgcatacgtacatgtaaaaaattccaaaaaacaagacagaagagtgatgcgtgtgtgtgtctatgtatatatatatcttcaattttcttacttgtacctcatctctgatctccatgaccgtgtgatactgatgtctcaccttctctcccatatgttatcttcaagttttagtttttcttttttcatctctcttaaattatttagatagagtaaaaactacttggttggaatattggacgttattaaggttagttttatatatctatatactgactatatatacccatataagatactcgtatgatctcttatcatcttttcttctttaaggtccaaaggaattgtttttatctcttgttttgaatttctttagaaataatacttcctaattattaagtacatgttaaaactgacaacattatattattggcatcgttttataattattccatgtcttttgatttataaattttggatccacgtttagtttgctttaaaactgtgacgttctcacttccagagcaatcgttattattagctagtaacaatgaatacaatttgtagtttagaaaaatacaggtcgatgattatttcttagctagcatataaaacatctatgagattccgaccaagaagtaatcattacgattctataaattagatttgtttccgttatcgatttatgctttaagtacgtaggttatctgatcagcaataacattcaaaggaaagatgacaacaatttagccttcgtaggacaacacaacatgagcactttacatagcctttgtaatttttagccaatttgacgtgggtttcggactcttgatcgacattaatcatcaccatgtaacaacaatattataaattcacgattaataccatcatctttcttttgctctagtacgatactcttcttatgtgctccacatcgttggtaggctaaaggtcagaatagtgacatcaaaacggacagtcacgccagcaagcggatcgggcgagacaaagaagaatattgttgcgaatatgacatacgaaataggtataattaagcaaagggtgtggaataaaacaaaattcttctgagattatattaacttaagcattggaattgttcttgaaatagaagttgtattgattgataaaactaatttattaaattcttcatatttaaaatatttcaaattaaaaaaccacactcacacacatatacttaaatggcccatgtacacaaaatataagtttcgaagaaaaaaaaaaaacgtcaaccattcttagcacaaaaattgttgaatgggtcataaatatacgcacttcatccactatgttctgagtgctccattgaaggcctaaatagcttcatatcttttagacgttgtaaaaaaaagaaaaaaacttcgtatggacataagatttggggaatcgttattatatatcattaggcatatcatattctatgatatatacgtgtatataatttcagttgcgtgatctttattgtaattatagtagatataaacgattaatggttaaagtttaatcaataattagataaacaatgttagataatggaaactaaagtgaggaaaaagacgagggcactaacatgtaaatgctggaagaggaatatcatcgaacaaaaacaacaacaacacagctcaatcctcaaaatacaaatataagtaacatttttttgtgtgtgcatgtttgcatcatatatacgtacatttttgcatattgcgaatatctcacacaaaaagacagaagcatttactcttatatagctgctattttcccttacaaaattattattacgaattacttctgtaaaaccgcggcagtactctagttataatatattgtaatatgtcaaaaatatcacatcatatttctagtagtcctcttggaccattaattactaattagaactatttcattctccactaaaaatttttcttccgtacaagcgaatatgttactaacatagtgctcttggcttatgtgttagaactttactaatatggtgctattggcttaacattctttaaatatatgtattatgctaaaacaaacattatgttggttcgtttaatctagaactatattttttcttaaaaaaatcttggccttgatcacatgtttttaatgcacttttgttccaataataatttatatatagttttgttctaaatgaaagagcattcaattgagctgaatttagagaaactctaggactaggactaaataatttagggaagaaaaaatattctatcaatatttaaggttgtctaacttttcttcttgtgggaattaccagttttgcttggttgtatgagaaaaaatatatatattacttcatatgtaaaggggacaagagctgccaaaggagcgttttcttcattcgtttttgaattataaaagtaaaatgagagaaatttttttattaaaagttttatatttcagatctgcaccccaacaacatctagagaattacgagaaataccacatagtgattttgaggaaccatcaagtttctttcagtcgttttctctctccatctctatttgacccgagggctatacgtaccacttatcataatttagaataatattttctataaattggtggtcacacaaaccacgcaaagcctatcaacgtccgtgtcggcaaatattcacaaaacttcttttatctcgacgtgtacctccataaaaacacattgtatgatcatacgtatttgtaactttataagccgagtaaaattataaataaatacggttgacacttttgtacatatatatatatcgaaaatcttaaatgtacgtgagacaagtttagtggaaactggaaaatagattcatggccgattttggtgggtgaggctgacaacgccatatcactctccgacgtccgtattctcgtttcccaatctctattagggctgacgtcagtctgcttcaaatcatttccattctcttaataggaagaaaagactcggacaagttctgtagaatgcgtgtctaaaagtatatgtatcatttttttcaaggaaaaaaaagagatgtatattgatgtatgtaagaaaagatagaaaattaagactctggtttatgaccattcgagaggaaaatgaccagagtcggggcatgactgagtatgcaagcaaaggatgcgatggcccatagccgaaatggtaaaagaaatccatttttttttaatcttctgaaccaacttcttataaaatcgaaactaaaagttttaaaattaaaattaaaattgaatattacatatgtgtatagtttttggtcatcgcaaaatctttaacaatattaaaatacatgacttcaaaacttttatctaaatagaaagacaaaaaaatcaatttatcaagtttattaatttatcgagtattaattttatagacgtttcattcggatgtttatagtcgatattgttggtctcaatagagtcagaggattgagattctcaaactgctcatgcattcttctgctagagagaagtctcaggacattgctatggcgcatgagtctttatgttttgttgtgtgtacatcagttaatgccataaatcatatgtttaaaagacttgtcaacagcaacggaagcatttgcctcgacattttgaaagagcaatggagtcctgcacttaccatatctaaggggaaatatataagcgagaagtttgaagaatttgtagctacgtattgtggaaaaacttcatgatccagccacacttgttctatattatctcctaaactgcattcactaaaatgtaacagaagatgatgccattgactcctacaacgcaaaatacaggaagcaaatgaaacaggagatggagtcattgattcctacaatggcaggaaatgggaaagtggagaacgttgcctaccaactagcaagactcattcacttattgaacaaatgaaacagtggattgcagtcttgcaattaagataaaggccaaatggcattttacataatggaaataagatcatgttgagaaagttccaactactaaacctaacaggaccaaaagaataactacaaatctttaacaaagcaaacttcttgcagccttaggttacaccaaattggcaggggcttgaatcgtcttctcatttcgcatagactcaagctgaggaaccgaaaagattccagtcattgactttgaatgtagagagtgattgtttaatgatatcacacattggcatttttccagattgtgaagctgggacagctaaaccagatcccacagcatccgcgctttcgctcagaggactgcacaataatacgcaaacaccttagatgaaaagacatgtggtacaacaacaacaacaataaccatattttgatattcaagttctgtatcaaaacgatgcatatctatattcaactgcttgcaatataactgagtgactcaactttgtgggacttactttatcaggataggttcataggcagtcactaagacatctgtatcaactcccttaagacgaatatttgccacatatacctgcagaatcatataaaccagttggtgtctcaagtaacaaacccctttagaataaatagagagacagaacaaggagaagcttcatactctcactaggttttgtgcttctcttccctgtcttcctttggatatagcctgtaatgatccttgttaaggagaaaacaaatagaaaggaaaattatgagcaaagacatcatatgtttatggacattaccatctctccaatagcagttgtcgcaacagcagagatgtttctgaaagacagtccaggcgcctcaatgacctctgattgctcaatcaactgaaaattacacagcaacattactagattgtcttcttcatatatatcatcaatcttggtaaagattaaccaaaaacacaccagtattagttctatttcgactagtttcagagactgaatccacaataaccaaaaaacagcctcactagtatcatcacaggcaaaaaggttccaactttgggaaatctatacacgttaaactctatgtttgtactcaagatactagatgtattctagagaaataacaacactagttcttaaagttggtttgtctaccataagaagagttctagtgtagtagtggtattacctgaaatccttcagcatcttgctcactcgcaagatcattaaggaaccaagaggcactgccaatgtcaccaacctcagccttgaaatccaacaactcaaaaatcaaactctcatctcttgaaggatccacaaacacttcctgtgaaaaccaaacaatcaaacacaaatacagagtaaactagagattcttctacacatgtacttacaaacaatgccactgagaatagaaccaccaaacctgatgatctggaacttgtcggatattactcacatcctgaagattcacaataaggaagaaatgaggaaaccagtgaatttcaattaagcagcgaaaagggttttattgaaagaacctgaaatctttgagggaagacggtggaaatagcgccaccaaacaaaggcctcaccgaacataactcaacagacatgttttgctacattcaaaaaacaaaatcctcaaaaaactaaactttgccagaaaaaaaaaatgcactcacaaacataacagaatcgattagggattaaagagaagagagaagagtaccaaattgatcgattgatgtatctggggaagtaaaagagaagaacaaaagtagcagagaaatcaaaaagttggagtttagtatttatatgaaagtcagaatcgaaagaagcgttgctttgacgtcccaacaagtagctttaacttaacgcaaacaattaaaaaaacaaacgattagcgttcttcaatcaacaatgtctgcactctgcaaattcacgattgagaagaatgagaattaccaagcgacatcgtttaaattaataccgtagttttttttaacaaaagcccaggcccatctgttttatctagcccattttaaacaaatagagataatcaaaaccactgggataataataagatttaattttttttcttccgctatcatcatcaatcatcatcatcatcgtcttcaagacttcaaccttcaaattcttcatcacaaaccctaacctccaatttctgattctacgattgatctaaggttttaatcaattcttctatcatcatgatttattcctcgaattttttccgattttcctttgaactgattttgtggtctctcttactttttggttcagtttcattttcaacaatgagtaatcagaagaagagaaatttccagattgaagcgtttaagcaacgagtcgtcgttgatccaaaatacgccgataaaacttggaagatccttgaacatgcgattcatgagatttacaatcacaacgctagtggtctcagtttcgaagagctttacaggtacacttccatagatttcactttgattcatctcttgttgttgttgttctgctaaactttggtcgcttatttcagaaacgcatacaacatggttctacataagtatggtgataagctttatactggacttgttaccactatgacatttcatctcaaagagatatgtaagtctattgaagaagctcaaggaggagcatttttagaattgcttaataggaaatggaatgatcataacaaagcgttgcaaatgattagggatattctcatgtatatggatcgtacttacgtttctactactaagaaaactcatgttcatgagcttggacttcatctctggagagataatgttgtgtattcgagtaagattcagactaggctattgaatacgcttcttgatttagttcataaggaacggactggtgaagttatagatagggtgttgatgaggaatgtgattaagatgtttatggatttaggtgaatctgtttatcaagatgattttgagaagccgtttttggaagcttctgctgagttttataaggttgagtcaatggagtttattgagtcttgtgattgtggtgagtatttgaagaaagctgagaagcctttagtggaagaagtcgaaagggttgtgaattatttggatgctaagagcgaagcgaagattactagtgtggttgaaagagagatgattgctaaccatgtgcagagactagttcatatggagaattcaggtttggttaatatgcttttgaatgataagtatgaggatatgggtagaatgtatagtttgttccgtagggttgctaatggtcttgtaacggttagagatgttatgactttgcatcttagggaaatgggaaaacagttggttactgatccagagaaatcaaaggatccggttgaatttgtgcagcgtctattggatgagcgggataagtatgacagaattatcaacatggcatttaacaacgataagacgttccagaatgcgctaaattcttcgtttgagtatttcgtcaacttgaacacacgttctcctgagtttatctccctgtttgttgatgataagctacgaaaaggactaaaaggtgtgggagaggaggatgtcgatcttattcttgataaggtgatgatgttgtttcgctacttacaggagaaagacgtttttgagaaatattacaaacagcatctggcgaaaaggcttttatctggaaaaactgtgtcggatgatgcagagaggaatctgatagtgaaactgaagacggaatgtgggtatcaattcacttcgaaacttgaaggtatgttcactgacatgaagacctcacacgacacgctgctaggattttataatagccatcccgagctttcagaaggacctacacttgttgttcaggttctcacaaccggttcttggcccacacagccaaccatacaatgtaacctacctgcagaagtttctgttctgtgtgagaagttcaggtcatattacctcgggactcacaccggtaggagattgtcttggcaaacgaatatgggaacagcagatatcaaagcagtgtttggaaagggtcagaagcatgaactaaacgtttcgactttccaaatgtgtgtccttatgttgttcaacaactctgatcgactaagctacaaagagatcgaacaggcaactgaaatccccaccccagacctaaagcgttgcttgcagtcaatggcgtgtgtaaaaggtaaaaacgtgctaagaaaagaaccaatgagcaaggagatagcagaggaggactggtttgttgtgaacgacaggttcgcaagcaagttctacaaagtgaagataggaactgtggtggcacaaaaggagacagaaccagagaagcaagagacaagacagagagtagaagaagacagaaaacctcagatcgaagcagccatcgtgaggataatgaagtctagacgagtgttggatcacaacaacataatcgcagaggtcaccaaacagttgcagacgcggttcttggcaaacccaacagagataaagaagagaattgaatcactcattgagcgtgatttcttggagagggataatacagaccggaaactttaccgctatctagcgtaaaaaagtctggattgattacacggtccctctgtttatttcgcatcgtttcttctgttagtcagcatttcttatttgttctgtagtctggtaagttataaacattttgtttccgttttgaaaagaaaatattgatttgcctgttattgatcaaacccatatacatcatcaaagatatataaccagagcgagcatttgcttaacggactaatctgtgcatcacacagttgcttaacggatatctccaacgtagctaaaaagcttggtctctctaataataacaatcttctcatacgaaaagctgcagaatttggccgtttatgcgatgtctaattcgattcttcaatcatcggaatcgtaagataactctttacactcaatccaaaatgatacaatctccttccttcttcattgaaattgaattttttttgtattgactaattgaatcacagggcgagatttgtaaagctgttatatgtcctgaaatcgcagcatctaggtataatggaatgttaaagacttatgtgtgcattgatttgggtgattgaagtagcttaaggtagacaagcttaggttgattgaagtttgtgggacatcagaatctgaatttcattgtgtaagtagcaccagtttctctaacatgcaattcaatcttcaaagtactgatttaggactgtgtgatcaaacaggacttgacctccatgatggacctttgctttgacttttttcgcgtatcaaaggaaaagaaagatcttaaggaaacaaaaggaagtaaaagtaaggttctatcatttgtggtatacatattgttacaatggctcgatccggtgaacgattattaaaacaataagtgcttatgtgcataattttgtgtaggtttggttgatgtggtaccccaaaagaagaggagacttgatgatacacatctgatgatgaggtacttcttttgctagttctgaacaaattgatctgtttctagatagctagaacaaattcttccaaaagggtgcatagtgaattcccaaatcatttatatgtgatcaccactggtttaatactaaatttgattgagtttctgcagcctcatgtaacaaaagacaagagaagataaatcaagtacgaggactgtaagtctgctattgctatatcaatcaaagctatctaagccagagaacggtgcttatccattcctttccactctcgcaaatcacattattaaactttaaagaatcaactttttatgtagaaacagttgtataagcaaatcacaggtttttcttctttttgggaatcttggagttgggggtattaatgttttttcttgaatacccccaactccaagattcttctatatatatttaccaaaaaaagagattatatatatatatatatacattgtttttagggttagaagacgtcattgagtaaaatgggttcatgctcggcagcagtttctagaattgtggagaactggagagagcatcctccatcttcttattccctcaagattcataacttctcccaacttgagaactcaactgcctcctctgatcataaataccagcttgatggaatccacaccaccaactgaggcgtttgcggaactccgcttctatgtctacaacaagaaagaaaacaagtactttactattcaaggtgctgcactacaaatctcatgctctttctttaaaattttacgtataaattcacatattattgagtaagcgatgtttatatatttagatgtggaagtaaagcgtttcaatgcacttagaatggtgtggggattgctaaaagttctttcatatgatacatttactaatcctgaaaatggattcatctttgagggtggtgaatgtgagtttggtgttgatgtccttgttgctccaccccttactaattgggaaattctctcttttgatgagaaactctctcctcccaaattctcttggaatcttaagaatttttctgagttgaaagaggatgtttacacatcaaacaaatatcccatgggaggaaaggaatggtgagaagtataaataattttgctaaattttgtttatggactaacaagtatgtatacacatgtatttgaatgttaacaagtccatacttaatgttttgtagggttctaaagctgtatccaaagggaaactctagagcagatggcaaatatttatccctatatgtgcatttagctgatagtgaaacactaaaatcagatgagaagaatttcaagcaaggacatgtgcgagttcttaacccacttggatctaatcacgtcgaagtacaatgtattttctaaaaaaataagtcttcttatatatacggagatattcatttgaaattgtctttctcactaaccatgttttgcattttactttcttgcagcgagctgctggtacaaggaatcaagcaggggttggggttgggatcactttctgtctatagctaatcttcggaagacttacttggacaaagaagatgcgttgaatgttgaaatcgaattcaaagttgtttctgcaaccaagtattctcccattatctaacctctactttttatttttagaatatcagtcatctaccattcttctactatagtactacgacacaatgctatatgtcctggaccagtttgttataatttgagttctctagttttccataaatttgcttttataagaaaatatgttatatattttgtttgagtttttactagaaggacctttgttgcttccataatgatatactctaaacgttttgattatacgtaaataatctcttcttttataatttctccagttaagccactcaagtagcacactgtttaatctttcaaactggacatgaatattaggagaattttatacaatatttggcaacagaatgcattatttgccatctacgaagtaaacttttatataattaataatgtagtaatatttttattcatgatcataatttttttctcgcatgttttacgttttttaatattaaaggttaatatcacaaaatttatgaaaatcttcttagagaaaaaatgggttatttacaactgatgaaatctggtgtaaagttatctataaaagatatgtactttaccaacaaattaaaaatcttctccaagaaatgaaatacttatgccaaataatctgatgcgtttacaagtatttagacgtaaatctctctttattttcctctccccctataaaatgtattttgttttttttgttaagcgataatttttataaaaccctaatagtttatcttgacaccccaagaatcctatttatacattaatcaatcatagttttaacttttaagacttgcattgtgttgggtagaataagatgggtgcatcatgctcagcaccagtttcttctactatcaagaaaaactggagagatcatcctccttcttcttattctctcaagattcacaacttctcccaacttgagaaaactacttccttctctggtcataaataccaatctcgtcttttctcctctggtgatataactggtatggataattgtattttcagggtttagcattaatcattatatcttatatagccaatgcaatatgttgttttaaaaaaaaaacaggagattgatcatatatccgaaagggaacgtaaaggacaatggaagtggatttatttcgatgtacgtggaattagacagctcaagcttgatggaatccaaaccaccaactgaagtgtttgcggaactccgcttctttgtctacaacaagaaacaaaacaagtactttactaaaggtgaagtatacatctcatgcttctctttctataaattcacatttaaaatcagtaatggatgtatcttatatatctttcagatgttgaaataaagcggttcgatgcacttaaaatggtgtggggattgccaaaagtttttccatatgaaacattcattaaccgcaaaatggatacctattcgagggtaatgaatgtgagtttggtgttgatgtcattgttgctccacctcttaccaattgggaaatcctctcttttcatgatgagaaactctcttatcccaaggtcacttggagtgttaagaacttttctcagtggaaagaaaatgagtgttccaaaccaaacagattttcaataggaggaagggaatggtgagtatctatataaaaatcgttaacaaaaatgtatctctatagacatgtgtgtatgaatgttcgtaattttatcttttgtagggttctaaagctgtttccgaagggcaactctagagcaaaaggcaaatatttatccgtgtttctttatttagctgataatgaaacactaaaaccagatgagaagattttcacgcaagtagttgtgcgaattctaaacccgcttggatccaatcacgtggcaagccgatgtaattactaaaagacagttgcattattatcttattactttttataatctttcgatatacaaactgagatattaattactctcattataactgtttcacattttttgttcttgcagtgaactactggcacaagggatcaaactttggttacggttggtgtaaatttctttccttagataaaattcggaagacttacttggacaaagaagacacgttgatgattgaggccgaatttgaagttgtttccgcgaccaaattctctaccattatctaaactcttttttgttttgtttacttattaatttacttctacatgagtagaataggaaccagtagattactaagacacaatgctatgtcttggaccagtttttttttttttttcattcatgttctcagctggttttctattaattctattttataggggaattggcaaaactaaccaacaaaaaatttataattaaggaactaacatcaaaaaaaaaaaaatgatatcctctatattttgtatattaattccaagtttacccctctatctatttctctcatctttctttatgtgtacctctatcttccgttctctctcctttctctctttctctctctccccctctctctttctctctctttctttttccctccccctctctctttctccccagtaaagtccttacacctacattgttacttgtttttgttttcaaatcagagtctcttaattacttttgggtgagatttgatttgggggtttcgaattacagagggaggaacacaatttggattcagggaatcgactttcgttgttgcgcttggtgtcttggtgatgaaattgagttttgttgttgcaatttgagagatactattctatttgtaaatatactatttacgtatactttgttttatatacgttttaaaatgaattatttgttttgattaaggatgttaagtgatttaattattggtttagatttaaacccttgggttccctatatattatcccttagggtttaatatctttccataaaaaaatattgtgtatctatatagaacgttatgttattcattgacaacactattcacatctaaattattttgtgtctgttttaaaaaatttaagtcatgatatatgtagaaaactatacaacttttaattgatatatcatgaacttgaattaattttttaaagattagataatatgaattataattgggaaggggtaaagaaaaaagaaagagaaaaaggaacttctctcctaccacctgatttcttttctcacctcaacactaataataaagccacgtcacctcacactaaacattttccttcctcgctgacaaacgtaacatcaggacagtgatgtcttttcacaccccttgaaggttatttattacatttacaaatttatggtgttagttagttaattatttagtaaaaaaatgctatatctgcaaatcaccctattttataagagacaaaaaaaaaaactgattttccataatctcccaatctattttccaatgtttattgacaatggttttatttcctatatcgaaaatgagtttcttgaaaaggttttatctaaaaatttctcataatatctagttatctatcattcttaaccatttatctctcatggttaagaatctcttctattttatagaaacataaaatataagagattgccttcattcaattagtattatcggtagtaaaacttcggatactgattttttttttgattaattcattaattatgagagctagtaaagatgaattttatacattcgtcacatatgtttaaacttatacggcgtcgtttcaaagacgacatgaaactaaaacgaggaacaaaacaaccaatcacgccatcgctaacagtaataataatcaaacacggtaagtacgagattcttcttagcgaatcaaccgttaaaaatcacatcaaaagtatatacgatcgagattccgccacgtagataactcactgtagatctaaccacactggataattagatatttttttcttttttcttttcaatgagtacagttcagccacgtctgtctctcagaccaaaacgcaagtatcgtcctttgttttgtttctttcttcatcgttgatttgtcaactcaacaacgcccaaaccctaaaacaatccccaatcatcgtttcaataatcaaatttccccaattgaagaataaagatcaaaactttggaagttttcctgtgaaaataatctatcctttttgcatcatttgcgttttggttgatgaagaggatctgaagaagctgagatttaggaatgatgatgggttttgctgtatcggatgaattgttgggtactgttgctccgattgtggtgtactggttgtattctgggatttatgtagcgctctcctctttagagagttatagattgcattcaaaggttgaagaagaagagaagaatcttgtatcgaaatcttctgttgtgaaaggtgttcttgttcaacaggttgttcaagctgttgtcgctatccttttgttcacggtaccgtttttctcttttcccatttttgagttgttttgcttttgtgaaattgaagtgaaaagttaggtaaaacatattggggaattttgatatctgacgctgactttttatgtgtggaattggatggttaagatttttgtttttaaaaaggttaactttttgggttgatgttgtctttcgacccataaagagaaatgggttatgtattaatgatcttaaagttggatcatatattgactgttctaacaatagttaagagctttagaggaaagtatcaatagggattgttctgtgatttggcaatagggtttagacttggcagaccttattaggctgctctagaattcaaccaaggactctatcttaggctccgttggtcctctgttccttacttgtgttagattcagagaggactggttcttatcagcttatctgatgagaaaaccaacaaacatagtaaaccttgctaattgtgatctttaagcttaagcaagttcttttgttgaactggaatgttgttttgttgaactggaatgactacatcatcggttcttttgttgaactggaatgaagcggcatcatcggttcttggtttgaattcgtctgatcctgagtacttgtaatgtatggatttgcttagacatgccgctgatagaattgactcatcaatatcatggaatatcttcttttctgtttgtactagtttttgcttttaaccttcttctaatatgcttcttcattgtctatacaggtgacgggaagtgatgccgaagcagacaaagcgcaacagttttccttcttggtcctagcaagacagtttgtgactgccatgatagtcctcgacacatggcaatacttcatgcatcgatatatgcatcagaacaagttcttatacaaacatatccactctcaacaccaccgtcttatcgtcccttatgcatatggagctttatacaaccatccagtggaaggtcttctcttggatacaattggaggcgccttatctttcctagtctctggtatgtctccaagaacttccatcttcttcttctctttcgccacgatcaaaaccgtggacgaccattgcggtctctggctacctggaaacttattccatatggtcttcaagaacaactcggcttaccacgatatccatcatcagctctatggaaccaaatacaatttctctcagcctttctttgtcatgtgggatcggattcttggaacttacatgccttactcgcttgagaaaagagaagatggaggattcgaagctcgcccgactaaagaattcaaagacgattaagattttggagtttggatatatgttatgtatctgccctgaggttggagaaatggatgatactttgtgttattggaggtgtagttttaaaatcagaaacagaactggtttttttgcgttttgcgtttcttctcaagagcgaatttagcttggagtttgagatttgtatataaacattattgagttgttgttctactttcggtttttgttttgcatgtaatattactacaacaaacatgttttttttataatctatccatctacgaggccattcttgaaagattttgtgttgattttgttttataatttcttcacattcacattttagtattggatattcttagaagtattgtagtgcaagatgaaatattacagatttaataatcctccagatgtttgattaccacatggagcaattctttgctactcgttagtagtgtctagactaaataaaacagtacctgcgaagccttttgcttgtcccacaagaaacacaaccacatcagatctcaaagttgttcaacaactacatgtttacatgatctcttcatcaaactcatcgtttcaaattataatgcgttttcttttatgttcttatttctctaaagcccataaggcccgttatacaaatacaatgcgatttatactataaaacgatgtcgtattaactgtagactcgtttttttcttgtacaactgtcgattcgatactctcttaagtttttgagggtttcttatcgattcgatattttttttcttttcatggatgaagatagagagaaacatgttcgtgcgaaaggatctgatgaagttgattggataagcaaattaccagattgtttgctatgtgaggtactcttgaatcttcccacaaaagatgttgttaagactagtgttttatcccgtagatggagaaatctctggaaacacgtacctggtttagacctagacaatactgatttccaagagttcaacacattcttgagttttgttgatagctttctcgatttcaacagtgaatcattcttacaaaaatttatcttgaagtatgattgtgatgacgagtatgaccctgacatttttcttatcggacgttggatcaacactatcgtcacgcgtaaagttcaacatatcgatgttttggatgattcgtatgggagttgggaggttcagttaccttcaagcatttacacttgtgagagtttggtatctttaaagctttgtggattaactttggctagtcccgagtttgtttctttaccttcactcaaagttatggatctgattataactaagtttgctgacgatatggggttagaaacgctgattacgaaatgcccggttcttgaaagcttgactattgagaggtctttttgtgatgagattgaagttttacgtgtgcggtctcagtctctgttgaggttcactcatgttgcggatagtgatgagggtgtggttgaagatcttgttgtttcaattgatgctcccaagcttgagtatttgaggctaagtgatcatcgagttgcaagttttatacttaataaacccggtaagcttgtcaaagcggatatcgatattgtgtttaacttgagttccgtgaataagtttaatccagatgatctaccaaagagaactatgatacgtaattttctcctcggcatctctactattaaagatatgatcattttttcgagtactcttgaggtacactacaatgttgaatttgctatttgattgaatgtgtaactttattctttcctgatacttttttttttccttacaggttatctatgatttctcaagatgtgaacgactacccttattccgtaacctatctgtcttgtgtgttgagttttacggctacatgtgggaaatgttgccaatctttcttgagagctgcccgaatctaaaaactcttgtcgtggtgagtattgtctattgaaccatgaaattcttattaagatgcaaaatggtgaaagtttatcatatcttgaacttgtgtttctttcactcggtatatgcagaaatctgctagttatcaggagaagggagaaaatattattttgccgggacctaggcgtttcctatcatctctcgagtatgttaagatagaaaggccattgaaaggagaggcgatggagatgaaactagtgagttacttacttgagaattcaaccatcctcaagaaactgaccctatgcttggatgattccgtgaagaaagaagattctgtcatcctaaaagaactccttgccattccaagactctctacatcatccaaagttgtcgttctctgatgatcctcgtagtcatcaccaataaacgtacaaggttgttgtctctaagtacttagttaatacgaattctctgttttcttttagtttgtgatgatattgaagtgcttaagttcgtaaacgaatcatgtttttggcacaaatcaatcagtatcactccatcgtggcaaagatatgctttgggagatgttaagaaagaacgctactaaatttggtgggggttaaaataaacgaggccaaagaaatttgcacaaccatctattatagataatcactcatgtaacaaatattgcagaagttaaagttttaggctcaaaagagaaaaaaagagtataaatcatttgtaaccaataggaagtttcgggggtaagaattgaaaacgtgaaatgtgaactcaacatgaacaagaaacgaaaaccgaaacgaattgtagacagagccaaagatccaaaaccaatacaaaaaagcttaaattttttgatgagtacacaatgtttttctctgcaaccagtactatcgctagaacagagccataaaacataaaaactaatagggtctagatcacttgggagcaaccttttcctttgccttctgaagcttcaaaaccttcttcacaatcttttgctcctccacaaggaaggcacgaatgattctgtaacacacaagaacaaccattaagatttgtctttggttacaaaggcacaaagcaaatacaaaattgaactcaagaacgaacctttccctaacagcagaaccagacaaaaccccaccataagcacggttcacggtcctcctgtttcttgataaacgtgacctcttgtactcagttggcctcaagtgaggaatctaaacaaccaaagagatataaattagatgctgaaggaaaatggctgaaacaactccatcaactttaagattactgtaaaccaaactatgaacaatttacaagatgtttgaagatttatgccaccaagtataaaagtgattccttacatacaaaaggagaaaacttgaaaagacaaggcggcactaaatttagcttatgataaagttatgtactggtgtggattaatcttaaccagcacaagaccgtcaataagcacaagaagaaatcaatacaatacagaatctaaaactaatacaatttaccatcaagatggcaaaacaaacaaatctaaacctagtgaaaagtttccaagatgatttacctatttctgccaccaagattaaagcttactccacagagaaaacttgaaaaagacaaagcggcactacatttagcttatgataaagttatctactgatgttgaattcatctaaccagcacaagaccgtcaataagcacaaacaaaccaaacctaaactactacatttgcatcaatcaatagaataacctcaaaacaatcaaatgggtcaatccaaaatcaaacaaagtatgtaactttagactcaaatcggagagaatatgaatctgaagaatactaacaccctgaatacgcttgccggtaacgggacatttaggtccactagctctcttcttagtggtctggtacgtcaatttacctcctgcaaatcatcaatacgtcaatacatttcaaatcttatagatccatggatacagatttgtgaatttcagcatatgcgattgaagaaacagaacagacctggagttttgacgatcctgtgctggttggatttggtggcgtaactgtgtcgtgatcggtaaacaaggcgctgcaccattttcgcttctctctgtctcactcaccctagggtttttatcctcctcagcttgacggagcagagaagagactttataagctatattatctttatatagggtcttttttcacttcaacacctaaagccctagatcggacggttcagattacatattgacttatgatcatcaatggacgacattttatgggcttgttaatgcttacataataatccaaatatgacttggcccaaaggcccatctttcgaacgtttgtcttttctttaattattcattaatcagtaatcactagttcaacaacgttcaagaagatttgtgttcatgtaccaaatgttaatcaactttacttctagttctcaaaatgttcttcgaggtgattccagatgttgtggtgattagaggagaaagaaaaacgctaagctaccacatatcattcattagatatactattgttctcaggaagatatgaacaacaacaaaaagacatcttcctggatctgatgaagccatattgttccaacatctatgatctaatctatacgcagagatggctcaacaaggtaacaacgagaaatatggttccatatgaatcttccgaccgttgaagctgatcttttcaagtttctcctgacaccaatgtaacttctcagtagtaagtttcgacatgtacatcactcttgaaaccagtctcagttcaattttagctattagtaattcatccttcacaccaatactactctttgattcattcttctttaacttcttcactatacagctttggcttctttgtatttcctttagcttcttctctttctacattaggccaagaacaggttcttgagtgaattgttaaacattgatgtaatctgacaaaatgagagcaagaatttgaagtttttaaataccttttggagatgagttctgatatctgtcaagagctcaaggtctaaagaatcctgtggagagacttgagtttggtgagaaactttcatcattgaagtaaactcgtctttgtctgcacaaagaaactcccagaaaacactcatcgactctcggataatctctctcaacatttcagtctttaccgcgaattctccttcatatctacatttcttcttcgaagaacggtcatctgaaaactttgcagattatggtattagcaagaaaggttcagtatatactataaagaataatgaaaacatgttttgttacctctaacaagtggaatctgaaggaaattctggaaatggcgacggttctttaagtaagtctcaactctagaggagttctgaaacggttcattctccacaaaccgttgaagcagaacttggaataactgaaactctccagctactaagttgtattgataagtagtaacctgtgaatcaaattccaagactttgtcgtattgccatcgaagcatctcccacgagagacaaacttggcctacatagacagtctcaaagtctctgcttgcttctttcacaagtctctcactcgggtcacattcaagcgtatgtttcttgaatggccatatattctgatgcagagacgatttaggcggtttatcagtgtttctactaggtttagatgaatcttttagctttagcaaacctgttaaatcaaatccaaaaatgttaactatatactcaactaacacttttgagtagttgagaaaacatttaagaaggaaagagacattcttcaacaatatgtcctcacaatcaaagtaaaagctggaatcagacaaaaatttaagactctgtagatacgtcattgctaatgatgtaatagtctgctaagaacattgattgaaaattgaattgagaatagattgacttactgatggaatgcattgtttgagaatcgatgacatcgagttttcgcattttaaccgcgtagttcttgtaaaccttgtgaatttcagcaattctgtctttgtgttgatctggttttggttcaatcttgagtggtttcagctcttgtaatggagtctctgattcctcaagaatagtgcacaatcctcctgtccttgcagtccttaattctgttttcaacttctcaatcacatcactatgctcaaactcatcatcatctgaatctgaaccatcatcaaactcatcatatacctcttcttgttcatcaaagcccattttcatctcttcttctctgtgtataaactcttcttcttcttcttctccataagcaaagtttgaaatctgtaaacttgggtttagttctataaacccatcatcatcatcaaacaagttgtcttcaccaccaacaagattctcgtgaaccaatgactcttttaaaacaccacaactcatgaactcataaaccaacatctcttctttcacgtgttccttcataaaaccatctgattctgatttctccaaaaccatggaactcgttttttcatcagagaaactcaccatcttcttcttctcctcctcctgaacagtaatagcagaatactcatgaaacttaaagctaaacgctttaggttcttctacaaaaccaacgatacttttgttgtcggaataaaactcgcatctcttgctaatcgaaaccagagagctttccatctgatcatcgtcttgtgttccacaaatttggttttgatcttgatgatctccaaaaacagaggaatcttttgtgttctgtttctcgaacaagaccaagcttgtctctttgtctggattaactctaaataaaaacaaacccattaaccaataagaactcaaaaaaacagagaacaaagaataataaagaagaagcaaaaacgtttacctgaagagattagagaaagaaacccagaaagcatcgagaacaatgaaagtgtttccgtacacaaactgtttcaaaccaccaacaccaaaacctttattggagaaatcgaagttagtagttgtataagtcttcgtcttcgtcgtaacaatacccatcatcgttaatttcaacgcgttaacataatagtacacaaaacgtcttcaagggtacacatgattagtgtttttatgattttttctcccccaagaaaattgtcaaaatctcttactattggagaagacgaattcggacatagaaagtgttacagagtcactagatatgcgttgaaagaaagaaagaaaaactgatcaatttatggaatcaggtgcgagatttgtggatgggaaattatttcactcttacacaactcttctttatatatatgtgacatttcgctttctcattcaattttgtaatttttctcttcttttttttctttctgatttgaatgtttttttgccttgtgcttaagatgtccaaaaggaagaagagaataaagttttttgttttcttgggaaaaaaatgaatattaatatcaaatacattaggatttgaattaaaattattcgaataactgtaatgaaacttactctttttttttatcggagaacggacatggttcgacgtgggagaactcaagagtcaaactttacattgcttttcgggttcttctccatttgtcactttgcttcaaaacattcattggttcacttgccctttttctcttggagtttcaactgttatttaataaaatcatctcttttggttttttgtcagaaaagaaacaatatcatctttctaaagtcataatctaagattttcttaaattgttttctttggtcacatatgagattttctttcatgaatatcatctttaaacctaatttcttttctaaagttgcagattgtacatttgggtgaacaagccaaaaataggataatatcggataccaagctggtaaaagtatatagattttagaattaaaaaataatgtttgtgaaatgcaaataagagatatgatgatggtaatttgttattaaaataggataatttattaaacgagtaaaattcggatttgagtagttttaaagaatttattatttattatttaaatgggtagttcgaacatctcaaactacaatttatcacatttggaagcagtggaataatgttcttcacaatctcacagtctcgtctcaccataccacttttgagctgatggataaagatatcataactgtaatcagtcctcgaagacaaatgaagcattttagaaatttaatgcaactttggattaggtgatttcactttggtgtcttcataaatatttgtagccttgttttttgacttaaaaagttataggtgttacattttgtaatccctaaacttttcatttttaatgatatttatagttatatcacaaaaaaaaagtagttgtaatagtaaagataattagcgtttcataactatttagaaaagttggaagatatagatcaagtaaaggtatgatcgggtcacggtcgagcccggacatacatgcctatgggggggcgaccaacgaaaaatatcagcagtttcatgttatgtgtagctgctggtgaacacttgtagccttataggtgtattaatgagtttgggtaacatgtagaattgtagatagtcgcgtgagagattttggtcttcgaccgtccaaacatggccaagtcacggtccaaaaacaaaattgattgactattatacgagagcatttggcagatgctcgtgttacgttgaaattgaaaattcctttttaatttcgagtgcgatcgtttattagtccttttcttttaggtgttaagcaaattaattatcattttcgtttcattttcaacgtgcaatagagatgcaaggctacacgtgtctcaataaatttggaccagacattgatgctgacgtatcccatcctcttttaatgtaggtaaaatggaaactagatttaataaatggtgattggtgcatgttttatcttataaattgtaaagaaggtaaaatgattttgtttactttataaaagaaacttatttattttattttacttcaaacaaaaaattgacttatttaaccatttgactcatttaaatgtgtttatatacatcttaatcactaccttatacatctcccaacccaagaagacctctcttgataatcatttatctaacataaatacacactagatagatgataaagatgttccatgtggtgatcaacttatcagtgtccttaccaatccaaagtaaagcatgatgagttttcctgagctgcttcgtctctggcttggctcaaaattgccaccgtgactatacatatcgattttggatgcaagatccccactgaaggattctgatctttgacttggattatggtatgcttcaacggttatacttatacttgaccaagtctccggttggtgaaagacttaacggatccctaagatacttggttcgattagtgtcctttagtgtgttattgggtctagtctcaaaaatcaaaaactacaatgggctttagctataatggaattttttacattgctttcctctttgcatattccaacaaaagaaaacatctaactaataaaaacctttttttttgaaatatcatctaaaaaatgtgatacacgaagacatgttacatactgttggtatggggattatccgttgctacttttttcatcattatgtaacatgtcttcgtgtatcatatttttgatccactgatataagaatttgatatctacatcatcaattaatcggaccactaacatctaaaatcgatattagctaggtattggaatattgtccaatcggaatcttaattagtagcatacaaaaaattcaatcatccaaccataaacacatataccgatctataatgtaaattattttatccgccaaatgcatgttaaacaatttgtgtaccatatattgatcattaatcattgcatgcagttactcgtatctacatagagcttttgcatacattgatctatctggcatggatattcgtaccggccttttgttaaggcttgggcttcgttacttcgtacatacatggtaaaatactttgtctccggcattgaacttacgaccatttatacgtgataaagcattcgctatgattcgttaatacatgatgaatgaaagaaaaaaaacgaatttttaatatcagtggtgcgggaagagccaaatcattgcacatagtagatattttagtaatcgtaacatctgcattgtacttaattaggataaataagcaagattggtgttgccaaagctt

SEQ ID NO: 1236 - DNA, 108582 bp, Arabidopsis thaliana
gaattctattagagtgcatgcaagatatgaacatcctaatatcgaaagacgattttctctatatcaaaaatcaaaatcatatactaaacctatctattgatttcatttctctgttgtttaaactctcttatttttccatacttaattgaaatttatcatgcttcttggaggacaatattttgataaaaagagatatatgtctcaaaaacagaagaaatccacaaagaccaaatcagattagaatcaaagacagagatagagagagaaaagacctgtgatcccatggttatgacaacaaaagggtcgctgcttagagtgtctcgctgagcaagattgatccctctcttcactcggattctcagaagccctacaagttcctccatctcacctcttcctctgttttctctgttcttttcttctgaatttgtgatcgatttctctaggcggctctgactctttaaccttctttttttttaattctaaacaatgaccggctcaaattcaacgaggaccacttaaaaattggcttatcaatggacgatagagcgaataaagaaacaaaaaataaagaccatctatataataggtttcgttttccaggtgtttgtttctatattattctcatctacgcgttactctcacgaacatctttggtaataatatcttcttgattcttctttttttctgactatggacaaaaggtttaagccgttgacttttccaagaacatgtttaccaaaccaatataaaacataaatatcactttttcttttttgtgatgaagagaaaactcgcgggaaaccaaaacggtttcggttagatctaaaaccaaatatatttccattacaaaacagagtagtagtactctgttctattttattaactgagattttttttattacacacagaaaatcataaagctacttcatctctgttttttcagagtccactaccacctggatttttaagccattcaagctggatctcgaccttgccgcattcgacattcttcaacagaagaatcatgtcctgaacgatcttgccattatcggagacgattatgctatcttcagacaagcagttatctctggtgggcacaattctcttgagctcttttccatgtggaagttctttcaaaccgagtttgtgaacgtctaggaacggtttcatatctatctgcgcatctcccatcttgtcgtccgctgtaaatgtatctttatcatacaccatctgcactcatacgaaacaaaaacatatggaaccaaccacttatcatcagttggttttgagttgaaaattcatgattccggtagttactgacgggtactagtactcaccagcttcacaggttcattgggatcttcgatcgcaagagtcaactcttcgttccactctgggttgcagttattcttcacagtaaaagatttcagcttctggtgcaattcaaagatacaaccaatttcagttagaacgaatgcaacacaacatcctatagctatagattgttttcattttgtagcatgaaatgtaaaatctttttaaatgattattaatcatgtttcttaaaggtcgattctttggtcttccatctgcgaagaaagtaaacagagaaaccatacatctcaagaacagaaatagaaacatcaaacagaagagaaccaaatcagattagaatcagaaagagagaaaaagtacctgtggacccatggttatgacgacaaaagggtcgctgcttagagcgtctcgacgagcaagatcgatccctctcttcactaggattctcacaagccctaccagttccttcatctcaacctcttcctctgttttctccatcttgcttctgagctttgaagagaaagcacacctgtctcctgactctactacttttcttattcacttacaaacaatcaccgactcaaattcaacgatgctacttaaatcagcttattaaaagaaagaaacaaaaaagaaaaggaaaggtgaattcaaaaggtctcttttccaactttttgtttcctgctaactcactttaattatcatctacgcgttactcacacacaaataccttctagattctattcataagaaatatctcctgtctttttctgacattgacattagaaatatcatcattacatttcacaaaaaagaaggtactaccctgcaaatataattttgtatacatactgatataggtgagctaattctaatgttaccagaaccagagaaataagattgaaagaggttctagaaattcagggtttgctttatttcttcaattagtagaaacagatacaatatatataagggttgagttattcgacatgtacaactaaagaccaaagcagagccttttttgtcaatttaaactctgatgagacaaagacaaactcgtctttccatgaacataacgaaaaaataccatcacatcttcacggtctctgttttaacatttctgcatcttagtccaatcgttttgtcggcatccatggtgtcttcttggatcctaaaagaaccaatgctcgcatgttaatcgcaatcatagatatgcacaagtcaaaaaccgaggatttgttaacataccttcgcgtcccagacccttgcagcctggaccatcagtccactcaagcatgagctctacttccccacactccacattctttagtctaagaatcatctcttgcatgatcttcccattgctccaagtgatgctgctctcttcagctaaacagttggtcctgcctggacggatcctcttgattgcacaaccattggggagcttctggaaatctaactccatttgatgcgcttctaggaacggcctaaagtctatttctgcatcacccattttgtcatctcccgagaatctatctttatcaaacaccgtctgcataaacagaccataatatgagccaacaatcggtttctttagaagaccgtcgtaaattgtaatagacacgatagcttaccagacggataggatcattcacatctttgatggaaagggtcagttgttcgttccacactggattacagttattattaatcacacgcgtcttcagtttctgaatgaacgagataaaaacgggtcaagaagatatgaaaaagaaatacacaaacaaaaggttacatagtacaaataatgataaagaaggcttcacaaagtacaaccatagagacacaatcatctaagccaagtcaatcatgtccactttcaactttcttaacccagatgacattgtttctatttgacaaactgtgatcctgagatgaccattcaacaagattatgtaattatgatttgccagctttgggaaatgacccttcaacaagagcctatacatgctcattagttttgggagatgactcttcaacaagattatgcatagagactaatcgtaaaaagactaatacccttcaacaaaattttatattgaaaaagaaatatatgttttgcaacacaagactaatacaagaatttgtaatttcagaacatgacaagattttgcataggatgtcttataaagttttgttttttagccaaagaaacacaaagcaaagatcaaattgagatctttctcacatgggtggccacaaaaaccatcacatggtaatgatcagtccctcacattgtacctccaccatgtgactataactctaataagatttcataatccacattccatttgtgatcaccaaagaatcaaacccaaaacgatgcataatctaatcaaaaaggacatgaaccaaacctgattagccaatgtgataacaacataaggatcactggtggtggcatcacgaatagcaagattaatccctcttttgacatgaaccctgagaatccctaatggtttatcttccattgctgcaaattccaccgagaaagaaagaaaaaggaagagactttatataaaagtttgaagctttttccccaataaggcgatgataatagcctaatagtaataagagataatatcgaagaacacaaaaaccctttttgcctgaatttacccaaaataagcggggatttgatgaaatttataattcgaaaacgagtttttggattatgcaaacttacgagaaacatcgacgctgattcaacgcggagttccaaaaacaaacatcgacagatctatccgttgtttgcggacaaccgatttcatcgctgctcctttactttctttagagttctctgtttctcattcatcattcatgtcgccgatatctttagtttcttttttagtccctagactcttataattttaaagttaataccagtaattattgcttagacccaaactgaccaaataaaagatttattctttagagactaatcaaatcgatttactgcatcttaagcaaagcacaaaaagtaattatattatatattgtgaatactatatatggtatacaattttcacgtttaattaatatgaatgtcttgttttatcatttaaagtatttatcaaatttttaggttttgacataattaaaagtagttaaattaatatatatgaatataattagaaaattcagttatttcatagaaacatgttcagtgaaaatatttttagtattcaatcatttgacttctactatttatttgacatataattaaactcatagatgtgttaacatacataaccaaacaaaatttgttaaaaccgtgacatatgggctaaacattccatttgattatcttaaattttgaaattttagttttatcacgctaagttccgtagcaaaaatctaataattgtatataaaattgagtatttgatcaatagaatgagtaataaacaaaaccgataattttttaggtattttgtcacggctgaattagttttaattttttattcggtaaattttctattttctatcatgttttatatatatatatatatatatatacattttttaatagaaaaaatccttttatacttttttgagaacgactgaaaactgaggattctagttgggtgaattgataataactagtggcgaatcttagatgcgactgacatttagagttataagatattgtataatatggagcaattggtacgatatagactgagataagtaaaataacgtgtgtcatgttgaagttcatggacctacctctgaatctagaagagttggcgtataattgaaatcaatggacaatgaggaaatttgggaatctggctagtcgctaattgaacagacacagaatggctggtcaataattaaagaggagccgtttcccattttatttgttcgtttcctaaatccttatcgtacgtttgaaataaaatcataagatttatataaacacaatggttgtgccaaaaaaaacaatatatggtcagctcagctgtcacattaattaggtttttttctatggatgaaattaatttggaataagctattcaaatttttaaatgacctgttattacttatagggtataaatactatatgcccactcctttgtctttgactgagggaatacaaatcctaaccgtatgtgatattttaaaatctaaatgtattagatgtggatagatatacagatattgtaagaaaatatcttacataaaataaaacactaaccaacatgtaaataactaaatatataaaccaaaaaaaacaatttaaattgaaatccaaacaaatctagatgtccgtataaaatcacgtttaaaaattctaaaagttatcatcaggtgtgacacatgtataatcaattgtattatccagaacaatgagttgatgtcaatgactcgatgctatgagcttatgagtagatcatacaatgtggacacgacaacctaaatttaacaaaggatataaaattgtgaactgtttttctgccaaggatttaaaattcatttagcgttgtaatttggtacacacatatacatattaataaaatctacggcatattattaacgaggtaatcaacatttagggtataaatggttgcaaacacgatcaatcatacaattaggttaaccggtttgtgacacaatgggcgactcaggataagacatggaggaggagctgatatgataagacgaagttaggtgatatatatagagatgtaccagagatcataatgcatatgaaatgagatcgatagctgtcttctcttaaactgaattacgacctctctatacttctggtcctatccgtgagtcatgtgctctctgtctttagtcataatatgattttgaattggctctgcaccattcaagatcatggcccattatggttctctgcacctgattctgtttccataataattccatttacctacaaggctatacatataatttattagtataataaccatattatgagaagattaattatactgttcatacggcaattaagatatcgatgcgaaaggattcgtgatctttatagagtttatattccgccgttgctagctaatcatgtttattttgtttctctagtacttaacgcgtttgtcaatttattaaattcgattagctaaaaaaaggatttgactcaatttcatctttagagacttacaaaccaatttatacaaatcaattttttatagatgttacattttttcgttcacattaatgacaggttttcttctttctatgacttaaatccacctaactccaaaattaaatccccaattcatgttaaagaagtgaatttcaacgcttcgaaaagttaataaaagacaatgaagaacatacatgaaacatgcttagcgcctagcggacgagcctcttaattagaaccaagtccttagaaaattacaaaattttaggtatatgccaaaaatcaaactaaagttgtcgataaccatgataaatgttgcgtatatctatctaagaaatatcacgcctaaaagataaattttggtacaactctcctcaacgttcatttttttaatactctgaaataccacaactatattccatatagatgaggtttgaggtttctaagacttttaaaacttaaagtcctagaattaaagaaacgtgtaacctttcaagtttaatatgggggaggtttggatcggcggaagctaaaaacagcaaggatcaggacaacaatggcctaacgaatgacacgtgatgctcttttcatgttgctcaacttcgatagcgaccgtttttctatttttatcactttcatattttacccccaagaaaaacaaaaacaagcgagtccgatatgtttaagagtcccaacctaaaatctattttcatcaccttccctatatagcccgcacaccgcacacaactaatacctcaaaatattaatttgtttgtgtttgcgcttgtttttatgttcttaacatcagggtaaaatgtatcttatgtgattagttttagtgggatactctacatagcattcacatgtctattagtttaaatacgtgtatgtcaatctaatgatacaattcagttcgcatgacttgcaaaacataaacgtaaaaagcaacacatatgaaccacttaccacaattttcgctacaactttttccaccatattagcaaaaaaaacaagggcgaataacattcatttggtataatccataacgatcaaattatcgattatcatcactacatttagctagagattttctagcctttctatttgccaaaccttttaatccattcttccttttaaaaaaaaaattatttatttcttttcaatttttatgaaaaccgtatctttaactaattgttatccttgctaatacatgcatcaacattttcttaaagtttttggtaaaattaacacataagaaataagaaatagttttcttctttaaactcgtccttatcacaaattttagattgtatgatattaaattcgatcttatcttaaatactttaaataacgttttatttactcttctcatattacaaatttactacactgttgcttttctatgttttacaattatatttaggagatcttttgttgtattatcaatactcttagatattcatttatgtagttaaaatttattaagattacttagattttattgagctttgaaatatattttaaaaaaaaacttttaattacacgttggtaaaaaaaaaagacacgtatgcaaaagcaccaaaaaaggtaaaaccggaaaaattctcaaatttcaaaattacccaaaaaagcctttaacctaaccaccttactttataaacaacctcaccgtctctcttagctcaccaacaatcacattcttctcccataagaaaaaaaaaataatcaaatcctcctcctctgcttcaccaccaaaaagcatattcttctctcgtcttctccggttaatcaaaatctctccgtgtgaatcgtttgtgaatggtggaaactaatccgatcggtggtaagtttacgctctccctttccatcaaaagggcgagcttttctcttcctctctcgacatcctctgttttcgctttcggatcttgcaaagaaggctggtactttcgctgccttggcctcgacccgtgaacgattcgcccctaaaattcacaacccggaaccctaatttcctaaaaagtggttctttttttattgattctgttacttgtgagatttgctctgttttttgttctctcgatttcgaagatgttgctctacaacaagcagaagaagaaccaaaacgctaaagggaataggattctcattagcgttacggttttgggtagtgccggtccgatccggtttgttgcttatgaggatgatcttgttgcctctgttatcgatactgctcttaaaggttacgctcgtgaaggtcgtcttcctcttcttggatctgatttcaatgattttcttctctattgtcctatggttggacctgaaggtaaactaaactcaattccaatgtcttttagctttatgtgtgaatgatctgtttaaagaattggttgactgatgttgtgttttgatgacagctttaagcacatgggatgcaattggatctcttggagcgaggaactttatgctctgtaggaaaccagaggagaagaaggttgaggaaagtaatggaagatctgactctaccattaatggtgcaagaaaaggtggaagcttgaaggcttggatcaacaaatccttcaatctcaaagtctcaagccattaagattaattttcttctcttttttatgaaataataagaccaatctttgttttatcatcattatgttctttgtttttggttttgattccaaagtttgttattttcatctttcattcatgaataaaagtgtcaaattcttctggattttgcactgtttcaagtgttgaagttggtttcttttgatgcttcttcttgcaagttgtccaactgaggaaatttgtcagcaaattgtgtactttctctagtacaattctgtattattcgtctcgtaaaacacgttttgaaattattgttacgcaataacagagctctgattaaagtgatagttgtatacttgtatccgtgaagaggaataatgttaaggtatatacttttttaatgttcttgtcttaaggtgtcaagttgtggaggagacgtcattgtcgagaatccaaaattaaaagtgttaaaagtttgattttgattagaaaaaggtaaacaaactttgcgacagaagaagaaaaatagaagaaagtacaaatgaatgatgataaacaactaaaactactacacaagttccgtaccaacttgtactcttgcctctctacaagtgttgttgccgtgctttacttctcttcttccttatcatgaaaacgacacactattttatttactagttactacacgtctcgcacaccacactttccttatccaacgccggaggtttctacacacttccataagtcataaaaacaacacggtgtttgtctcactaactatgaccattgaccaaccatgcacatcatacgatgataacgatgatgagatattttctaaatgccacgtgtatgtcacatttctctttttgttttaagttcgaattggatcgtggcaaggtaatcatggtaaattgttaggccaacgctctcggttacatgtaatcatcctatagtatacgatttaactcgaacagaaacaaaagaagtatctgtttttcttcttcttctgattgaatagtatataacatatactgtacttgtttgttaaaacatgttataaattagtatttagatattcggaaactagaaatactagctatggccaaaagaaataagtttatagttagacttacatttattatgggctttaaggcttcaatccattgacgtcaaaagaaaaaatccattagatgtttgatgggccgaatgactaaaaactaccggcctcaatttgaccaaactatttatttacacaattaataaatgaaattactttgtgtaaaaaaaaaaaaaatgatgtacagaatttaaaagtgctcatgagaaacatacgtttcagttttcactctcaaaggaacacatttttggtcaactcagttcagttagtttgaagacttgaagttaagaaaactaaattcaatcgaaaggaaaaaaaaactttttcacttttagtttcttttactttttcagacagcttcgtgacaaaacaatataattggttacaactgaaaaacaatcaaaaagaagtttgatgaacatattttgaaaaatgagaaagaagggggttcaaatgttagctttaaaaagattcatatgagacgacaaaaaaaaaaaaaagaaagattcatatgattttaatgtgaatgtgatccgcaaataaataatctaatgtttttttaatagtacaatggtatcttacaaaattaaatgctatttattctatagaaaacttatttttgctaaaaacgtaagatatacatttctaaaaaacataaatttatctaaaaccagattggatttaaaaaaaatagtaacaagtatttgaacctaaaaaaaaaaaaaaaaaactcagataaacagaaatcacctttaaaattacttgatgttttttcttcttctgttaattatacaaatgttgtattactaattatacttaagctgaaattaaacgggattgtggttggagacttggagtgtgtgggaaaccaattcgctttcaacatgcaagcatgtaagtatgaatgctctcattattatcacgttacgttcgccgataataaatgtatttaatttgtaatacaagtataattagtggtaacgaacacattacacatgaacggctatgttacttacttggccattaattccgttgaccttaagagatggcatatttatgagtttctttgactatttgtatatcgacaacttctccaccaccataggcaccactttccattttcttttatgccaaaactatatcagcccacttaaatcaatattttattcacttttatttatggatttatgaatcacacaattctccacaattctaaaattaataaattttgaagaatgaacataaaaatttgttaacatatatcatatattacttgtagatccttctttttggaataaaataaaagtgttgttagcgtcaatatacttcaactttgttaaaaatgagtaaatgaccacaaattgtgaaggaaaaaaaagtagacttgatcttgatttgtcgattgttgtctttcttcggtgtgtttatgattacctaaggtgacaatgaatttgaaggatttccaaaactagagctgcggaacaaaactgtgacggtaggtttctcctagctagtagagaacttggtttagaggagacacgatttctacagatttgctccatctgttgttagtaaactgccaatgctggttttagtgtagtaataacaccgacgtaacgttgttctctttatcaaaaaggaaaaaacaaaacaccaactttattcactattccttccaagagtttgtagatatgcatatatctttcaaagtggagatatttggtggaacatgaagacatttggtgactgagttcattgaaggttttaaggtagggaataacgtatgcttaacatgatgcacggtagcacgtcatctgtccgcaaaatgaggttgtgattattccttgattccaaaagttatttgacactatttgtctattcaatacaaatcgctactcctgatttaataagtgtccctttaaattaattgttctatttttttaaaaattgtcgtttctttataactttgaactatttttcaatttttgtgtcatctctaaatagagagactatactaattttctctgtactatttctattttattggatactccaaagatatgattactgttttacgatttaatatataatttttaacaaaaaaaaattaaatttattcctatttcatattaaagaaaattcaaaatatagtcaatttgttattaggagtataatagaaaatttaatttattttgttaataagtttattgaattgcttgaaaatacaaaatatagtcaatttctgattaagagtatataaaaaaaattagtttattttgttaataagtttattaaattgcttgaaattacaaaatatagtcaatttcttattaagagtataataatagaaaaacattatactattaataattttattaaattgcttgaagttacaaaatatagtcaatttctattaggagtatagtagaaaattttaatttattttgttaacaattttgttaaattgctttttaatccacatgaaaatatccaatctgcaagaagtataaaatcatcattttcaaaatatagaaagaaaataatggttttgaacattgaaaaaaatgatcttattgacaaagaaaggagctttcgacttttggaaacataatccaaattttagataattatgctaatgtatctaaaaatcttaaaacaggataattataatacgttagtgtcatcattatcatacatttcaccaaaataacgaaagaatagactagcaacaaagatttgattttctgagaatatttgttccaatccaaagtaaaaccaatcagaaaaatagaaaatttctatattcacggtaaaaaatatatattttaaaaacagaggctgtgatattttttacccatcatttctagaattttggggaaatgcaaaacactaatccataaaaattaaaaaataattaaactaaaaataaaacaaaacaaaaccaaatcccaaaggattggtccaaaatctgtgtttacaaaatatcaatggcaatttcgtagtaaagataaaaaacaaggatattgtttttaatctttctattaccctattattctcttatatatatatactcttccctccggtcaaatctcgtcgtcttgtttggtctctgtttttcacgccggagatagagagagagaagtaaaaaagcgagaaaaagctagaaactttagaatacccaataatggatccgatcgaatctgtcgagtacaatggcttcgagacctctaacggtaacgtcgaccatggttggaagaaagtcgtgtacccgaaacgtcaccggaagcaaaaacaagcggatcaagcgacggcaaatggtggcaaaactgttgcttcaaatggaaccgtagctaacggcggagataacgttttccgttcgttggaagagcaagctgaggatcgtcgacgacggatcttagcggcgaagatgactgctattgattcagatgatgatggtgttgttagatctaaacatcgatctaatggttacggtgatgatgggtatgattttgatggtagtgatgatgagatcgcaacgctgaaggttgaggaagttaagaagccaaagcctaagaaggagaagaagcctaaagtttctttgcctgaagctgcatcaaagatcgatcctttaaatctcgaagcttttctcgttgaagcatcggtatgtgcatggatttgagatttgagatttggttttgatctgtttgtgatttagctgaattgtgatctaaagtttcgttttttcaatgttgggtttataggaatcgtatgcgagtcagcctgagattcagctaatgagatttgctgattactttgggagagcactttctggagtctcatctgtgcaatttccatgggtgaagatgtttaaagagtctcctttgtctaagctgattgaagtgagtttgtgtttttaacattgtttgaggttttggaattggattctaggtttaggttttgataaaggtgagatcgtttttgtttatgaataggttccgttagctcatattccggaaccagtgtataagacatcagttgattggatcaaccatcgtccaattgaggcacttggagcctttgtgttgtgggcttttgattgtattctcacagatttagcagcacaacaaggtggtgctaaaggtgggaagaagggtggtcaacaaactacttccaaatctcaggtgatttggaaaacctttctcgatctctaaactctgatctttgattatcaatgttattacctttcgattactaagtccattattgtacattcgtataggtggcaatatttgttgcattagcgatggtattgcgtaggaagcctgatgctttgactaatgtattgccaactctgagggagaatcctaagtatcagggtcaggataagcttccggttacagtttggatgatggctcaggtttgtgtgatttgttttgtaaatgagtattaattgtgtcaagatttgtgttttctgtgatctttattctaatttttgtaaaactgtaaaatgtggacaggcctcccaaggtgatatagctgtaggcttgtattcatgggctcacaacttgttacctgttgtcggtaataagaactgtaaccctcagtcaagggatctcatcctgcagttggttgagaagtgagtaaaaaacttcttgtggtcttattcttgctgtgtttgtagtcagtcatctaatcttgtttatatgcaattttcttatcagaattttgacgaatccaaaggctcgtaccatacttgtaaatggagctgttaggaagggagagcgtttgattccacctccttcatttgagatcttgttgcggcttacattccctgcatcatctgcaagagtaaaggtaagtcgtattgctggaattttgtaaaacgaaaccttgattcattttgttgattctcacaagcatgatcttcgttgcacacaggctacagagaggtttgaggcaatatatcccttgctgaaagaagtggctcttgctggtgcaccaggaagcaaggcgatgaaacaagtcacacaacagatattcacttttgctctgaaattagctggagaaggtactattaacaatcttgattcccttagttttctgcttccctcagctccgctagattagagttttaatgttatcgttgttacaggaaatcctgttttagccaaggaagctacagcaattgctatctggtctgtgacccaaaactttgattgctgcaagcactgggacaatctctacaaggagaatctggaagctagtgttgctgttcttaaaaagcttgttgaagaatggaaagagcattcggtcaaactatcatcatcaccgaatgatgctctcactctcaaccgaactatgaaaagcttcaggctaaaggtaagagcctccacaatttctaagctttaatttcaccctccagtctcttgtaaatttaatctccgatatttccctgtgatgttttagaacgaggaggtcatcactgagggaggagccaatgcttctctttacaaagaagctgacaagtcttgcaaaacgatctcggggagactctcccgtggaagtggctgcctcaaaggaacagccattactttagtgtttctagctgctgcaggagccgctgctgcagctgttctatcttccaacccggaggttacaaacgagctgaagaacctggtggactcattggagctgcatgaatacatcaacaaatacactgaggttatctccacagctttgaagaagtaagagaaaagaaacaatcaaaaacctgaggatgatatagagaggtaactcttaatatcatcggtgtagagaattacttaaaagttaaagccttttactctccaagatacaaaattttgaacatcttgaccagaacttaggggttatggaggtgaagagaataatgagagttttcgtttttataatcacagagtctgttcaaagttgttgaaggttttttttagactgtttaatttgtttctgagataatttatatttcttcttttttccctgatgacaataaagttatttctgtttattacatgtttgatttggatttctcttgaacataagtgtatgcacaagccattacattgtgttcatgtgaatgcagagtatatacatacagtctcaagatatgaaacagacttgtggatctatctgttaatcgagatcgtaatcttctggcgtcgcatatgggtatttgaggtaaacgttctttatagagtctgggtctgttggtttgtcccaaggattcttcatattaggatctcttgggaacttcctgaagttgagaaatggtgcccataacagtagcctgcaaaatgataatcttgataaagactagagagtaagagagtaagtaagcattgatgcaaatgagatggtgtgatcttgcttacccggggaagaacatgaagacgaacatgaactgtaaatacatctcgaagaacttccttctgtaccatcttactcttagccagttcatgatgattggctaacacaaaccatagtataatatataagctccacactcataatcatgaatcatctaaatctttgaaaatacaatgtatgtgtcctcaaacttactggcattactaggaagtaccaaacggatatgatcccgatatcgagcacaacactgctcaattcctgctggttgttaactcctgttattgctaaggctggatggtcaatctgaaaaactaacgattttcgattactgaccactgttgtctcatagtttcgatagtgaataaaggtctcgtatgttcttaccgtggcaagaactgccccgagttgagctgccaagattgtcttctttgctccaagtatatcacaggcctttgctctcatcttgttaacattctgcagtgaacaataataagtcacggtgaagaagcagagagttttctgcagattcatgttgattggttgtacacttagctaaggtagagaagtcttacatgaagaagagtgtcgttgggtttggtgtgagatgtaatacagaaaggagatttgacactgcgtggcttcaaggagagagatggcaaagcatttggggcatagagcccaagagagccgcaccggctcatctctatgtgtctgttgttcttgtttttggttgtgaagtttccttatctcttgagattggttctaatggcagagacttctaggattacttttgtctgaatcacataaattccacgtgtcataaggaggtcccacgtttgattttggcatatagtgttttatttcaagaaaatgaaataaaaacgaataatctcattccaaattccacatgtattccaaattttatagttgcatcgccgtttctgtaatttggttcatgtctttgaaagtgaggcagttcaaagtaagtaaattgatgtaaattagagtagatataaccaaagagagatcaagaatggtgaaatgtgtcaattgtcattatcttgaagctgaaatcctttgatccaacagagaaatagcattttcgatatttgattattgttattcttcaatagaaagctagctaaataatgactgagcaagtgagcataactaggataatgatttactttgttgtaacttgtagatagaatgaaattggcataaagatttgattctgttcaattagaaagaaactgttgaaacctgatacagataaagttgttttttgttgtgatttcacagtagcctattgtgagatttcacttgcttgcttataagctatttgattgatcctcattcattacataaagagaaacattgatgagtgtgtggtattgttacaatgcagaacctgagaacgaaccagacaaaaactactgtcccttaatgttcttcacagtagagacactgacagagacattccaatgtttcctcttgcatggatcttgaaacggataagacatgagtctcccataacacactacatgctttgtttcactgttaatttttttttgataaagtacttgttacattattttgtaaccttttttagatttgcatgatactattcatctgtacatagatttcttttacgtttgtgtatgaagcacccgtaaagttagtcaaaataacatcttgtaaaatttactcttaatattattctattaattgcaaaattaatcagaactatgtaatggttattttactttttaataaggaataaaaagaggggccattggaccccccacctcctccaacaactctcaattcaccatcatttctctcaccatttttactcattataaaaaataaaaaataaaatctcccataccattaccatttttctaacatgttattattatttagaaaactaataataacatactctaacaatcaaattctttctcaaaaataaaatgttattcctcaatttcaaattaagtgttaccactacttttttcatggaagtgactagcgagttattcttagttttcacatttttagaatcccaagtgagtttcgaaataattttcttcttttccgggattttggagagccattggtgtggaaagttaatcacatgttaaaggcttaacctaaaagcttagactgcaaaccccaccaccattttttttaatttttaaagtctctatattgattcggccgacgaatgttaatcattgaggtcgcttctcctttcttgttttcaatgataaaattaaaatcaaataagtacatagtataataaacatggtaatagaataataatacttcaatttttttgaattaatcgatttccatttactatatatttgcttaggagcgtttctcacgatcacctgtttaattctaaatcaacaaacgatcaagaaatgatgtgaaagttcaactgattgcatgcacctaccaatatttataccttagaaatcttaaaactacgatgaatatgtaaactccaaatcaaacaaaaattcggaaagattctatactataattaagtagtaaattattaggcaaaacagtgaggtgggagtgacctgtcattaaactttgtatgagccacggccaacaccacatggcccttttcattcacagaaattattttgttgctaaaacaaataatcgaaatcacaagtttccaatatctctctatggtatagtgatcgaatatttgatatggttaataccttcaataatattaattaattttctgacatagtataagtttaagtgggatatactggcccctttgaatattaattacttacatgtttaacatacatttggtgatgattatctcttcgcaaacacgcaaattataagttgacaaggccacgaggttcaaaaaacgacatatattgtaatgtgtcttcgaaaaagtcaatatttgtatgtccctatgatgtcaatgtgaaccattcggctaacgaagagaataataatattataacattcatacacaatgttgaaatgtcccgtcaatattttataaaaatggacacggtctaattaattaaaatgaattcggttttgatgtgaaatataaaaatgaagtggcacataatgttagactggtccattaactcttaaaaattttttaatcacaatttctttatttatttgctcatttcgaatatcgattaccttgtctacactacacacgttacatatgtaattgtttatgaatgatgcatagttagttgcatactttcaaaattggataccgccaacttttttatcaaccatgttttttagtagaagtgtttttaaacctcttttatttttaactgtggtctcctttattttggttgtaagctgtaacaaggtcttgtcctctctttatggttctccttacgggcctagttaaacttggtcaaaataatgaaagaagtaaagtggtgttcttaaataaaaggaaactaaaggaaattttgttacccaccttcttattaatcgattttcaattcattgtacgacagcataatgaatatgaatttttggggatttaaatgaaatatccttcacgaattggccaatttactttaaaaacccttagttaaattattaatagaaaaaccttttaaatataaaagttttaattataaaaaaagttagatattagtccatctatttaaaaactcctaactaaattactaatgagaaactctcgaatacaaaattctagtgaaaaaactctttcatataacttcatttaaatatattttgtttttaaacctcactaacattgatttaaaccgttattttacaccgttttaagtttctttccgctgaaaaatactatggtttccggttcaaaatgtgtgggcccttttacgcgcatgtgggtcagatgtatgggcccattctatttttttcctccaaagttaaaggcagagtggcggggtcatttaaaccacgtggcaagttttttttttttatcaactactgtttcttttgctgaaaaagctaaacaacataaataaaattcaacagtatgattgcgtcacgagcaatgcttaatcataaatcactcgcttgacgacaaaaaataaaatcattaatcagtagctttccgctacactaatccactctcctcttataaatttcaaaggattcatagtttttatgttaagtattgataattttttattttttaatatgttaaaactaatacataaaaaatatataactctgttaaatataatttgataaaatatgttattacttactatttatgaaaatacagacataaataataatctatatagactataacctaaaataggaaggtgtgttggcaaaaaacctaaatggaaggttaaaatctcaaaaaaaaaaaactgtaatcagataaaatcgaatccaaaacattgaataaaaatattaataactcggtcaaccagtataaacaataatctttttactagtacttaatttcttattttatataaactaaaacttaatatcaaacaactattgtttccattatatatacctacccgtaacctttaaataatttagtacatacataaatgtgttattatcctaacctttttttttctctgactcttagcttcatttccattttcatatatataatgttgtcaaattcaaattaaaataaaataaaaaagtgtcactaatggtcggtccgatttctccggctaacttacttaagctgacaagtctttctcctccttcctaacttcgtcccccacacaaatctctctatctctctcaagctttctttatcgtcgtctatggcggctaacaaattcgcgactctgattcatcggaaaacaaaccgaatcactttaatcctcgtatacgcttttctcgaatggtcactcattttcttcattttgctcaactctctcttttcttatttcatactcagattcgctgattatttcggtcttaaacgtccttgtctcttctgctctagactcgatcgtttcttcgatgcttctggtaaatctccttctcatcgagatcttctctgcgatgatcatgctctccaattacattcaaaacctgttgaagaatctaattgtggtttcggagaatttcacaatgatttggttcatcgtggttgttgcgtagagaagataagttcgtcactatgtgctccgattgagtctgactttgggaatttagattatccaattggagatgaaggtcagatttacaatggtcttaagtttcctcgatcgatcttcgtctttgaagaagagaaagtaggatctgtaaatttgaatgattctcaggaagaaacagaggagaagaaagttccccaatctcatgagaaacttgaagatgatgatgttgatgaggagttttcatgctatgtatcaagcttcgattgtaagaacaaagaaattgcaacagagaaggaagaagaaaacagagtggatctacctatagaggtggaaactgcagaatcagctccgaaaaacctcgagttctatattgatgaagaagactgtcatttgattccagttgaattctataaaccgagtgaagaagttcgagagatttccgacattaacggagattttatcctcgatttcggcgttgagcatgatttcacggcggcggcggagacggaggaaatctccgactttgcttcgccgggtgaatcgaaaccggaggatgcagagacgaatctaggtacatcttcgtgtagcttttacttgtgcttttttttttttttgccttgtatctaagtttggtgagttgtttatagttgcttcggaaatggaaaacgacgacgaagaaacagacgcagaggtttctataggtacagagattcctgatcatgagcaaatcggagatattccttctcaccagctcattcctcaccacgatgacgatgatcatggtaattttcttataacataagtatgcgttagtccttctctgttcttgattctctagttaacattttcaacgaatgcgttacttcttccaaacagaggaggaaacgttggagttcaaaacagtaacgattgaaaccaagatgccagtcttaaacatcaacgaagagcggattttagaagctcaaggctcgatggaaagctcgcatagtagtctacataacgctatgtttcacttagagcaaagagtatctgttgatggtattgaatgtcctgaaggagtactcactgttgataagttgaagtttgagttacaagaagagagaaaagcacttcacgcgttatacgaggagctggaggtagagaggaatgcgtctgctgttgctgccagtgaaacaatggcgatgatcaataggttgcatgaggagaaagctgcgatgcagatggaagcgttgcagtatcagagaatgatggaggagcaagctgagtttgatcaagaagctttgcagttgttgaatgagcttatggtgaatagagagaaggagaatgctgagcttgagaaggagctagaggtgtatagaaagagaatggaggagtatgaagctaaagagaaaatggggatgttgaggaggagattgagagattcctctgttgattcgtatagaaataatggcgattctgatgagaatagcaatggagagttacagtttaagaacgttgaaggggttacggattggaaatatagagagaatgagatggagaatacgccggtggatgttgtacttcgtcttgatgagtgtttagatgattatgatggagagaggctttcgattcttgggagattgaagtttcttgaagagaaactcacagatcttaataacgaagaggacgacgaggaggaggctaaaacgtttgagagtaatggtagcatcaatggaaatgagcatattcatggcaaagaaacaaacgggaagcacagagttatcaagtcaaagagattacttcccctgtttgatgcggtcgatggagagatggaaaacgggttaagtaacggaaaccatcacgaaaacgggtttgatgattcggagaagggtgagaatgtgacgatagaagaagaagtggatgagctttacgagaggttagaagctctagaggcagatagagagttcttaagacattgtgttggttcattgaaaaaaggagacaaaggtgtacatctcctccatgagattctgcaacatcttcgtgatctaaggaatatcgatcttactcgcgtcagagaaaacggagacatgagtttatgagtttgattttgagttttgggtttgagtccactctttgcatagtgacacaaagaacaagaaaaatcatacaggtatataacttatctctgttgactgaagaatattttgttttgtctttttccatgtctatgatcacactttaaagaagattcaaaatttattgtttgtaataaggtatggaagtgacatgttgcttgtgaggcaaggaacaacgacaaggtttcagatgaagaagaaaacgttctcagaataaaagtattttaagtatatactctgaggaaaagtgtcagatcagaatgttcgtctttcttcgttcattttcattattataagttttgttttttatattgaagatttatttagagagagggaagtgtcagtataatttcacttttatattttatatttgggagttgtctttatgagtggtggtaatagaaaaaggtagaatgatgagtgtatgtgtgtgtagtgtagtgtagttgagtactagtacttagtaaggtgagctattggtataaaaaaaatgccaaaggcaagctgtcaaatttcttggatgtttgtggcagagctggaatgatttcagcaaagatgccaacaccaatgtacatatgcctttttggactttttagaacatttagaaaatttctgggcgactttagaattattgcttttaggtggggtaagtaacctcttcatttgtaattttgttttcttctttcggttgtatatgtaacttgtagctatttacgcatgtactctcgaatttggtcgtattaatttgcttttgcgttttatgacagttgtttgtgttacgaagaaaggatatgaacctaggtctagattctcttggttatatatgaaagaaaaaaaaaaactaaattatcatgttctagttctcgattcgaaaagattatgaacatagacccataatttttttggttccgagattaaaaaaaatgttttggttcatagtaggttgtaattcaagttattctgatattggaatggatttggttgtaagcaacgaatatattggttggtagaaactttatataaatttaaggcgttggcgttaaacaaaaacaagtacgtatttataataagaatttaaacacaacaaacatatctataataagaatttatttatgattgcttatttttgttaatttcataaaaaaatcaatcatagagactatatcctaatcgttcttaaaccaaataacataaaatctttatagttttatatgacaactagatagccagctaacccaaatcatgtgacagttaatagattcacaaaggtttgctcaaatcatcaccaaaaagttagttgcttttgggtttagatcatttagagtcgcattcatttctgaccatatcagaagtatattatgttctgaagtaagagcctttatagtgggtgaagcagaaagtatatattgttgtacttaatttctaaaataatggagatcgaaaatttgtgtctttcggcgatcttcttaaagttcagacgctcatgtgcacttaattatgcgcgcaaccttcctcttatctctatggcttgcctattctatgtacttctactctttacatacctaggattgtatatatgtttcactacattatttggtcagtagtggtataattttatcacgttccttttactttcttagcatagattatcacgtttgacaacttgtatatttctctttgaagcgtcatgtaggagaatgtttacacttcattctctgaaaacgttagtgcttttattgatgtcgatggtcaaattgttttttttggttattagttgctattggaccaaaacttgtaaggtctattttaataaaatatatacattatcaatataagaaagaaaaaaaaaactactcttttttagtaagtaccaagaaaatcgataaaacctaattaggtccatctatgtcaacatggatccctggttgtacatatattatatcaattgaatttgacccatcaagtctagtatacatggcctgattaaatgggcttaacggatggataaactcgacccaaaaagttcaaagaagtctaaacatattgctgttcacgtgaaaaagacaacgacttaagaatatgacatttggtaaatgttacttgaagtcttgaagactactctttaatactttatcatcatcatattcgacaaataagcgtgtgcctgatttggtgtgatattgtatgtaccgtacgactctttcaaagtgtctccaacaagtatcattggatatactacgcggcaattaaacaaaataatgaaaaagctttaatttggttgaaatttttgccaaatgacgtaacctttctttattttacggcatagcaaaactataagtcgcaaatcgtacgtactatttcgattgtataaagattcaatgattctacaatttttctaaatcaaaaagttgttgaaagattcaatgattctaccatttttctaaatcaaaagttgttgtcgaacctccgtccgagtaaagattgagtttaatattattagttttatctaaatttctttttgtgaatttccaatagtcttcaccttaatttggacatctctctgatcatgctgactattaaattttttaacattccagcataaaaattgatcattttcagggattagtataactacaaccgttttttgtcaatcaattatataagatttattaaaccgaatacaaacgaaaacaaaacattgactctgatcgatatcacgcgttatggcggaataacgtttgtaatgcgattatgcagaaattttacttattagaaaaattttcatagtgtttagttgtttaccataacgtaaaaatatagaaattgcattttcgcctaaaaattataaataaatcattatgcaaataagtgaatatctatatagtagtttatatcattatgcagtattttattttgggatttattgcaaattttattgtgagacacatttgtattttattgtatacatttgtattttaaattttattgggatttattgcgaattttattgtgcgattatgcgacttatatcataatagaattatgtgatgttaccactcaaagtcattatcttatcacttatgaatataagttatgttatatatttatgtgaaatacatttgtacgtgaagttgttattagttatggttacgtatacattggtttgacacaggacagaaacatctaaaataaatgcagcgtaatttgcaagtactatttaatggtttcattgacatttgttgcaagtttctttcggtggatactgagtgatcaacaccctagaaagtaaaagacttcaaaagatttggtatttttattttgtttttttcattgacccatttatttatcactgtagagatataaacacgattgcaaaatatttatctaaatatacaataatgttttaatccgagtatataacaaattggcaagtgaatcagtgaattgattaaccgaatagtatgactcgtatctaaactaatacttaaaaagatcgatgttagagtatctccattgcaaatatttcatatggattatacaaaaataataaaaagtagaataataataaaacattttagctttctcaaatagtagtagaaacccacataaaaaaagtttctattttttctctataaaaaattttctttggattttttccgtactgaaaacttcttatattttattatttttaatatatatatttttattaactcatgtgagattttttcattttgcaatgaaaatgttcttattaaaagaaaaaaaaaattggaaaggtgaccaagcttgaccgatcgagctaagtcaaaagaacgcgtcttgcttgggtcatgttttggttgttccaagtggtatcgttttttttctccttttgaacgtcatcctcagtgatgtcatattttagttttaatttttgtttcaaatgatctcatatatatatatttttttgggcacacaaatgatctcatatagattgattttttttgtcacccatattagaaattagaaaacactacactaaatgcatgctccaaccacatagggttaaaagtctatgtcattgactacgaacgatgactccaagaaactaaatgaatatgatgcaaacaaaatctttattcgtcataagattgcgattatgtataaatactataaggtttaccggatatttcatttagtttgtcttaacctgataattgctctactagtggatctgccattgaaacaaaaaggctttccactcaaattctctgaggttgcacttgcacatgcatacaaacaaatattcttctaattgtttgcgcgtaagaaaaagaaaaaaaaaactatatccattattgagaaaagtagctgaaaaataaataaattaatagacaaaaatgttaatcaaaatttgcttttgagtaaaaattaaccagttgaatgaataaaatataacttctacagaaggtataagagtttacatgttctaatcctccattaaacaattataaaatacccacaaaatctaaaacttttaggtgaatattcattaatgaataattgaataccactaattaattatgttaaattcatcacaactttttcatgatacatcacacataaaccaccataatataataatgaaagaaatgtgaatttggttgaaaaaaacaaaagaaaaaagtaaaaaggttgaagcaagagactgacttttatccaaaaatgtgcttgaattttaattaaaaaacacgaattcttcttgactttcgtttcaaatctaaatccttcctcgcataaactcttccctgaatcaaaaacccattctaataaaaacaaagacgatctcaaacacgcttcttcttcttcctcattcctcaatcatccctaagacgtcacctcacttaaacccaatccaacgccgccgaaccaaaatcaacttcttcggttcttccccaattcaatactactttctgggtcgtcgttaaatccctaaatctctctctgttgttaccttcccatgggatggtcactaagaactctcataagagcaatctgggcatgacaaagtccatgaatttctttcagaacatcattaaacctttcaaacgcagctccaatcgaggtaagatccgtttgatttgttgattcttagtgtaagattaggtttttgtgaaatttgactaactttttcttcgttgacttaaaggtcttgaagatgatattgagcgaattgctgctatggagcaaaaagttttcccatttcaagttttagtttccgctaccaaagattttcacccgacccataaactcggtgaaggtggtttcggtcccgtcttcaaggtaaccctaattttgacatacccagagcttaaagtttccatttttagggttgtggttgtataattgtgtgtgtgtgttttcgtgggttttgttagtttggctgatgaggttgattggtgtgtaatagggaagattacctgacgggagagacatagcagtgaagaagctatctcaggtttcaaggcaaggcaaaaacgagtttgtgaacgaggctaagttgttggctaaagttcagcatcgcaatgttgttaatctttggggttattgtacacatggagatgataagctcttggtttatgagtatgtcgttaatgagagcctcgacaaggtcctcttcagtaagtttttcttctcaatgagattggtttgtatattaggataaatgatattgaaagaagatggttttaacatgtagtggttgcttcatttgaatgcagaatccaacagaaaatcggagatagattggaagcagaggtttgagatcataacaggcattgctcgaggactgctctatctacatgaagacgcgccaaactgcatcatccacagggatattaaggctggcaatattttgctggatgaaaaatgggttcctaagattgcagattttgggatggctagactctatcaggaagatgtaacacatgtcaacactcgtgttgcaggaaccaagtatgctctctctattgtttacccttaaaaagctcatttacatatcttcttgtgtcatttgaactctttttgtttgttggtgtttcatggtagaatgttatttaacgtccattgcttcttcttttcttatgcgcagtggttatatggcgccagagtacgtaatgcacggggttctatcggtaaaggcagacgtattcagctttggggttttggttctggagctcgtaagtggacagaagaactcgagttttagcatgagacaccctgaccagactcttcttgaatgggtaaagcctctagtctcatgctccattgtttatagggttgttgtgtgatggcctgacccagccaatattcttcagcgtaatataaccaatgctaaattctttctgaatgtgacacaggcatttaagttgtacaagaaaggccggaccatggagatactagaccaagatatagcagcttcagctgatccagatcaagtcaaactctgtgtacagatcggactactctgcgttcaaggcgatccgcatcaaagaccgagcatgagacgggtatctctacttctctctagaaaaccaggacatctagaagaaccggatcatcctggtgtcccgggatctagataccgtcggcgaacacaacgtccttcaggagcagcatcacttggaacattgtcgaccactggttccagcacagattctttcggttcaaacctgaacacaaacacgggaactggtgttagaggtacccccgcatcttctaaagcttcaactcggagtaatgccactagaagtgctggtcagagctctagctcagaccctcacgggaaacgacatatgagttattgaagtacataaaatctggtcataggtgattgtaaatagcgagctgcatatataatatttgtttcataatttatttaattttgcttttgaaaagtaaattaatttatttttttgactgcagtagtgatttagttttgtagtatgatttgttatattagcgggaaaaaattatgattcatttgttacatttgtatattagaataatcacttgtagtcccattatctaggtccccactattggcctcgtacgtataaaagcatattctcttgtacgtattaacggtaccttactttaaacaaaacataaaactaaaatgttttttatgcgttttaaattatttttcagttaaaatttataaaaagggtttttgtaaacaattattttgatagtaaaagaaatactaactgaaattagtggagaaaatacacaaacatatatttaactttctttaatttaaaatatacagattttgtttctttaattttttttttcaaattttagttttcatttatttttaaataaagtatgacatgtcataatgttgtattttgatttgtcattaaaaagggggtgaatcaaattggttcactctagaggtgaacttcgccaaagaatcacagaccgtcagtgttaatcatcagagacatcaacgtaatgttcctcttggttacttcttgctttaatgttcctcttggttacttcttgctttctacctgattcaggttcttcagttaaagtttctcttttcatttttggggtaatgcccggttgggcctcgttgttttatttaggttctagttctagggcctgcgtgtccttttaggcagttattgccatgtatgttctttgggccattcgtgcctctgtcggcttgttgggccttgtaatcgtttcggctctattggaaattaaaaataaaatatatatactaacccgttttgggtaaaaagttaggtccactaaaagacgaaaagagatcctaccaaaaaaaaaaacgaaaagagacgagccacacgcgtcaccttctcgtttagcctcttcatctcctttcctcagactcactgtgtaaaaaggcttttattttatcatcttcaggcttattcgattttcttcagatttgaaatggtgtcgttcaaggtctctctcgtctctacttcgcctattgatggccagaaacctgggacttctggactccgtaagaaggttcgttcgctttcgcttcttctccttgttatatcaatccccgcgttcttatttcgaaattggattagagatttgaattctaaattcagatcttcgcaacgaaattgatttcttcatttagttccgatcttatggattgaatgaattttgtgtgttggttttaacaatttgatccgatccgatgagatttgaatttacgcattgtttcgtaattttacaggtgaaagtgtttaagcaaccaaattaccttgaaaattttgtccaggcaacgttcaatgctcttactacagagaaagttaaaggtaaagatctctcttacctctctttgattgttgttcaggtaaaggtcgatgattgcaaattccatctaagaaagagtatttgttaactttttcaggtgcgacacttgtggtttctggtgatggtcgttattattcagagcaagctattcaggtaaaagctttatatgtcctttgaatgatggcaaactgcgttttgcattaacttataattcttagacactttactcttattttagttgttttgaatcttttatttcataaaaaagatagttcgtcaataccactttatttcctatctggacagattatagtaaagatggcagcagctaatggtgttagacgtgtgtgggttggtcaaaacagtctgctatcaactcctgcagtatcagctattattcgtgaaagagtaggggctgatgtgagatatcttcctctaaactcatactacttacttttctcttgggttgttatctaaggctatgcatgtttgcaacatgtaatgacgtgatgagaaactaacccgagatccaatttcagggatctaaagccacaggagcatttatcttaacagcaagtcataatcctggtggcccaactgaggtcagttctctttttgttctcactcttttgtgcttgttcattcgataccctcacttagtattatttgaatcctagcatcagttttgttaaactatatgttcatctctctgcttccatatgctgatttcctgctattctattcacaggatttcggaattaagtacaatatggaaaatggtggaccagctcctgaatcaatcactgataagatttacgagaacacaaagacaatcaaggagtacccaatagcggaagatctacccagggtacctaacatttctgatcttattacctgtcatcatctttttttcatcttgtatttgtactaatcatgtttttttgctggtctttttgattgaatgcaacaggttgatatttctactattggtataaccagctttgaaggacctgaaggaaagtttgacgtcgaagtttttgattctgcagatgactatgttaaactaatgaagtaagtctttccatctttgtatctgagagaacagttcttgaatctactccctctatggtctatgcatttaagagaatggttccagaatctgcggtatcgatgatctaaaagatttgttcgtctcttcaggtcaatcttcgactttgaatccatcaagaaattgctatcttatccaaaatttactttctggtatatagttcatcaacatccataaatcttttcttttgagtttgtttgcttgtataggctccatcatgtctttgatattttatttcccatcgttctatgaagctatgatgcattgcatggagtggctggagcatatgcacatcgcatctttgtcgaagaactaggtgcaccagaaagttcgttgttgaactgcgtacccaaggtatcatttttttcttctttcttattttgtataaccaagaaatatcatttcctgaaaggattataaatacacgttgaacagtgtcttttatgatttataacaacacgacaatcggacaatgtacaggaggactttggagggggccacccggatcccaatcttacctatgctaaggagctcgtggcacgcatgggattgagtaaaactgatgatgctggtggcgagcctccagagtttggcgccgctgctgatggtgatgcagaccgaaacatgatcctcggtaaaaggtagcagagactaattctcttttaagtgagatcacagagatgtggagcggatataccactctccccgttaaccaaaaatatctcttctccgcaggtttttcgtaactccttcggattcagttgctataattgctgcaaatgctgttggggccataccatacttcagctctggtttaaaaggtgttgctaggtatgcatcccggttcttctttgtttactccagttcatagattgaaaacgctggactttggtgtcatacgtttttgtttattatagatagtaacaatcttttctcattaaattctcaactttcacattcgtattgcaggagcatgccgacctcagctgcacttgatgtcgttgcaaaaaacttgggtttgaagttctttgaggtagatgtcattgtgaagcttttctctagcttctattcattgcaatcacgtaacatagtctattgctctaatacttctatattttaggttccaacaggctggaaattctttggcaatctaatggatgctgggatgtgctctgtatgcggagaagaaagttttggaaccggtgagcttctattgctagatcttcacatgttttaaaaccgtaacaaccctacacaactcacaaagaagcttttcgacaggttcggatcatatccgtgagaaagatgggatctgggcagttcttgcttggctatcaatactggctcacaagaacaaggaaacccttgatgggaatgcaaaactggtgacggttgaagacattgtccgccagcactgggctacatatggccgtcactattacactcgatacgactatgaggtaaaactgacaaatgtcattattggttgtagacaatatgtagaataaccaattacctttgaccaatttctaaatatttgctccatagaacgtagacgcaactgcagctaaagaactcatgggacttttggttaagttgcaatcttcacttcccgaagtcaacaagtatctctctctccacttaatttcaaatccattcctttttacttgtatgactttcagactcacgtttttggataattggtcaggattataaagggaattcatccagaggtggcaaatgttgcaagcgcagatgagttcgagtacaaagatccagtagatggctctgtttcaaagcaccaagggatccgatacttattcgaggatggatcacgacttgtaagtcgatatgtgtgaaatggattcataacaattcaacaacctgtgaaattgtaaaagctaatccgggcttgtttctcttgttcatgaaggtgttccgtctctcgggaactggctcagaaggagcaacaataaggctatacattgaacaatacgagaaggacgcctcaaagatcggccgagattctcaggatgctcttggtcccctggtcagattcccagataccttaattactcccaaatttacgcataatcgatctttgtcatgtttattaacaccaattgttggtgtctgattttcacaggttgatgttgcattaaagctgtcgaaaatgcaagagttcaccggccgatcatcaccaactgttattacataagacagctttcagaagacgctgtctccaatactactctcattccaacttcatttcttatgaatttgggttttgcttttttcctgttatctgttatcttacacaagtatacttcaatacatataattttaatggaatatacattaggttggcaattgaatttctagctttgtttggctcctccaaataaaaaagaattgccacaatattggagcatgtgtggcagatggagacgtagcaagagtaaaaagcgaatccaacaataactgatacctaaaacctacggtgtacaactatagataatggacccgagaggtggtgatgacaagccagaagacagatgtttataatttgtctcttgagcttgaccaacaaaaacattctgacagttaaaagctaatgttgggcatgaatttcgtgaatcagattgtgccatgtgttagtttgtataagtgagtcagggttcacgggttctttcttatttggtttttaaatccaaaagaaagagaggcatcattaccatccaaacactcctcccactttaggctttcttcctctgtcctttctccatatttgttgtcttctactaaacttttgtctcaacaatgactgatgctttagctaaccatcaacattgtaacatacagttgatggttagctatttgctatacatttgtctatttctcttgcttctatagtcaaagtatagagttagctcgtataaaaagatcagcatttaagtataaaaaaaattagaatgattttatgtatagtattgtctaactttaggtgaaatcacaactgattatagaatcctcgaagaaaaatattaaaaaatcaaaaggcttaatattagcattttcttatgcagaaatgcttaattaatcaaaataagtcttttcacgtaattgattcatgtaactatagtaaattgttgatagactttactctttagcagtgttctttatggtatcacagttacaaatacaaaaagattgattgagttggctcttttgtccgtattagttcatacttgtaaaaaaaaactacaatgtacatatatgattacaagactttaaaatagtgtattattgattattgtacttccctcgtttatctcatctttaaattttatatatatatatatatatatatatatatatttatctttaaattataattggatagtgatagagcgtcaaccgaaatatatgatatcttgaaatgtaattgttacaggtttatagtattgttttttgtttgatgtattatattatatacatggcaaatcataggccaagtacattgaatatgatttttttctattcataatagatacttctagttcttacttgttagtctttggagaaaattcgatatttcgatcatgtcgatcattactttttttaccacaatcatcagttcaggagaagtactgaagaactaatatgtatccacctcaggcttgatggggaaatctaatggataatgctttcacattcgttgaattttttttagtttctaaaaaacataataagtgagcaatacttcagtgttcgaatatatattcaaaaccgtgtactttttttataaacttcagggttattggagttacagcgcatgcatgcaatattattaattatgcatcggcttcttcattaataaattaagaatctttataaaaattgtaccatatgttcaattatttatttatcacgttttcttaaagtacttatatatttaatttaccagaaaataatcgaagaaaaaacgacatgaatctgattctttttacagtactgctgttttcatttacttgcaaaaactgaaataaatccaagtaaataataattccaaggaaaactcacatatattttcagtattacatgcaacaacgagtagtacttttagtttactaatacttttttaagtataaaagttcatagtttcgaaaaaaaacaaaagactcgaaggatcgatgactgagatattattaatttattattgactcgtcggcatagcggttaactaaagccagcgcattgctagtaagcttcttgacgtcatcgactcgagagcagacgtcatctttgatagagtcgtcttcgtggacgtctttgaacccgtccgtacaagtatactcatcagtaagagctgcactaagccaagtcttgacattactcatctggaacctaaatgactcgatcgagccagacgcggagacaagctccttcatctgtttcatggagcctctcataccgtcaacggcatctttaagattctcgaagcagtctctaaggacgggggttgggtggtcgcggttataagcgttttggaggtaagagagaaggtggagagtgttgtggagagtgagggagatggctacgcgcgcgaggcggtttgagtcattttggatggagttggcaaaagaggagagagtggagaagcaaaggtccgggtagagtgtggtgttgcaggccaaacggatgaaatcggagccgttggatggtaggagtggtggatcaacggtgaggatttgtgggagaaaggtggaaaagagaagtataaggagagtaggtctcatcattgttaccatattgttgtgtgatgtgtttggctcttttggattcataagccttggagttatttataggatttttgaaaaatatcagattttataaagaaacaaaattagagagttgagtttggaggtgaacaaaaatactctgccaacaattgtctgcatgaatgtttagtgggccgggccgaattccaatcttagaacttatcatatgaaaagaaaagaagttagtttctaatattttctgttgggtctgctttgttagcccataaatatttcaacagcgacgtaactcataggatccaaatgataatttaccacaacatccggtcctaaacaagcaaatcaatgagagcaaatgttgttagtgcgtaactgacgaaaaaagtggtactcaacttgtgaaaaaatactgtggatactaagtattaaccatatataaaacgtaaaaaaaaactgatactatcaaattttgactaattggttattcaacatataggattctgaatgaccgaaatatattttttctaatataattgtattggctgatagaaacttatacaaaccttttaaaagtttttaaattaacatcaatatatacaaaacatgattacacttacgacatcatgtgtgctgcataattacgtccacctttgttacaacattgctttgtttgtactgtaattcgaatcaaaattaccctcgttatttcttctgtctacagcatcatatatatacaacattttctattcttacaaaccattgataattatgaagtaatgaactaagcgcatcatgttcatgccttttgcggttgattattgaaatataaacaaaataaaatgatatggttgtttcgcactgcatgatgatcttacaagtcaatttcacccaaaaagctacaaacatagcaaaagtaggagtttcacgtcttcttgccatcacacagaatcaatatgttgaaacgtatcaaaagtttcttacattatatggtgcatacggaattaacatctggacctatatcatgcatgtttaatatgatgtcgtgttctaggaacgctagtggcaacgaatatatgatgatggttcatgcatatcaccgataaatgaacaaattatccattctgtattatattgatatatatagagtaagttgttatctgattgtggttggtccaaaaaatacatgaatgtttatttcgatcacactactacctctaccatcttggttttttccaattttttagcatgattttttatttacgattagatatatttctttaaaaaaacatgaacatgcatatgagtgaaagtaaattgacttgttagaatcgtcaatatttagttctaataattatatccattgctttaatcactttctatgttgatattattgtttgatcaaaaccatcagtataacctattatacaatagtttgatcaaaaccatcagtataacctattatacaatagttttgattcgttttgatctcttaggtttctttttagctattagaaacaaattcatagagactatagacattagacaatgataatgtagaacaacaattaatgttcctcaaatatcccataaaacctattgaatcaactggtccaaaaccaatacaacgagaacttattgtctacgtttatatgacccaaagacactaatcaatcggcctcaattagaggcggatttaaagacatcacggtatcatcatatccatgttactttttctgttctcttttttacttacccgtccatttctttcttttggcaaaataattttgctaaattacgtggcaaaataattttgctaaattacagcgaagaggatcacatgcatcagcactatttacaacaatcctttagggtatatgttagtcaaccccgtaacaccattcgtacccattaatcatgaacatttcgcaaagttttcccaccaaaaacggcgtcggataaggtttttggcattttgtgtttctttttttgtgtgcatagcataatttcattttaaccgtactattcgaagatttttaaattggataaagatgattcattcattacatagtcgctttgttgttactagtgataaattcatgttaatgattctatgattttcggccagctatctcattaattattaagacgtttaagtggagctattagcaatcgtgtatgacataatgattagcattttcatgtgccatgcccatgcatgaggcttttttttgtttaaaattttattctattatatccgaattttgttatatactaaatgaacatttgtctctgatttggtctactagttaattaacctttagcttcactaataaaaaatctcatgattttgatacttaaacccaaaacatattaaaaacaattagcagtcttttaaatcgataatgtgcttagatgattatacgttcgtaggaaactcttttgtttccaatgcatgttaagaactaagaactcgtatccttaagcaccaatgctttatgcttaatgcctcattagagatataaactgagattgactgtgttctgaatcatcataatataaggcacacaaagaacagaacaggaaatacttagcaatataataggtttccaataaaagtgaagaagaatacaataaacttttataaaaaaaaaagtatataataatttcacactcgaatcaaccaaatgtaagatgtcttgtccatttacacatcacatgagtaagtggattacagattgcaattgatgaaatctggatcttagctaaaaatttattacgttactatatacatcgagttttaagatgttcataatcacaaccacaaccacaagtttgaagaaataagaaacagagtaataatatatcaaataaaatttcatggctgatggaatcttttttctaattgtaggtccaaaaaagcctaaattaatggggaaacaaaaaccaaaattcaatagtaattttactaattatgtcttggttaaatagagtaaaaagaaaattaatcacaaacctccaaaaatcaactaattgagatcaaaacacgtgtcgcatgccaatagggcggtggatcacatggtaaaaaaattcactttaatttttgtctttcttcataattcatctcacagatttcaacttctcttttggattctctcaccgtacaccgtcggcgtaccactccccttccacaccgtcggcattaaaaatctcaaaccctaaaacccgtatccaataacccacccggtccaaccggttattcaaacccggtcaatccaaaattcgcctcggaatccaaacctccatacccaatctaacatggaaaaacctccaatcacaaacctccacgtggtgatcactcattggctcttattctggaatccaagaggacctttttagtataaagagccccttcgttggtcctatcaccttctctctctcacacactaacagaaagcacaaaaaacagagacaaaagaatggcgcgaaaatccctaattttcccggtgattttgctcgccgttcttctcttctctccgccgatttactccgccggtcacgattaccgcgacgctctccgtaaaagcattctcttcttcgaaggtcaacgttccggtaaactccctccagatcaacgcttaaaatggcgccgtgactcagcattacgcgacggttcctccgccggcgtaagtctactctactaacatacatttcaaacttctccttcttctaatctctaacttttccgacgatatttcaaaaatctcaggttgacttatccggtggttactacgacgccggagacaacatcaagttcggttttccgatggcgttcacaacaacgatgctttcatggagtataatcgatttcggtaaaaccatgggacctgagcttagaaacgccgtgaaagctgttaaatggggaacagattacctccttaaagcgacggcgattcccggagtagtcttcgtccaagtcggagacgcttactccgatcataactgttgggaaaggcctgaagatatggacactctccgtactgtttacaaaatcgatagagctcatcctggttctgacgtcgctggtgaaaccgcagccgctttagccgccgcttcaatcgtttttagaaaacgcgatcctgcttattccagacttctacttgaccgtgccactagggtacgttactctgttttcacactttaaccattagcattaactgtggtaattaattttaattattacaaacattttaatattctctttgtttttctttaatagtcaaatttaatagtcaaaaagattttaatttttaatcaattattctttgcttgtgagataagagattcgtgtccatatgcatttataataattgttttatttcagtacttttttgggtgatggttggttcatttctatgattcgtttttaataatttgacttttttgagtatatttattcttacgtatatgtactattgaataaatatttttactgacgtagagaagatatatcaaattcacggatctgaaataaaaatgttgtaccgttgatcgcaggtattcgcgtttgctaacagatatcgcggcgcgtatagtaacagtctctaccacgcggtttgtcctttttactgtgatttcaacggttaccaggtaaagtattatagttactctttattacctatttttagtatcagccgttggatggtaaatgttgattttgactgacatgatctgatggtggtgttgcaggatgagttactgtggggagcggcatggctacacaaagcctcgaggaaacgagcgtacagagaattcattgtgaagaacgaggtcattcttaaggctggagataccattaatgagtttggttgggacaataagcatgctgggattaatgtcttaatctccaaggtaaccatctttaattattcttctggtcaatattgcatggtttttgatgcgcattgattgttgcttaatcttttaactgtcaaagatttggtgtggaggtattaggggatagtggagtttttttgtttgtttttggatttatgttctatgtttgtttggtcgcaaggggacttactaatgtagcataagaattaaattaaaacataggtagagagatggttgtgtctggtatatcacgtgtttgtggcacgacttttgatcatataattggaagtggggttcacatttcaaattatatgtcctatgacctatctagttattttggtctaccatatgcttcattatcataaaacaaacccgctttagattagatgtgtgaaccaatcgagtcgtttctttagatatgtagacatataaaaactaaatcatgttagagtcatgcttaatatgggatattaaattagagaagatagaatgggggatggatgattggaccttgcacatgatgatgaataatgggaattagccaattagaaatggtcatgtgatgtgggagctaaatcttaaggtaagacatacctcattggacattcccctttttttgtccagtgtgtgctcaacatacctcctagatttggcttcatataattttaataatataacattaccaattggaagccagagcctcacatggacccatgatccatgactacttgactagtgaatggataaaaaagagtgtgcatttttcgcatatatctatattatataatatataaacttgataatccaatgtaggtaggtgaaatgtatacagtatgattttgtgagtttgcatgtggtgtatcatatttgtggttttggatatagagtaagtaaaaactaaggtatatagcaacattattattacaagtatcagaatcagagcatcaggcctattgggtcaagtggggacagtaaaagaaggaaaggggtagagaagtctttggttactgttacaaagcatgtggctcaaaactcaaaaggctgagaaaacaataaataaagtatcgtgtgtcccttaccagttcccattctgctgcaatagcctaagtggtttctttttgtttttgtcatttctcaacggtctctttttgctatactgatcagattgatttgtcaagggcctttcaccatctcagtttttcacatggcgctctgtctcaaggcccttgttctttcttgttatttatatttagtctttgtctttatagtgtttttttgcttcttgttttgaaattacaggaagtgttaatgggaaaagcagagtattttgagtctttcaagcagaacgcagatgggtttatctgttctatattgcctggaatttctcacccccaagtccaatactctcgaggtaataatacaaaaccccatcattttttttctcaatatcaaagtacttttcccacattcacgtgatttacttttgtctttttccttctaaaaaattcaaacttttttctatgcttatctttaattaattagtagtaatctgatttctttttgtcttacatatcacaggagggctactagtgaagactggagggagtaacatgcaacatgtaacatcactatctttcctcctattggcttactctaattatctgagccatgccaaaaaggttgtgccttgtggcgaattaactgcttccccatctctcctccgtcaaatcgccaagcgtcaggtaagagattaaaaaaaaaaaaaacattggtcccaaatttcagaccaaaaacaaaatacatagccgttttgctctttgggaccaaagccttattgtttttgtgatatgtgaacaggtggattacattctcggagacaacccgatgggactgtcttacatggttggatacggtcaaaagtttccacgtaggattcatcaccgtggtagctcggttccttcggtttcagcccatccaagccacatagggtgcaaagaaggctctcgctatttcctaagcccaaatcctaacccaaaccttttggttggtgctgtagtcggtggacctaatgtcactgatgcttttccggattcaagaccttactttcagcagtctgagcccacgacttatatcaatgcaccactagtgggccttctcggttacttctccgcccattctacttggcgatgagggagggccttattacttattactctctatcctattagaggtgtgctggaaactttaggccaccctaaaacccttttttttcttttttaatgttattgccactctttattttctactacttaaccaattgtattgtaagcccgtaattagtgaagaagagaaagagttatgtcggtgtctaaacttattatatttgcagtcaattacttgaattatttgtttgcaagacgactagttaatactcgctagacaagttgatataatcatcagaccaaagtttgattttaaagagaaaaaaagatcatcgaaccaaattcaacaaaagcaaaaacagttaaaactaaaaaactcaatgataggttttgtgtgaaaagtttattgtttgtttggattcctactaaaaattaaaatatccatctatagttttgcaaatcaagcttcataatgatttcatctctgttgggccttcctcatgggggtggtctacttcctcatctctgtccttcttagtaaaattaaatggtccagttgacggcccaataagcccatagaaaaagaaaattaatttgttagctaagagttcgtttgcttactatgattcatcttgttgtctttgcctatgagacctagtgcgcgtgtattattgtttaagttcgacgttacccgaggatagctcactcgataattctaggaattttttacttagcgctgtgtgatccttgttgataaagtttcttagaggatattgtataacactgaaactcttgaaacaattcagcttctaatctgtttatttgatgtttgttgatctgaaaaatgtgagatgtgtactaatcgtgactttgtctctgcttatgacccggcatggcactgcatcgtttcgaaccacacaccgtaaaaggaagaaacaaattcagggtttatctcaaaaatgtattttgtttaaaacgtatgacatttatgtttttggattatttgtgtgaaattgtttatcgcagatattcatgtccttgtggaccttgtcttgtcttcagaacaattttatggtcacacaaaccttagagataatacaagttttggtttatatttcgttaatgaaggaaacaattgtgtcaacaaaaagaagacgtttttagggaaagctatgtttctctctataccaatggataaatgagagagaagagaccttggctttcttcaaaaaaaaaaatgaaaataatgtaaagtgatagaaactattaaagtcaaaatcaaaattgtatttattaattaaaatttgtatgaacatgtagtatagaggtttgtaccagaaatgttgatgtcacaattgattttaaatcactttattgttgctatatatcgagtgatagagagaagcaaaggagttaaaatgtgaagcagagtacaagttttgtttaattttataaagtaaaagagagtactaattgaaatggagagtgaaggagataacacaaaatgagtgttgggaatcataaatccatcaattcatgaaacaatctaaacacaaaaggactaaacttagccccaacaatgtacttttgaattgtgtagtggtagttcaaattgcacaacttggtgggggcatgaaaggacaagtgagtaaatgatgatacaacatatacacgagagagaggatacgcaaaatgataagaccacgacgatcgttcttatccactcatatatatgaacgtgtttttggtgatgaatttagaggttaagctctcttttttgtcctcctcaccaaacttttgcttatgtgcatctccttcaccattattactttcctacaattatttatctgcctctaaataataatatctataagatctttccgcttgtgaagagaatctctctgttttcgtaatcaacatgtgagctcttttggttcacaattttttttttgtttactgtagcacataaactagtagtatttattctccttaacatcaaattttgaactcgtgactttcataaaaagctatttaaaacatgaatattttcctttgaaaacatatcattttttgtaatatatcatcttaggtattttacacaatcatcaacctcaagagaattttcaccttcttattttctttacattgataccaaaaaaaaactcgagagaataatagtaaagtggacttgttaacaacgaaagctggcgatacaaaactagtactattctctttagcgatgcattcaatatgattttggtataaatcaattaagtgttcatataattagttaatgaagtgtgtttgtgaaattagcaaaaaaaaaattatagtgaattttatttgatattaaattcttgacagacatgagtccatgacaaacatatatctgttagttcttaaagttataatgtaatcctacaataaacagaccaaagcattacaaacaatgatcaaatacagagacgccctaacgtcttctcctgctcgtaagaatataaatggtaactatataatcataatctaatgattacaattacaaattaccattgtaaaaaaaaaaaaaaaaagtgtaggttttatgtaggagaagtagaagagtaattcattccactggattctccggtcgacaaatcaagaagcatcttcttgtatggcattgcactcataagcctgcaccaacaacatcaattcttttagattcaattgaaaaacctcaaaattttctataaagaaaaaaaatacaaaatcaaacctctctttgcgcttctccaagaaccgagccaaggatgctttccgagcttgagggactggaaaaaagcaattttcgagtttagacatatgatttgaggaagcaaaaatcttgattatattttgttttgatgttgatattagacacacatactgaaggaatcatgttacgaggagctgcattgaatgattcgatcatgctcattgcattagtcgcagcaacgggtgtgtccctacaccttgagaaattatcagtgtgagtggcagagcttgatgaggtagcagcagtgttatggatttgttttccatacattctttcagcttctcgaaccggtttgctatctccagtttcacctttcaaaccgttcccggcgcataacatgatggcttgagcctactcacatatcatgaatagtccgttttagaacatgtaaatgttatgtaaatgttatttgtatgaatcttgattatatataccttatcgggagatatgtcattaaagacgcttatagttccgccataaaagattgtgagctgaggagatgatccggaggaagccactctgtttccacaaacccacataaccaaatcaaaatatgaaaagagcaaaaaaattgttgaatgtttttgcatcataatatggaaattaccgtggaacaagagaaggatgagttggtaaaggaactgaaccgcctagtaaaagcggcgtcgcgttttgaaacgcaccaccaaattggcatctgcggaaaacattggccgcagaaactgatccccactggtatgcacccggaaacgccttagcctcctaatttgttaaattcaaattttaatcgtcaacgtctttaaattttttgtacattctaaatttagaaaaatgccaagaaataaacgtgatccaaacgccaaacaccaaacgccacaaaatattaaattattttttccctaactttgcggctggcagacgaccgaccctaccagctcttaactagcacttatccaacaattttttttccctggttaatgattggccacatacacaaaaatgataaagttcggccatttatccgaccattttccggtggctatctcttacgaaaacaacttttctcataaatatgtgattgatgtgtttaacataatttgaaagtaaattcttctttttaatcaagaccataattgagtactcctcttgcacatgctaaaagacgaccatgattatgcggtagcttatagaaccattagattagccataacatctgaaactgatacagagtaagttaaattttaagatgaaccaacctggaaatctgaagaaggcatgaaacttgaagtagcaaaaacctttgacttcccccattctctagctgccttcgtacttaaccctataagtatcattttttatggtcgtcaatttgactaatctatccaatctcatttttataaaagatttaatggaatcttttttttttcaagttttggaatctgaaaaattatatttaaataaacaactttatacggctatgttaaaagtgaaaactgatctcttcttgaaacattaaaataaaagattctcgagacaagaacacaaacctcgttcttcgacagcatcatcgttaacctcatgcttaacgttattacttagatactgcttgtcgctcaaacccagaaaatctctttccattgcaaaccaaatattcaatgacaaactctcaaattaacgtgtttctctctgtttcttgcccaaaacatccaatttaaagaagaggaagaagaaaacagaagaaagaagtgggaatccacaaggaaggtttcgttttggtaatgttacagacacacttttggagaggcttatttaactctttgcctttcctgtttttaaaggcttgcttgattaaagcatgtggggcttttttctgaccggtacaaacggttggtgctactggttaaaccggttaattcacacgtgtttattcttttgattttttcatttctgaggaccatatacaattagacatccgtcgaccgtcggtggctctagtttataatagtgcatgttttttttcaaaggtggattaattagtttggctattggatattttcttcgtgaactcacacacacatgtaaaatgtgtggttgcttttcttatgcaacggtttggtatttatcacatatttttttcttttctttgaaaattatttcaactataataataaatgaaatgataagccaagactctttcgttgaggcaaaagtaatgtcacgtattggatatacaataaccaaatcacgagaatgctcaatgggctgaaagaagtttgatttgcttatctaaggcccataattttgtttacggcccgacttacattaaatctgttcagtataactgtacagatttggctaaattgcattccaaactagacctccaagaacttgagtgaacttttgctaagctcatttcataacacgtgaaatttttgaatctttgatacatcatgttgttatttgagaccaatttttcttattcatataatgtttcaaacagacgcaagtcatttattagtcatgttactcatgtacaaattaaaagaagaacctggttatgaagcaatcatcggtagtacattaagaatttcagaaaattaaaaaaaatatggaaaagaattagacgttagttggtctttcaaagtcctaaaacgatttggtagtcagcttacaattttaaattatcatttttaatgattaaaggacattaggccaagtcttcaattgagttctttagacaatatgagaataaataatgatgaatacgatgaaaagattcgttcagacattcgcaataggacgaacacagttatcattttttggatctccatcctgatttacggtttaatatgttccattattctcgacacgttcatttattttaacttgtttgtgtattgataaaagaagctcaaacccttttaattactgttattttttgcatagacgaaaaacatggcatttatagaagataagaaatcgaaggtttcattcacatcaaagaagaagatatcgctttggcctatataagtccgacaattatacaaaaatcgattcggagatacaatcatatcaatactatatcaaattatcaatatactataactacgtacatcttatgagggagaacaaaaaaaattacaaaaatacaactaacagtgtggctcgactcgagttgttgattgatatctttcccactttgtcctttcatttacaccatttctcatctgcaaaaggcatatacatagtaatttagattttatgatcgataaaagaactgaaaaaaaaacgtaaatcaatatcaaaaataccttgtaattttctacaacactttccaacaaaagcgagaaacacaacgagcaagatgattaaggtgacgattcctattattatcgccaatgtttttcccactccattatcatccttattgcccttctctccttctgccaaatatatatatatataattttaaaactatccatccacctctaaagtttttaataaatttgttttctccatcaagtataatgttcatatttttatttatggtcaacactatcaattttatgggtttaaaaatttagcgtcgtacacaaatatataaaccattagactaattgttaagatcagtctaatatttaaattttcatctgaggttacgtaaaaaggttttttttttagtgattacgactttttatttttttatctagtttagttaaaataagtttagaggaagactgaccatgaccaaagtttgggcctggggtctgacgcgcgtgactaccaccaacactgaaacgcgcgtaacatttcgacaagtaaacatatcctccctgagccattccacaatcagatttgagccgtccgattgcatcagacaagcaatcttggcactgtgatgtacttagatcaccggagcactgagccacaccctgaacattcccgttgccacctgtcctgtaagatccatctccggtacctaaagaaccgatgacgtcactagctttggtcaacgcatcctggtcgttgaattccatcggctgtccacatttgttgaggatcaacgttttgtcttgaaccccaaggaacgatttgttgtcgtaacggatcagacaattttccatctgcaagaacccggagtacgagtttgaacataaggctccgacctgtgcgacggcgcttgatacgcacgtcgagcaggcggttgggtctaggtcgccgcggcactggtaaataccgtatacggtaacggttggttccggtttcccggtgggaactgtgaagttggcgtagcgggtttgggcggttgaggtgacgaaggaagagaggagggagttaagatttgtctcgtagccggagctaggggagaatttagccggagaacaaacggcgtatatgtaattgtcagtgggggaggaggaagatgggttcattagtataacggctgtgagaaggaaacagagaagggacgtcgtctttgtcttgatcatggttactttttgttttgagagatagagaaagagagaagatgatttggtaaaatataaattgaagagcgaagacttgctttaaagataattgacgtaaagaagggtactcttatatgtggttccatgttgcatgcttttggtttttttttttttggtttttggttggggacgttcttaagaatttccacaatttgcaagttccatatcattgaaattactaaataattgcaactctttcttcgttcagacttttttttttaaagctataatgtggaatttggcaatgtgcgtctatccattacaactttctttttgttaatctatccttactcatgtcatttgaattcaattttttattttgacagtgactcgtgtgaattcgttagcctctaccgttactactaattacccttacttgccagttgccacttatcaagaaggcaataaaactgaggagttaatttcttatagtattgtgaagtttgaatgcgtatagaaaggccaaatcggcggacttaccacgaaattaataaaaaaccaacttctttattcatgtattatgtatatataatcaacacaaaaagatatgaaaatttgcattcaactagtttatttttcttatatcagatgataggagtgacgaagcaattctcgcattatgtgtgtgtatataaaaattgacaatagtaggtctttttttttgtttttctatatcatcagaaaaaaaaagcaatacgaataataccgagcaatgacgacgtatacgtcatgaaaacgagttatggtcattaatatattacatgtagtatagcgtatagagtttggataggcaatggtacttgaaaatgattttagaagatgaattttaattatatagaaagggatattggcgtgctggtcgagatgttgtatacatttatgtaagggttgtatcaacattttattatttttattagtatgatgagaaatcaatcaagtaactaggctgccaacgtcaaagttcagttacgggaccggtgaacgaatagagaagacaataatgttatttgaccgacttttgtttagttcttataaccacaacacccatagaccttttctttggctatagattgttcttattgactttagtaatactatttctttttgttggaaggttagattcttttattatccattgtagctcaattagtaaagaccttaggcgaatcttagaggtcgccagttcgaatgacgcttgggacgaaactaatattacatgctgtggtttcgaacctgaggggattacgggcttcggcccagaatttactggtattcaataaaaaataaaaaataaaaaaatcgttacggctgcaaaagaatttattgttgtacgtatacttgaatctatctataaattaattacaacatggatgttgtattttttcatactacacatgttttagtacttagtacatgaactattaactatagaaggtaacatttatgatactagatcattgataattattaaggaaacaatgacaataatgtaacaatacaagagtaatcattttgtcgataagggattctattcagttatgaagttgaaataataaccaattaattaagaagatataattgaaagcagaaagttctggtaattaattgcatggtggaattgatcaatcaaattacttttcaatagtattattttattttcacgtaacataagaagagaaaatatatcagtgaaaagtacagctaaacaaagactggataaagtttgataaaggggattagaagttgtatcatttagtcactaaacgatcaatggcttacccacacaaatagacttttaagaactcttctatcttacacacacaaagctttaatatctatatatagattgttccaacgctaataattaattctattgttgaattagaataggaatgtcatatttggatttttgttcggttttagttttagttttccaaccaagtattgatttttaattttttcgtaacacagttatttttttttccttggcaggtggatccgtaatcatttagatggagaaaatataaatttagggagaaataaactaatgcagagattaagggattttggtgagtaatttcgtgcttgacttctaataagtctttggtcatttcctgaaaaataataaaaaaattcgaatgggcactcgataattttcttgtatttagactaacctaattaagttgactcattcgtcaattccaaaaggaaaacgtttcttcgacaaattgtggaactctttcaagattaaaatctgtggagacatccaatatccctatgcctattatagatttgagtgaactaatctgatattatttatatgagaatcttagcttacaaattataattaggatcgtcttatgtttaccttcaaaatttacgttttcatttagaggctagagtaaaatatctagcaagaattcaaaagttatagtacaaactgacaagatcaatttccctctgttttagttttcttcgtatcaaagtctgtctattttcacatgaatatgttcatagcaagatcagatataattatgatcttttcaccttttctcttcttacgcatcagtaattggttagtaagaatctgattctgattattttttaaagtcttattgattatatgatactcgtttacaattgttgctacatattcgagcatatcttatatatagagagagttagagaccattacatcctgaaagtgtataaagatattgatcaatgccatatatgaaagtagattagttgtggattaagacataatttgtcaggatctaattattttgaggaataaaaggtttaaactcacccacttggctgtccctttaaacaaaagtttttctatttgaaaagggaactaaaagaatgtaacacgacacatgtgtatgttagattagacaccacaataagcataatgtctgatccagtcttcttcttttttatttatttcatgtttaatgtgtaatatatattttatttttttgataaaatttaatgtgtaatatctaaggtaatatttagatgtatcttccaattggtttttgtcaataatgtttgtgtacctttttaaaactctgatattttacttgggcctgtaatctaaaataacaaatcttatgggctttaattctttatttcttaaatcagcccaatttgattggggttcaaaacaacctgtaataataaatagggaaatacgcccatgaatatatcatttctaactctgcaacgttttcatccatgtatatgatatgttttttttttaagtcatgaaattgagatatgttttgttttcaatttaaataatattttaaaaccatttaaaaaaaatcatataatcttttatttgaataagatacaatcacacaagtacttacacaaataaactataattcttgaaaatcaaacacatcccaatcttcacaccatagattactgtaactactaaagatttaactaaaacagattcacgagcataacaatgaatttacattaggattttttttttgatgattctaaggagttttagaagatctttgtttctcgagttgttcgaaaagagaaccatcatagacggctctcactatctccttgtgtagcaaaccactcttgtctttgcacaaattatacaataccttccactccccaaacgctaaaatcctgcaattttaattcacatagattattcagaattcatttgaatatatatgacgttttcgggttttgttgtatagaaaattaaaccaaactggctcgataattaccctcctttacaatcattaggttctctgtttgccttgagaagttctttaagttccttgctggtcaaagcatcgcgatgtgtgtgagcatgcttcgcaaatatctcctcgaactttgaagccacaaacctaacaaaaataaaaattatttagatttcactagttacctctaaacatatagattaattggcaaattaaatttcaagatacaaaaaaagagaaccatatagtatataccgtccatccttgtcgtaaacgcctgaatcgctgctatgtatccctaggcggacattcttaacctctatcggaaacgagaatgagaatcctttcccctgaaaccaaaacacttccaatgattcttttttcttttgtaagttgtaacgtatgaaattaaatttgaactgcatgtataataccggacgagttttgctgctgagactgatgttgatgaaaacagcagcgaatgttgacaacaaatatccacatccgattgctctaaatcctgttcttgttttttcgtttgtcatatgttacaacaatagaattagtaaaaatataaaagttttttttctgggtgaaagtataaattaactattaagagatacgaccataacagccatagccatgctcacaactctgttacgtgagaagacaaaagatctctaatacaaatctggttttagatatttcaagattgtttaagacattttggtcgaaccaagagtttccaaaaccgtaccttgaaatgtctccgagggataaacgataccatctttgtttctgtcgaagaaggcgacatgtttttgcaagaaattatactcttctgggacaactttcacttctacaaccacacacaaaaacgttttaagatttaattgatatatgcgtaaatatttactaattacaagtatgaaagttggaagaaagtaccagcagcggaaatagaggaagccataatcacagatagagagaaaaaagaataagtgaatggttcttatagaaagtaactgaaaatattgaaaagagaatggtgaaacgctgttattgtatgataataattaatgtgataaatactcgattcgatctcgtgcggtcgatatatttatatacagttgttctgtatattataataagtcattatctaagtaaacatatcgtgtaataaacaaaaacaaaagtgtacatatcgtgcaagactgagaaggttactgaatctagatatgaacatattgggcctgattagtccttgtttgtacaaaattagtgatatacattccttatcggcaaaggagttcaaatattggtgaatggcgataatgcaactatgttggagatagattttaaatacatggcttatacgtgatttttaaaagagaataatgaaattcagtcaggaaaaaaaataatttaagagtttttacttgttttgtataccatattcgctcaatttaattagtggatcgtggtcatcatttggattttggaacctaaatcttatagcatttaaattatatataactatataagtttaatcttatcttcttataatcctcttccatccaacaaatcgagacatcccatgatctcattgttgaaatcgattcgcaacctacgtatacgtataaccaaaggttattggtttgattttttgtcactcatgtttgtgtacctttaaattttatagggacccaggtcaactataataaataattccgcaagttcggaaaaaaacataaggtccttaattttttttttcttctcctttttaagtacatacaaaactctaattaggtgcaccaaaaaaaacaaaactctaatttggtatctcgacatttttctttgtcggatatctctacattttaacatttataatttatagtttctagttctcaatctggtttggatatatcatatatacatgtcacatcaatgtcatcaatatgtatattcctttataactttggaagtttttatctgttgacccaaaaaacattttactaatccggcgcttggcttacaatttttaaatgtgttgtaagaaaagaatcaatgatgttgtaaaaaaaaaatggttggaaattgagataagttttgccttcaattttaattatacttctttgattggaaatagaatcaagtatgtaattgatcaaatacacgaaaaacaataacataaattaaacacattacatgttttttttattgttgttaaaactcattacaatcttcacaccataaatattcactataacattgaagtaatagttttaaaaataaacagatccacaagcatgcaggagagcttgattatatttaaataaggatttatggatgtttcttagaagttttagaagatctttgtttctcgagtttttcgaaaagagaaccatcgtaggcagctctcactgtgtctttgtgcaacaaaccattcttgtctttacacaaataatgcaataccttccactccgtataccctgcaagcctgcatttataattcacatatatataattcatatcacgtttccggttatgcgttgtatatagagcaaattaaaccgaacaaaatcaaaccggtttagtacttaccatcctttacgatcattaggttctttgtttgcctttaggagttgtttgagttcctcgttggtcaaagcatcgcgatgtgtgtgtgcatgcttcgtaaatatctcctcaaacttcgaagcaacaaacctaacaaaaacaaaaaaattatttagatttcccaaattcactaattaattacctctaaagatgtaaaaaaaccataccgtccatctttgtcgtaaacgcctgaatcgcttccgtgtttggcaaggtgaatattcttaacctctataggaaaccagatagagaatcctttaccctgtaaccaaacacatctttgattccttttttcttttgtaacgtacgaaactaaattttaagtttttaactgtaccaacataatttcagattaattaccggacgagttttgctgctgagacctatgtttatgaacacagaagcgactgctgacaacaaatatccacacccaattgctctaaatcctgtttaatttttttaaaattcgacaataaaaattagtaaacatatcaaaagatcttgataagaccataacatccacacacacacacacacacacatagagaagacacaagaatgaaagatctatattctcttaatacaaatctaggttttagatatcacgagatttgtttaggacatttttaagaccgtaccttgaaatgtctccgagggataaacgataccatctttgttcctatcgaaaaaagcgacatgtctctgcaagaaattatcttcttctggaacaaatttcactcctacaaccacacacaaacgttttaggatcgatttaatggtaattaattactaatcacaaatatgaatgttagaaaaacgtaccagtggaaatagaggaagccatgatcagaatgagagaaaaaaaagaagaagagaatggtaaaagatgaaagagagaaagtaactgaaaatggtgaaaagagaaggcgaaacacacgcttccttttatatatagagatttaattgctccttctatgtaattgtattaataatgtgattaagattcgagatgatctggtgaagcctatgtaatatatagtatatttgcatcgtcgttactttttttttgattctatacgaagacaagaaaatgagtgggaagctttagacatcttttatacttatcattcacccaccacgtttgctttggctgatactttcctcgttttaataaaataaaaaataaaataagaattctcattattcgttactcctaaaatttaattttaacgtatcagtaatttaatatacaacttgtaatttttcatgtgtttctattagttaaaaattgcataattttgatcgtttcgcattgccgacttacggtatttaattaataagtcgttacctaagacttagtacatatatcgtataagcctgagaaggttaattagtttaaaactttaaatatgaatatattgagaattaatgaacgggttttatacaaaataatagtgatatacattacctctcggcaaaggagattaatgaagtaatgtatattaaattcatggctcaataaagtgctttttgaaagagaaattaaaatgaaatccatttaagaaaagaaaagaaagatatgggtattagtgggtgtatatgccacatgtgttttcgtattgtttatagtcgctttctatatctattttaaagcctatgcactaaaaatcttgggttcttgatcaatgtggatgaatcagctcggcgtctgaatgctgacaagcaaaggctgcggctacaaaacttacccttacttgttagtcttatccatagtttaacagttttgacgataatattggtgtcaaatggtatcgcctagcaaactaaacacgtttggtgtgctctatttttaccatttagattgagtcgtgtagtagacggtagacccattttttaagttatagaaagtgtggtggtttgtcttttatctatagtatatgaattgtaatttcaaagttgtgataatttaaatagatttagttctgctagttgattttctttttccaataatattcattatatcaaatttgaatcagggtgtgacacatgtacgacactaatacaaatctttaaactaaaaattttggtttttagttttaccaacttagtgctaatccaatgaaaatagcttttaaaatatgtaaatgtaataaaacatttctaaatagttaggatccaaaaaatgtaaccattgtcgtaaagaaaaaaatctggtggtcattattattattaggtatttcaatgtagcattgtgcatgaaagataaaaatttaaaattttcacatatattatcaaagaaaaactttggaagtaacaaaattttggactaaaattgcaagatgttttttttttcttttctaatcgtgataatcttctattttcttgttagtgacataaaagtagtacacaacatatctaatttctttcaagtttcaacttttctttttatagtaaagtgtgtatatgtgaacgactttcatgtccatcaattacacctagattaccaaacaattacgtagtattttttttacaaaatgcattttaattaatgtgattttctaaaagtgattacaacagagacttgatttgaatgcaaactataatctaaatgggaaatgttataagatggttagaacgttaagacacggtatcaatattcacacgcattggaaatgtgaagtaacaaaaaggccattgcgtaaagctgagtgtaatagattccttatgctttatctcttgtcttgtccaaatgctcatgatggaatattgataacactacaaattcctctacacattcacacttggtataggtagtttgcttctgcaaattaccacaaacattccctttcagattctaatccaaacgctcatgaaaaattcctagtttttaatcattacactattattctgtaaaaaaggaatcacaaatcttctaattgacaatataattcaacattaacatatatatagtataggatttgaattaccaaccattatagttgatgacttgatggttagtaaaactggttaagttaaagaggtgttcgacttagcatcgctattttgtagaatttagttacatatatctaatcattccgctacttaacaatcgcatgcatcgactcgagtatcatatattcatatctataagtcggatttgttgccttgtttagtattgctatttgtcaaatctatcagtcggatttgccactgccgtttcaactgcatgttctacgtgttctgtatgtctgtctaatcgatctctaaacacttcaaattgttcgcatattctctaaccacactgcttaaagtttggttctcaagatccgaagagtagaatgtgtctacaactacgtgactataacgaacatctttcatcattcttcccaaatgaaaaagtaattacctgcaacttttgctttatcaattatatgcaaaaggcacttcttttgatacgaccttcaatctctatgtcctccaaagtaggccgcatacactcacacaaaagtaaaagaccaaaaaaagtgaagaagagtggaggtttattaagggcacctgtttttggtgaatatattctcaaatattacataatacataatcaaatggtaggattaagaaggcctatagaagaaagggttcttaggccaatctcaaagcccttcaaatgctgtttatatacattgttttgtctcttaaattcttataaattcctcattacctcttttcacatcacgcaacatttcaccactagtccctttgggtctgtcctgccttcctcattacctgatgatacattcagttttggttagaaaaactatgatatgtggctctttgctcagagcatagccagtgcggctaaaccgggttaggaaagtgtaatcccatatacctaaactaaagaaaattaccttccaagggttgagctaacttgcggttctgcgatgacatcatttcttttttaagctgaatcagtagatcctccattgtgaattctcttctccagttggaaagcatagggaagtgactcggatcaacctgatcgttcagtttaaccaagatgaatattttgcaaaacaagatcctcttattactaatattgttagttcaaaagcttaccactccattctcaggattgacacaagccatgtttatacgactctgaaacctcacagtaggtggactttccggataatcctttccacagaatagcttcagctgaaagattttcccttcatacgcagtctgataacaaaaacatcaatctttcttctcaaataccaaaagtggaaacaaatacttcaattcatttccctttttgtctcttctcattcaccaaaattggttttaaaatgctacataaggttactaaactcagctaaggatcatttgaagttaaattaaaccctcgaattatagtgacaaacaagtagcaaaaaattgcatcttttaagttaaacatttggaaaggttcttgctttagcattaaaaaatgcatctttattcaaatctaccatagatattatcatttaagttaaacaaaagatgaagagatagattgagaagaagaaaactaacattatgaggaccaagaatggtaccagtccaagattgcatcaaaatatcatcagcatcatccattccataactcactgtcccatctccaattcctttctcacctctttctagctcttccaataatctaaagtttctgggaactgcaaaccacacaaaatcaatcaaagatacaaatgatcaacaacgatatagagtgacttcgcaatctgtgtaatcaaaatcgttactttaaacctaaggaagcaataaagtaaaaccctagattccaaatcaaagagactaatcgaatcaaaaaaaaaaattggattagacttaccaacgaccttctcttcttccgaacccatttggctgagatgattgtagtgaaattacagagtagtatctgaaggatggattcggctagagaagatgaagaagaacagagaagagagaaagagagagagtctaacagctactgttcatcagacaggatatgaattgtgaaaaatggaaggaagaaaaaagagagagagttggtcaagtgcttctagtcgtacagtggttgtattttgtaaccccactttttctccaccacttccaacaaatgtataattttaatttatttttttatgacttcgtaaagtttaattaaataatacgaaaattattattttgagaattatttgtactgtcgatatctcattattgaaaaaaaaaaaaagcactatgacaaaatatgaaccaaccataacaaagacaacaatagatggtgtagtagtggtgcttcttgctttgttttggtggttgttgtttacgctctgttttgacttttttgctttgtatgtatgtagttggagttttcaacaaactctctgtttcgagtttcttttcagacgaaaaaacaaatgtccaaatcaaaccaaccaatgaaccaataataaaacactagaagaaacaaacagatggatgtggttacaaatttataaattcaatttaagtcgatctatcttgttttgaaacaaaccaatcatccatctctccatcatcactaatgttaccaagaagttcatttcttctccgatcataacattttgactctgtttcgttcttcgtattatcatcttttttcgctttagtcccattgcttctaattctctgtgtcatctccaacttccattgctctctcttttctgcgctctttgaaacattgcttctccctccctctactggaaatcccatgaaaccatcttcttcttcctcttcttcgccattgcatcgttttacactctcttcttctacaaagctccacgtctttgtaactccgctttgacgatcagcaactgtctttgaatccggagtgacgtttgcagccttttgtctcttgtgatcacacttcaaacatatagagtttcttctaaaattgatgtaattgcacctgatgatgtatagaaacattatcaatttccaacaacgatcgccagattttaagactttaaacagcatttagttttaaggtttaaggaggtgactcacgactcgcattcccactctccgggattgatttgacgcaatgtaggcttgtctttgcaccttaagcatctcgtgtttttcgaaaagttcaggaaattacatctgtgcaagtaaaacaaaaatcttaaacatgttttcatggttttaatcagattaaacactaaccgatgaaacagtttgtcctcacgtttgacaaatccaatctcctttcttcagtgggagatgatctttttgttcttccttcaactgtttaagcctttcctcagaaaaaacatcacatcgcaagcatcttatgtttttcgcaaaatttagaaacttgcatctgcccagttcataatacaaaaaagagcccaaagattaacatccctgaaatcgaatcataaacattaccaagcaatgcagtaagattacttactctgtacaataccaatcccctggcctttttcgtggatctctttcatcaatgtcctgtgaatttggctggagctcatctccagctgtctcagtctcagcagattcaaaatctgttaagctatacgctacactttctctgagcaacttcctcacagaatcttcaacaagtttggtttgacaggcacgattctcaacagtaggagaaatggaatcaagcccataagttagcagtaaacgcatgacatctatagttcgagcaccttcatcatcccgtgcttgtgcatacgccctttcacatttccctctcaagttgcaggagccacacacctactaagtaaatgtttaagctttgttaagtaagtttcaattaaaacctcaaagagaccatttgatgcaaactaatataagcgtgtcaatccaaaaaaagggtaacacttagtgactatataaagaagtaagcatacatttccttcatcaatgcccacataagctcttagacgctttcctgagttcacgaccttcctatcagtgcttggacatccacacccagcaatcactttgatatctttcttcgacaagtttctgcaagtaacaatatttctctgaattttcaacaatttcaactaaaagagagtcctttagtaaatggaaatcttaaaagaaggatctatgtattatatttatctccagcatttagtcgaacacttggtgagcaacattgaatcaaattgcattacctgacgagagtgaaacgatggcgggcgaaattgagacaagctgtacgaatatgattagattccttggaactcatcaatggaatcaagctttcttcaaagtaaccttttttagctagcatccccattaaatctagccactcgggccacgggtgcgagcttggatcaaccaaacctggtctagcgatctcagcgttttgggttttagctagaccgtggaatggtcttgtgtacccgatgattcgatggaacaatctatggtcggtcttgaagaatctcaacatgagatttttagtaggtacataaaagtttagttacaaagagatttttcccgagaaagcaacgaaactcaatgcgtattagttaagattaaatgtacaacgcatggacgacttatataaacatttgtcttaacaaatacacactgattttgttgctctctatgaaataaccatagtcgataagtgcaagaatttcttagaaggcatgagacttatttatatgcaacttcattacaagaaaatgtaatagccattttttattggaaaccaaagaacttgttaaactcgtattgggaaaacagaaggtcaatcgttttgacttcctattggaaatgaaaagaactttctgtccattttatctattacagcttcgatattgttgggtgggtttgttacatggcccatataagagtccacttaggcccaatctacaaacgatgttattattatcaacaatcccattacatggttatggtatacaattatacataaacaactcgggaacccacgtgtagtactagtaacacgtagaaggtgaaagaaactgccacgtgtgaaattgaggaccacatgaaatcgccgacaaaggaccgccgtttcccgaagagaccacccgccgccgtagaagagcacaagactttgaggagctagtttcaaagaagagcgccgataagaattcttccgcaaagctttcaccggatttcaactccgaaagcggcgaaattttataagaaaatggtagaaacaaaacaaaacaaccataagcacaagaaggattagaatcaacaccatcatcggaaaacggagaggtatagaggaagaagaaagactgaaagactaaaacccggttaaaaacagaatttcaattgcgctttttagttagttttaaaccggttacgtaaatcttaaaccatactaaaccaaattggttcttggtttataacaaaaaaaatatctgaaacgtacagttcaagaagagaggaaaaaaaatatctttattgagtttccacgtggctcatattcattggattttcataaaagaaagaaattgtgtactggtaacactaaaaattcccaaggacactctttcaccaatcacaaaaggaaaaaaaaaataaaaaaatctagcatcatcatcaacatcatgatgatcttttacatctattggactcacttttttgggctaatatatatgaaactgatcctcacgttattaaatataattccgagaattcaagacttctatattgttacaatgtttagagagattgtttcaattgttgatgaagtataattggttatgacttggacttctatgaacgtaacatccattgttacgtatagatctctctacgcaactaggacatgtttccggagttgaaggcgatggaggagaacgagagcgtgattttgacgaagaagatgacgtcgttgaaggtggaggagacgagtttgctgttgttctcgttgatttaagcggagaaagaaagacgtgaatcttaacttgcgctgttatagcgagatcgtattcctccataagattctttagatcctcgtcggatcttaccgttacaagcgcgtcaagatcatctgttggtaactgacatcggagactagtcaccgcaatcccgcaaatctcaccgagcttcttctttagctctgttaatattatcaaacagataaccggtgagtgtgctactagacggctacactaaccctagaattcgtagggtgataaaaaaaaaaaaaactgattaactaactaaccggtgaaggatatggcgcgagtgacggagaggacacgtgtatcgccgccttgataacggagcttgccgtcgggataacgtggggtgattctgccaccgtagctacaaaggaacttgacggttgttgtatttgggaccatatcgtttttttatgcttagttgaaaaggtcggagttggagaaggttgttgtatagtttgtttttcttaaagccaattaactaatgttcaatcgatatatatagagagagaggcttttccaagaatgcaaaggagtgtgtaaagcgtagatatgtataaaattatttattctctgttttttttgtgtgtcgtgtaatttaattacaaaaaagctccaatgaaaaataagattttgccgacgtaatttttttctttttggaatattctctcatatgaaaacaaaaaacaaaaagaaaatcataggactattttgacgcgtgttataaaatgagtggagtttgaaggacccatacgacactatttatgttaaccggtctcgctcgaccatcggcgatttttgattttactttataggcaaatatgcagacaagcttgattttacttaataggtaagcaatatgttcttgaacacaataatgtgatggtaaataaatgcacacatgtaatacaacaaataagattatgtttgtttgataaaagtactataatatagattcttcttctcttatatggttaaaatgatataattatcgtagttcagtaaaattctagatattttttcgtatttttcttttacacaaaaaaacataaatgggaaaacaaataatatattttgctatatttctttctcctgtcaaacaaaatatttgatattttctattgacgtaggcctctcgtcttgtgcaaccggtcccttgaaaagcccacaacgaccatgaacatttgcattgcaatatcaattttttttttcacattgcaatatcttaaacatcttgatatttgttttgataattgaggagatattattacatgatgccacatagataatccgatatataagaggaatcaatcgggaaataacatttgatgtttgtataatgataatccatgtttattttattacttgattaatggttaatttttttttttgattttgaacatcatatatctaatctaaatttgagtaatgtataaacaagtgaaaaagaagaatgtataaacaagtgatttatcccatttgtactgtttttgcgatggtagatgttgttgtttagacaagttcacatgatgaagataaattcattatagactactctaaatctcacaaaaagatttcagaacttggtttcaatccaagctcttcaaaaactaaagttttactgctactgatgcaagttgtacaccggaacagaacccataagtagtcaatgatataattgataaagatgtggtaatgaccagaaaaataaaccgatcagttcgaaccaaaaccaaagtaaattttaaatcggtttttcaaaacacgtgatgatcacaaaagtgatattttcctttataaaaaaaaagataacgaactctattggcccctgaactaaattgttggattagtgtggggaggacgattttatttagttgctcatgttcagtttttttttttttttcaaaaggataagataaaaattttgttattagacacagaatttcatgatagaagttttgtgtgagtctataaaataaaaataaaatttactattataaatctaattgaatggtttgaaaagaaaaattaattaaaatatataaccatccggtaactatacaatttttttaccggacagaaaaaagagtaaaaagtaccggtaccgaaaattgatttgttggcaaaatcataaaagttcaaaataaaataatttttgttacaaaagtacctaaaaaccttaaaattcttaagaaaaaaagagagttattttcacaataactttgggggagaaaatgcacttatgagaaaatgatgggacccaatggttaggtctttcacagacttgttatttactgaaacagtgacccttacgtaccaaaacaaagtgacactattttgttcgatttatagattggttttcaaagatattcgagtggctgacgataatataatctataagactttaaacaatctttgtaagacttacaacattattagcatggagagtacaataataaatataaaaaatcaaaatcaattttatattgtttcatctctggctgccaacaatattttgcagtttacaatttcatattcctaaaactatttttcatacaacaatacaataaataaacacaattttgtataaactatatccaatagaccataccaagagccgttgaatgtcccatctaagtatctaacttgtataaccttgtcatctctacacacacatcctcatggatgcgtcatattcccatagacctttcatcatttggcgttcaagtttcttcagtctcccgctaatccagttgttgtgtagaacaaagcaatgcttcttctcgcactctgctcttacgtcttccttaagccatagatccccgtaagctccgtttgggaatagctctctgtccaagaactgaacagtcagatttgtctctggttcaacacatctatcgtctcccaagcgataagctccaccttctccgcataaagtatcgtagaagctaggttgctccgaaagaccggaggttgcagcatgcttcaccactttctccatcgctgctatcgtcgggctatcagaacgtgcaaagtagaatcctgagttcaagcgccttggtcggtttatcggtgctgcaaaaccaaacaaaagccaaattcattagtattttataacaaagttggtctggttgatcagttcatcatcattacctgttgtattgtattcatcagattgtgctgcaagaacagaaggaccgaaagactgaagcagaggcaacgggtttctgaaccaatatacatctacatcactcaagagaacgttatagcccagcttcagtatcttcaaaactgttcttgacttgactttggtcactctctggaaacactttgatccaaagtggcagtcattgaagcttatgttctttggagcgtatggatcaaagaaaactggcagaccctgcataagaccaactgattataaactctctaatgacctatgatcgttcaacgtagcaagaaagagaagcaaaagacattttttttacctgcaaaatagaaaactgataagtttcatcatcaagggcacaaactaagaaatttggaactttgaggcggcgtaatctgcagacccaactcatcagcatgtccttatagctatacccagcaactgaaagaacaacagttctgtttttgtctgcaactaatgggagaagagactccaggtcaaaaggaaacttcaatggtggcactgtctcatctttctgcacaaaatctaatttcaagctccgcgatttagttctagtgatacaagctgagatcttctctcgtgtccgaaatcctaaactctttccttttggtatagacagatcagtggaacgctctgaagcgctaacaaagatatagcgtctgttgcacttcaaaagcttaggtagcgtataagacctagagtacaatgaaccatagagctgcccaagatgggagtttcctacatattcccagtttctcgttttgggttctgagacattatcactcctattgtatatgttctctgcattgcctaggaaaaagctcgatatggttgaagtggcatcaaacacaaaccttcttttacatgacatagcttcgttaatgatccattgattatgagtacctctttgatacaaaaaaggtggaagcactccacagtgcaagggcatatcaatgttgttccatgccataatcattttgcttgcgctagaatttgattgcaaactccgcaagcttatcatcttctgcaactgttgacacgaagaacaacgcgatcaaaatttgattaggggaaggatcagatcggatcattatcaataaaaacataagtttcctcctccatacctccctaaatctcactcttttcccattgtcctgacgccaaaaatgtctagtttcatcccaatggaacgggaaacggggaatttccactgatgaagaaacaagaagccaatcacgaccaagctcgtgagcataactcaaagcagatatgaaatctggcagtaaaacagtctctggatccattagaacagctatatctgattgataagcttcaattctcgacatcatcgaatgtaaaaatggagttccaagaaacctaacaggtaaaacaaaaaccaagatgtcacaatgacgaaatcttcccttctaataatcacacttaaaagccaacaagtgaaaccagaatcagcaacagaacatgacaagtcagagaactagagttaatatagaaacaaatggagtgggaatagaagagccttacgtgaaatcaatggtggaatcaagaagaagacgagaaccaaatttgtcggtgaatgaagaagaatcagaagagtggttgttgttgttgttgttgttgttgttgttgtgttgagtgaataaaacaacagtgatttgggaagacaaagcgagccatgaacgaagagcaagtaaagcttggctattttcttccaaggaggagacattgagagaagtgaaaatggtgattcttggagcagcagtagcaatggaatcgccagagtatctaaatgggtcattgagtgaagttggagatagaagctgagtgccgtagaaagagagagcgattagaagaaacccagatagccaaatagacaagagcccagctcgaagaccctgtaagattgagtcatcaacaaagtcaaaaacttttcagaaaattgaaacacaagatctcgaaacaagttgagaatggaaccttaagcttcatgggaaatcgaaagaagaattgttgaatgaggagaagaaagttcagaaaataaagacaaaaattaaaaaaatggagctttaacggaaaaaggaagaaaatggagaaataccaaaacttcaaaatggtgatgaagcggaaagccggcgggaggaatggtgaagaagaagaagaagaagaagaagaagacatgtgaacacttttcgtcatcttcaagaaattgttttcagattttaacatctcttcttgtcccacactaaagtaagactttttagggttcttatttttagtgcaattcgccaaacaattaagacatttttgacttcagacattttttgggacacacaacacaactcttatcttaattagtttaaaaatataaaataactttagttaatgcgatttcattagaatgtggaatgtaaagacatagatttagataatgcaatgtttcagagggaacaaaattttacataggaacgcttaaccaaccaacgatattgtcaaacaagtcagtcaaaaatctttggatatttcttctgaagaactaaggaaagagcggtttactatgcactatttcgctcacaaaccggtgactttatagtttttgattatatcgatgtccgtccagtacattaacccaatcctgtgatccaccgcgcacaatattgtcccgggtacagtctcagaccagtttgctagagtgttcatttacgatggcgcctgtggggggatcttgatctggaccttgaccgcttcgacctgtatagcaaatcaggtttgagttccattgaataaacaggaggagatatagaacactcttttgcttttttaatccagctttatccacctgttaagacagaagaaacagactacatacctggatttgtcatgagaagagtagagagtgttcttgtgctgagaatgcttgctatgtggtgaccgcgaagaaacatgtctatacaatcaaaacatatatgatactttttgtggtgagttttcttactagctactccgcttggcttacccattgtctttttgtcaaactttttgctttcaatagttctttaacttcacagagtctagtgctaatatagactaacaaacatatagaagaaacaccagtgatctcataatgctaataggtttagaaagctaccttcttctggactttccgggtgatggtgaccgattctttctttttgaagatgacttcctgaagaaagacaaatagttcgttagcattagacaaaagaaacgcaaaagaaaaaatttaaaagcagaacactctatcgtcacctttttgaatcatcagaggattcatcactggatggagaagagcgttttcttctggacctcacaggagatggtgatacactccttcttctagaacgggacttcctggagaaaggtaataggagaaccattgtgagcattgagaaaaagcattagacaaaaaaaagcgaacagacaaactaaaagtagaacatcgaatgccacctcttcgaatcatcagaagattcattactggttggagaacgtcttcttttgtccttgctcgagttttcagcccgcctgtgtcttgacctttcttcttccttttccttctcttttcttttaccccggtcttccttagaattagttctgtgaggcctctctacatcccttgagtctttctttacatggggatcagtagattttttatttgattcaacgcctttaactttctctgctgactttaagtcattttccttcattctatcttttgagtcattctgagaatctcctttctctttcccacctttcgtttcaactattctacttctatctgtactcacttcgtcactcaaatctttcccataaggtttattactatcctgacgaaggttgcaatctgatttcacgccagaattcttcacgtgaggttcatctagtatggcatctttatcactatcagttctgtcaggatgctcttttctgcttcctgaagtatcatcatcaagtccagagctggcgcttacatcagatattttggtactacccgcctcatcatcttttctcgtggagcctggcatctgagaataatcctccaagcctgacttactattcttgccagaattagcattgactccaactgctggatccaatttcgcactggccattgcttcagggtcaggaagtttctcagtgcttggctgctgactaacattgtgtcttgaccccacaccaagactctccactccattttcatcagcattcgcgtcagaagcagcatcagtatcagcatcatcatcatcagaggcatagctagcaagacctagcacatctgctggagagccagaactagcttttgtatttgcaccttctaccgagaccaaaatctttgccgaagccttgtggagtggatcagctgtggagagaagggatgatgacaatttatgattatgctgtacactatcatctgaaccatgaatagcacagcataacagtacagaagaaggtaacattcaggagttattccacatattaaagacataaaactaaatcttggagaccacaacaaacctttaggtattgcttcatcttcgttaatgactttggttgcaatttcatcaaataattcatctgtaacctgttcaaaagacatatgtcaactgtagcagaaacatgtttatagaccagccactcaagttctaccaggccacataccttaagaaggacttctgtcaagatacgctttatctccatattaatttctgtggttctagctgcatccatctcatcctatatgaagcaaaccatgcattttagtgatgttactggatcaaatttaagtaccaagagcgcttgaatcgtcaaaacaaaacaagtgttaaaagttcaaggaacctcttcttcttcgtcagaggaattagaggggctgaagctttttttgtcaggctgatcagctttcgtaggaggtttataaagtacatcatcatccatagattctctctcctcaaatctccctgaagaaggccttccaagatctgcttttttcttcaataattcttccttgagccagttaggtacaggagcctggaaatcacattatcagccagaattcatggaagatacagaactccttcagaaaaaaaaaaatcttacctttttaggaggaacagacgatgctgcatatgagtcatccatgaatgctgcaacagggtgaagagggggctttgtcccaaaagcatatgggggtccaacaggctggggatttggtgggggaaaccttccatatgggggcatgatatgacccgaaacaggaggtatggccatagatgagtcatgctgcaaagagagtaaacatcaaacttgcctccaccaaactaatacagaaacaaaagataaccaaacaactttagagtacctgaggtattgattgcgccgatgaaggaattggaggatagactactccacttgtggtatggggctgccatgcattgtgatcactaaagttactaggtggagcagctgattgatctccatatgcatattgcatatgctgctccgtgtgaacaggtcccccaccatcaggcaatgatatatgcacctcatgttgtgttgtatttccagactcttctttacgtgcaaacagagtaacaagtttaagttctgaaggtgtacagagcttatgagttaccaatctctagaccaacagaattgggaaacataggcacactgatcagggagcaaaatgcaagaagaactatgattagtaatggctaatctactcgtaggatctatgggttaatctggcgagccacagcacatcattatgcacatgatttatcatgaaccgaagacacccgcggaatttcgagttacaaagaaacccacatagagtgcttgactaggagctatgttctaagtaaatggttacctgctacagaagaataactataaggtacctcctgctgatgaattgcagaactggtaggcaggttttcttggggcaatccaactccaggaaagctctcgtttcctgttgcgtaatttggatatctctcgggctgtgttgtgggtggaactggaaactgctgatgctgctgatagcttactcctggaactgcctgttgatgaaaatcttgatagccatgagtaggatactgctgctggtagacttgtccgctaggttggttcggtgcagactgctgtgattgctgatccttgttcgcagctgcccattctttggctttcacagcccagtcctcgacgttgctattagctgcgatcacgagatagtcagaaaccaaatccataataacatagatggcgatgagagaaagcaaaccttgaggggtgtgaccttgttgttgttgatacccccaatttggattgccccattcctaataatgcaaaaccaaatcaaataacagttcgacaaaggggaaatacacaggacaatccaacgacggagtaacctgattagcctgaggatatggcggaggaatcggcgcaccggtagatggaggaggaaactgactgttaccgttagcgccggcgttgaatggcggctggtgaggaggataagcgggagaagagtaaggttggccttgaggataatgcggtgaaggtggcccccactgcggcggaggtggaggcggtggcgatggagagtgagggtgatgaaattggttggagtaccatgcaggaggaccaccgggctgcgtaggaggaggcaccggtggtctcgcctgatgctgatagtattggtggtaaggatccgtcggaggcggtggtccagacggcggtctcaggtattgaggtggtggctggtacgcgtccattagcagcaaggtcttgagtccttgactcttgcgtttgagatcgcttgcttgcttgttctcgaattgataaactacaggtcgtcttcagtggtttccactttctataaattttcgtgctttaacaggaaatatagaaacggcaggcagtttatgtcaactatactagaacgacacgatttgtgtgaaataataagaattctctatggttacactttacataattttgccattacatatcgtcatgaccattcaaaaacataatcatgactatttcatgaacagtttagcatgtgtaggatcaatcataagacggcatcgttttgtctcttcgtcaatctcgcgtataagccatctttgctcaaaagttctttgtgactgcccatctgttttgtgtacaaatataacagtcaaaatcaaagccatcaatggtttctatgtatttatcaaaaccgtaagatagtggcttacctcgacgactcgtccactgtccatagccactattctatccgcagcttgaattgtagaaagtctgtgaaggaacagaatgttataaatcaatgatcaaaacatgtaaaagattggatcagtgcaagaaaaagatacctgtgtgctatcactatgacgcttctctttgttgctgagtcgtttccgatagaacgaagtacgccctggaaaaacaaaaggcttaagaattcttgcatccaagtaatttgtctttttggtaatagagaggttaccttaacattgtgttcgctctctgcatcgagtgcacttgtggcttcatcgaggatgaggattctaggatctctaaggatggcacgagcaatggcaatccgttgtttctgccctccactgagtagatcatcatcaacaattgtgttgtaaccattcggaagtgctgtgataaagtcatgtgcataggcttgctttgcagccgatattatatcttcttgcgatatattacgatcacatccgtacttgatgttcgaactgatgtctgtgcggaagagctttggttcctgtttcattgtgacagctttagaaagggatagtgaaattcatcaaagtttatttgttctacaaagacgaaaagcgaggagaacctgccccacgtatccgattctttgcctaagccacttgacatccaactctttcaaaggaaccccatctagtagaatctggaattcaaaaagccagctattaagaaggaagactttaaagggttattctacagtgagtttgagtaacctacagtacctgaccacttgttggttcgtagagttgcagcaaaagattaaccagtgtacttttgccactgccacttagaccaacctaaacaaaacaaataagcacacatatcacttccgctaaattctaaggaaaacagttgcattgttgaactactttgagatttacttacgattgctaccacttcaccaggatgcacggaaatgtttacgttttgaaccaccgctacctgagagattgacatatgatataattgttatgaaaaactgatatatgagccccagtgccccatactataaacatgactggaaaactctttatgatgtgtgtgcataaattctaatatactcaacaaaaatgtaaaatgatgcaaatgcaaaaccatatatttggccattaatttgcaacattcacacaattgtaaaacgttggaagcaaaaaactgtggttcaaggacattcacacaattgtaaaacgttggaagcaaaaaactgtggttcaaggacattcacacaattgtaaaacgttggaagcaaaaaactgtggttcaaggacattcacacaaaagcaaaaaaattatcagaaaatagattccactcggtacagtcatacctcatctcttgaagggtagctaaatgacacatctacaaactcgatatgtcctgtcagtctctgcagtctcgttcctacagaacagtatataaataaaaatacattacatggtagagcgtagcaatcactataagcctccaggtaggaagtccaaagtcatatactcttaagtggttcatcctggaaggggtttgatagtaagagtaatatctactgataacaacctaactcactctctcatcaatctcataaatggtcaacatgtttctaagacagagtgctcttagccaaaaatttgaaccttgccttttgatatgaattgatcacttggcttgagatccatcatttggaaaaccttttcacttgctccaaccgattgcatcaaagatgataaattatctcccacccaccatgtagcatagattaaccactcactatacaacagaaactttgtcagctgctctgctgttatttgaccagctaagatagacaatcctccaaccaggacagcaataatctataagagaagaaaagaatgatggatcttgtcacattcttagcatgagcatcaccatctttaagaaccacaaaattaattgatccttcccacaaacagtcaaaagagagaaataaagcaaaacaggggttatatttgagaaacctgagttgcatggtatagagtgttgaagctccagttccaaataccatatgcagcactctgtctcaaacttatatccgccaatctctgaagccagtgattgtacctttccaccacagaagggaagaaaatccatgtcaaaaagtaacttggctgccaaaaatagtcttgaaacagatagggccgatattgcaaaattttcacaagataaataaagaaaaaagagactgtcaatggttttcatggaaacagatcgcaccttttaaactcttgcttctctgtcccatatacacgaacggttctcatcaaagagtatgtctcttgagcgaccttgaagatcacagagcagttattaacgaaagaattcattgcatataagacaagttacgataagcgtttttgagcaatctacttcatttgcagaagctgtgatctcctgaattagcttcgctgtcttcttttggtacctacaacatgaccagatggcttaagtatcagtttcagctgccaggtgtataatcaattatatcttcacagattagtattcttaataaaagtgagacaagttttggtagaatctcacatcccataaacgaacataaccgcagccaaaatacagcatatcaccaatgtgcacagcccaaggggccaagacaaaattagcaaataaatcaatgcccctgtaccctaaaagaaagaaggtaaacatacattcagaagtcaaccatgcaaaaaacacacttcaggcgagatggaaattatattgtagcagaggacctgaagaacattgcgaaatatcatgttcagatcatttccgatgaccctcgagacttgctgacagtctgagccaagtctgcttgttaagtcaccaacagtttgagagtcgaaaaatgatatatcctgatgcaaaatccagccaagttaacgaaagtagctaaaaagatattaaaggtaaacatgagctaccaagattcaaaacagctagaaactttcaggacctggaagagaagagtggagtatagtgtttccctcattcgtttcacctacagagtagggtgagatcccatcatatcatgttctgagaaggtaagactactgagtagatttaagcagaaaataaaaaggaactcacaagtatcatgttagcaatcccaaagaagcatcctcgtatgccactgaaattatgagttgaacaaagagtcagatggaaatccttttataaaagaatctcaaaaacaacaagttggttagacagcaagagtaactctctaattcaacttgaaaccaaataaaaccagagacaagtgtttgatcatacaagatcttgacctgcaaatgcctgaagtaacacataacgtaaccaagagcttgacatttcgatgaaacacagcgatatcaccactttgtgccgagaagatcgaagctgttaaaaaatgcggaatagttatctctgaaagctgtaaacaagtaaacaaaatgtataagaaaaggacgattctgattcctcattagaactaagaatttctaagtagagattcagaatacttctacaaatacataaccaaggaagaaccacgcaccgcggctactataagagtggaaaacgcagcgaagataacccaacgatcctcagccacaagttcccacatccgacttaacgcacgccaaacagtcacaggcttagcaatgaacctaccatcaacttcatcggagaaactccaccagcttccacctggtaaaatcgtccggaggaaatcaatacattgccggattttctcagcaagtgaaacgttatctccttctccttcgtaatattccgcagtttccgctactgctccattcaccgtcgagcaattaatcgaaggcagacgataatttctagttgaagattgaagagaaaacgacaatctcgggtttctaacgaatcggagattcttccttctgatagtgtcactggtggtaataacagaacaccggtgaagagaaacgcggatggggcggctcgtgcagccgagtacttgctgagccatttatgttcggtggactaaagatgaagaagcttcacgagtcacgacgcttcaagctttttccttggttcatatgaaatgcagaagaagaattaaaacgcgtcgtttcgaaattgaagaagaaagacgtcacgtaaggaagaatcgtgtcaaccaaaataaaccgaggtggaacccacggagatccaccaccgaaggcatgaaccacatggtaacaacaacaacaccggcgcgtcagaaaggcgcgtgaaggttcaatcatgtggttgtggtagatgatctctcttccccctctacgatataatcgggcctaaaggcccatctcgcgttataactaaatagcccaaaatgtcgtaaaccctagagggtaaaataggaaacgtaaaaatccttatcgtctttataaactcagtgatatcttaagaaaccctagccgcaaagagagaaagggagggaggagagtgtagcagatcggcgaaaatgacaaccagattcaagaagaacaggaagaagagaggtcacgtcagcgccggacatggacgtatcggtaagcaccgtaagcatcccggaggtcgtggtaacgctggaggtatgcatcaccacaggatcctcttcgacaagtaccatccaggttacttcggtaaagttggtatgaggtatttccacaagctgaggaacaagttcttctgcccaatcgttaacctcgacaagctttggtcactcgtccctgaagatgtgaaggcgaaatcaaccaaggacaatgttccgttgatcgatgtgactcaacatggtttcttcaaggttttgggtaaaggtcatttgcctgagaacaagccgttcgttgtgaaggcgaagcttatttcgaagactgctgagaagaagattaaggaagctggtggtgctgttgtgcttactgcttaagttaggtgaatttatttgcttaactctgtttttgaatcttctatggagttttatcatcttttgttgtcttttggattttggaaagagcgagatctctttaaagttagtagttttatgaaccttttgttggattttgataaatgtttggtattccgaattcagacttataattgcgtatgctggtttaattgtctgtcatgattcattcgttacgatccttttaactcgttgtgattgtttctaccatacatatgcattgttcttgttgaatttttaattggatgttcgattgtcatcaaagtgagaaggtgttgttgcatttgattagttatatgtaacgttgaaacagctagaatgtgattttgcttagtaatgtatttacgtaaatatgcggaaatgcatttcaaatttcccaatagtacagattgtcacatagatttgaacggagtcaacatagtcacatagatttggacgaaaaaataatgtgtttggatattatactgtatccatcgtgtttttgatattcttctattttgaacggagttttgagattcaaactttattttcaagcaagatctgaagaaatcgttgaatttttcaaatggtacgctcagtgtcgtgctatgagaaatgatataccgtatgatatttatcatatcgcatatgtttgggataagcttggtttacatgttattcatataaagtttgtgttttcaaatcatcattacttgtacactacaccatggaacatttcaaacccacaaaagaaaaccaaaatcgaaacaatctgtaatatttattatcctactgcaaacgcggatttacaattttggtggtattgtgtggatacaaatttatcagtcgcaccatttggattaaaacatgagtacgaactaaaagtagaaatctgaaataaggttttgtcattgatacattgtcaaattggaatttaagttatggacatgtaactagccaatcactagacctcactgaaataaatgataggagtcatcgagtaactggtagaggacgccagttattggcttggtgtatggcatggtgtacggcctgaccaccaaaagttgcagaaagctgttggtgtacaacttctttgacgggagtagcagctgcttcgccaccacgttcggcaagttctaagtaaagcactgacttcagcatctccccttcctgcatcaacccattacattcattacttacatatccaaaccttctcataacctaaaatcgaatgaactcattgcgtaatatgtttgtttctggatatacataagtcgataagttatccctattactactaagagaagtagactctcagaagcagtagttgagttgaggtgcttacagaaaatagagcaaggccgtgttcaaactgagctttactgtggccgtgatcagctgctcgtttcatccattttcttgctagcttgcggttttgtggtaagccttctccaaccgaataacaaagcgaaatgttatacatcgctcgtacatacccaccttctgctgcctttaggtaccatttagtctgtcgaaaaagagaaaaaaaatccaatcatcatatcgatacaaactttactgattctagaaagatgaaaaacagaaaccgcacatttccacaaatgaactaagcacatgtccaaacatagcattatcagcttccacaaatgaaccaataacccatccaaacatagcagtatcagtttccacaaacgaactaagcacatgtctatacataggattatcagtttccaccaagagtgcagccattagtataaacgactagatactactttcaatctagataacagcttcacctcatgaaaacaatatagaatctcaactagaagcatgaagaaaagaatcagaagaaggcacatacagcttcaagcagattggtttgcacgacccgaccatggtgtaaacaaagagctaactgatactgtgctcgaacataaccattctctgcagattgtttcaaccatttcatcgcttccttgggatttgaaggttgaactgcagatagaagcaatcaaattgctcagaaaaaggctccacaaattcatcagcaataaactcatccatcaagtcaaatccaatttctctataaaccaacacaatccagaaaaacattaatcaggttaagaataaaaatccaatcacatcaatgagagaacttaggttttaccttgaagataagcaatccctaaattacattgaccaacagcatcaccaagctccgaagctctccgatacaaattcaccgctttctccttctctcctctttcccaatacacaagcccagcgtcgaccatagcgagcgtggatccacgcatagctcctttcagaaacgaatcaagagctttgtcgagattcgctcgcacacctcctcttccgtgcttgtactttttcccccaccgaatcaacaacatcgactctcgcaacggctttagcgcgtctctccacgatttacataccaaagacgccgcttgaagattcggatgactaaacggtgcagcaatcttcatcagtatatcatacggaagcatcgagaaatctccgaactcattcgatggaggacgtgaagaagaagaggaagaagaagaccttgaacttgtggttgacttcgccgttgctttgttgattgatgaaattctactccgtttatccttgtcgtgaggtttcaaaaacgataaggaggagaatcgagatccttcagatctacaaggccaggttctctgcttcatcttctccggcgaaaaataccaccgtcggtttcaaagaggggtaagtaaacgattcgctttttttttttttttccgcgtatgtgccgagtaatttatttttcctttttgttttttagttatgtggttatgaagatcggacggctatgtgatatgagacagttaatcaacgagactacactgtgacacgtggaatacttaaaccgccaagaaattttgtataggatgatgagtgaaccaagctaataaacacgaagcattaatattagtttttgggctgggcctgcaatcttctgtgtaccttatttaaaatcatttggacaaaaatcattttcatataatatgtggaaattagtctacaaaaatcatggaccagtaaacaatgcatatagcctgagttttttgtcagtgtactgagatggcggtgacggagatcctattgtgtcgttaattatggatgatggtgatgttttttcactattttgttgttgctatgagtaattaatttggatatgaagtttttgctattaaagaaaatgtgattgtctaaagtttcatattgtcaaaaattgagaatttgactcttttacttgtatgatactattacttctctggaaaatattacttgaaaatctccaaaaaaaaagtcaagaacagatataaatctcccgtgaaacaagagtatgaaactggtgacgttataaatttgtaattgcataggattccattcagcttgacgcggcctattcaattttcttaccattaccaaacacgatattgacctctctatttagactcagtggacagtggtttgttgtgtggccgtgtgggtcaacttttccaagtttgatttttccacaaatgttaatctggtcacaatctaagacttgtttcactggagaaaaaaaacatagaatgggttcaaatgttttctatccagtagctgaccaaagtatgaagaataaaatgacttaagctaagatttgtccattcactaattatgaaatttattcttgacttttgttatgaatcatagatttagcaagaacattcatagtacgatttaatcttaaagtaactctatagtttgatgcaagtatatatatcctgtatcaagcttgatccactcattaacccaaatctggtttgcaaacatcttgtacgaataaaagatatacatatatatatatatatatatcacttattaaattaccaatacgaatttatttgatttaaagtgttaagaaccaaatttaataatatcacacatgatccatcaaaaaaactatcaaagaaaaatattcaaaacaatatgagttagttcttcttcatcattggtcgatattaatactaattctacccaaaactatactaaaaagggaagataatatcctatgttaagatgatagttaaaataaaaattgaataaaaactcctgcaaattattcagttaataaggaattaactaactaactataaacctaaatatgtatcaagaatcatctgcaacgttttgtgttcttgcgaagaaagtatctaaatcttgaacgttaaaggatatattcctttgcccgacggctttttggcgacgtttttcgatttttttcttgaagatgcgtggctccggtgccagaggacactcaaatagcggcggaattctaaattcctccccctttggagttgtgaatctatcttcttcttcctctttcttttcttgttgttcttctttctctggcttagaactcaccggagctttcaccgggatcctcactttaagcgacttttcaggaaaatccatgactttgattcaagaaattcaacaagaagacctaaacgaagatggttgttgaatattcaactgattctatatataagaaattgttaaattttctcttaaagaggaaaaaaagaaagaaacttttaggcgggaaaggttgttttcttgtgtttcttctcgggtaataagtaaaaactcccaaaactttttctcggaaaagaaaaaaagaagagaagatttgagtttagggctttctcttattctctgtgattgaagctgaagaaactccaaaaggaggagtcaaagaagaaaagaggtttggaaatttttatactcggctacaattttatttaatcatgattggataagtgctatactttatttaattatatttcttactttaaaaaaaaatgtaaatattgacggcggagaaagtttatattaaaggaaggaattctattggatgcaaaatattatcgtatataataaatcattcttatgatccttaattccttattcctaagttttataatatgataatgttgtccacctaataattaaataaaccatttaccatataattgaacattagagatttgtgtgtgtgtgtgtgtgagtcacacaaattggtaacaatagatacaaaggttttaagagcaccaagaagagtttgacacagagtaggaccagtacttattgctttttaagagtgtgaatagacaataataatgtcgtgaaagaagaagaagtgatctctgactctgactctaagtcctttctttttcacattctggagtaaccaaagttatcagcgtactgagacataaactcatcattgaactttttgaaactgtccataatctctggcatttcttcttctgctggcagaattgttgtccttaaatgaaacaccctgaaacaaacagacaaacaaaaatgagcttgctgcaagaataacatgaaactgtaaaacacagagggtttttttctacccttctttttgtccaaatccagagcctggaactgtggagattcctgtggcttctaagagcttaaggcagtagaaaacgtcagggacttttccggcttgttttgctgcttggattgctttcgacggcaactttatttgagggaatgaatacatagcaccttctgtgaaattacagacgacgtttttgcagctgttgaatccatcagtcatcatccttgctcttcttctcagtgattctagtattcccttgctgttaataatgttccagtgaagttcgatgatcgtgatccttcattcatcaaagcgtgtttatttagagtagaatgactatatatacctctcacgaacgaattggtcatatgaaatgtctccaggctttggtgggctaaccattaaacccatctacacaaaaacaatcaggtttcagcagtgagatcattcagtaaccagaacttgctaagaaactaagaagggctagcttacaaatatctgcgcagagacgttggggctgagagctatagaggccaccttgtatatctcctcaacggtctgcattaccagaaattaaaaaggctcttgcaattaccaaaatcacgggtgaaaaagagacggtcaggtacaaaccctgggagggatatttgtcatctcaaagtaacctccccgttgcccacattcgccccagtatcctttggaaacggtgtggaaagatatgagctgaacttccttgctgatcggtgctcccatatccatcaaaacctttgcaacattcatgataaaatgaaggactatcacgcagaccaatgatcacaaagcacatgcataggctaatataattgaagctaaggagttaaagataccaatgaaagacatcgttgttaccttcttggaactgataaagggacgttcatcttggtatatattttgctgatacacttcgtctccgagaagaactaatctctcatcacaacagaaccgtagtatctctcttatgttagcttcgctaagacactggccagttgggtttccggggttaataatcaccattgcccttacctgcatttaccatatgtgaaaaaaacaaaaataagagcagaggtaaagatgtcataaaaaagcctctgcatcaacagtttcgagaaaaatagtggaagagtattaactgttattccttgagagcgagcttgagcaacagattggcgaaggttgttaacatcaagtccccagttttcagactcttcaagatagtaaggaacaagagtaccacctaacagagatatagtagccgagtagagtggatactgtggaactggaaccagaatctgccaaccaagaaaacttgtgaccagatgctactataaaccaagcctaaaaaacctataccatctgcaagaaatctgaatctgaactcttagccatcaaaaaaatcccacatacagttgatgagggattataacatacaacccatatcttactagggcctgctttaatgccaaattgatatgaaccgatttatgataaaaccaaatgaaatggctcatatatccatgtacaaaaactttagataaaggaacaagcgagttaaggttcattactccgtctttctgaccgcgtatgacacaattcaagatttgcatcacacctttgctcgctccatcagttagaaatatgagttctggatcgctgtaatttgaagataagaaccaaaaggcctcagagtagtttttctttacaacaaatctattatttcattgcataaacaatcaacatgaagcaatcaccttggatatccatcacgccgttcaatgaactcagcgacttctttccgaactcccggaagacctcttgagtcactgtaagcacctggttaaaagtaaagcaaaaactttcatgttatttgtacaaacctaagccaatattaaccatgatctgagttctctaataaaagacataccaagaccaccagaagtcaaggaaagataatgcttagctcttgcaatagcatctgctgggaatatcataccaacatttggatcatctaacagaaatggtgcttggcataaagaaaccacctgcattggttttcaatatgtttaggcttaaatctatagcttggcaaaaaacatgagaattgcatattatacctgacgaggaaaagtcagaggtttctgtcctaaagcatgagggtttccaacatttgtgaaaataatctgtaattgtgaaagttaggaaaccaaagacgcttcccatatctcaacagctaatgaagctcataactgcaaacgcataacaaagttgttacctttttgccttctttctgaagctcagaagcacgaagataaagttcacctctgactgcatactgacaattcttcacgttttcattcaaggactcgtagtctaacgccttgagagacatttccaggatttacttttcaaagctaaaagcaaaatgattcctcacttcccctctacaaccaaaataagcagatgtattaatacactgatcacaagaaaggacataatcgagcttataacaagactaaccaaacagctaagtggagaccctttcactactatagatttcacttaacacaacaagatttgacttattgagtcgatcataaagattggttttttatcgaatctataactacagaacgtaccatcaacttattccaataaaacaacagtgaacagagctaaaaaaaaatcatcaccaacccacgtagagagtgaaccccacaactcaaaatctacagaacagtctcaaacgatataaaagtaaaggcgacgccttttgaaatgggttttcgaaatcggacaaaactacaagaaattataccaaccttagatcaactcacgacacagtttcgttacctccaaagtcacgttccagagcagggcaagtaagaaagacttgtgtgggcgcttattgcaatagcgttttatatgatattaaaataaaatcttcggtagattacaattgtgtgtctgacgtgaatttggacactcgtctgatcagatcatgtggcataaggagaacacaaaaagacgaagcagctgagccacttgaatcggcaaaaagaaagattttataaccaaaagtcatttctagctttttgctacaaaacggattaaaaaaaacgagtgagagaattgatatggactctgttttttctgcaacacaacctataaaatcgtcccacgtcccttgccttcggcttcaatgtcattttccggacattgactcgcttgtttgtttcccattatcctcaagagaaagagtggctcgaatgtctccatcagaatctttgacgggactaaactaattaagtaacatgaatgtgcaaaatgattaagaaacattaaacacattagaaataaccaagttttgttctcagactctgtacacgtgattcactagacatccacattgtgttgtgtgtccaattctgtaaaaaaacactttcaagtttcaaaaacatattacacaaaacgaaatcaataagaatcagaaaggtgtatgcttttctctattccgtgtatgatttttcagactcttcaggttggttgaactattttatcttgcgtgagatttctatgtaattcaaaagtttctttaaagccttcccactgtcaatagcttcctttgctctctccattgccacagctacatcctctgcaccttcacttcccaacaaatggtccacaatcccagcatttaggacgattctatcataagccgctcctttctcaccacgaagcgctgccagccccagctctatgttctttgacacctgttcattaaacaaaagtatgacttaagttttctctttttttttctttttctaacagtcctcaacattgtgaaacaaatggcttctggaagttttaccgaacgatcagttcgtggagtctcggttggttcaaacccatagtttctcgcatccacctcaagattgaaactctgacgcgatacacctacgattccagaagttagtttagccatgagttttaggagcataaactatattgatgtacaacaagacatatactagtaccaaggcataaggcaaataagtttaatatcagatagcacaaagaccaatctaatctgaattagatttcatagcactctagattaggctaatccaccaaaagacttccatcaccaaggtaaaatgatacatcatgactccatatcgaccaaatataagattagctaatagtttattagcctatgaactcctaccacctacaatccggtttactacaacactaatttgcacctgtgaaattaagtgtcaaccctgtctggactcggttcatatattcaagcagtagattctagtttgaaacaaggaaagttattatagctattctaaccgtcagcttctagagccgtgtccgaactcaatgaacgaaacccggaacagtagttgactggaaacccttttgatgcacttgcagctcgcacccgtgttgtcattgaaagggccccctcctcaccctgcattaccaaaagaagccttataaattcccttacaatcagacctgaaattttctctactaaaagttcaaaacttcatatggaaagagcttccaacagaattcaggttctaagtctacgtcccaagtgtgtagtagctcgtagggcattaatatatatttgatggtaaaagagagagactcaaccttaaccaccaaaccagaatggacacctcttcgtctcataagcattaagagaggctcttcgtagccttcatggtaaaacccagcaacaatggcttctttccctgtcgcctgcattgaaaaacagtccatgaaatgtctgcatacggtcactttctgtcaagccctatgatatctttcccccttaaacttgtcttagtcacatgagttgttaaattctatttgcgtggagcatataaggcggtgacatttcatagatcccttaccctcacaaattgctgaactttctccgttgttgccagaggagggcgcttctttatatgctccctcatttcgattagtgaatatctgcaaatttgtcaaagaaatttgtcaatacgatcagatgttatctttaccaccaaactgcttatggaagaacaggaaaatgtcgtatgcatttgtatatcacaaataaatgtttctcagatttcatacaaagatggccgagcttctcgtagactgagatatgcaaatccagccttctcgtcctggaagaatcaaacagcatttttatagatcgcgtaaatcatagatataggctgacaggagaaagatagacataaaaaatagagaaaacctgtaggacattagtttaaattattgtaggcacctcgatgagttcttttgcctgctgaacagacaagtgtgtgtttgctcccataaacttcagcatttgttcctcagtcacacccccctgaagacttgaaaagttaatgaaaagaaatctaaaactattccacaaaagcatcatcatctctagtcatctctaggaaactagtaatactgaaaacgattcaattttgttagtaatacttttggaggcatccattccacgccatggagcaatgaagattcaccacagcaagatctaactgcggccacaaacaaagtgcttcgaaagaatcgagtattcccatcataaggctcgccataatgggttaaggatttgacatcagcaactggaggagcccctgaaattagtagaagatgcgttaactcaaggcagaactttgtatccttgcctgaaactatcatatatcaaaagagttttttaccatgttcgtcatcgaatgcaaggcagtaagctttaagctcgcgatctgtttctctgttcatacgttgaccaatcaaaaacgccgaaagcaatgactcgcttactcccgagtttaaactaccttccgtttcaagcggaagaacgtctcttaaaacacccttaacctcctcataacctaagtgacctccagccaaaatctctctaagcgcaccaaccaatctcatctcacgagtttcattaccaacaaaagttggtccaacagaatttcccgtacccaaaagagagccttcaggatcagcaataaagagcacatcaggaggtagtgccctaaccaagagtggccaaaacacatccatcgcccgcttttccccttcgctccattgagtttcctccggaaatgcatttgcacgtattgtcattcccgcaaaaaaagccccaagttgcgcctttgaaacaggctcttcatcttttagctcccctctagctgcatcccagtgagactgactaataaggctaagaactctatcgaaccgatcaataaacaaagttgctaaccaagaaccaagaagcgtaagcaaatcatactccacttgggtttttcacattctatcccaaattctaattaagcagcataatggatacaaaggttgaaacttttgaatgcttaggcctcgagctaaaaagggcaaattgaaatctatcaaaatcgattaagtccaaatttggagaacgaaaaagcttacctgatcttaatatagtatcaaacaccttaaaagcttgttcttcactaagaggcctagtctgagtcggacctgtacaaaccctagcttgagcatcaagaacagtaaggtttggcttcggaatctccgatccccgataagtagaagataaagccggattcttaacatctgattccttaagccctaactgctccatcattgcagagtccaaaactgcctttatacacaacccaccagtgagcttccgccgccgtaaacgtccggcaaaatcggttaaaggaaaccggagacatgaagaactcaatccgttaaagtgtaaagacctcttgatctgtgaggaagaaatcgaagaaagacaaaaggaagattcaggatttagaagagctttcatcagattgattgtctctcgcctgaaatcgcttctactgttatctccgtctataaaaatcgagtctttgtggagttctctctcagatgacagatgacgatgacgattaaaatgtaatatatataaatacttttcattacaaaaatttataattagaccactttgtaataaaataagcgttaatgatcatatgatctaaaattaataacggacgcaaacaaaattagtgtagagtttagaaaatagaggaattcatattcaattttttatgggctggataaaacctgaatattgtttttttatgagtgtagaggaagccttttaagagttctttggcccaataagaattttcatctttacttatagtaggaacggaaacaaaggtacttaatgttttataggtgatgatacagtgcctgatcttgtagctcatttggtttgagggctaagctccaccacatgagttcaagtcatggcagaggagaagagtagaagaagaagatgattaaggacaagatcatatatgtatgtatatatatataagttcgtccacacatttgaggtattctaaaatacctcttctttttttttcctctcgcaagtcaacctcttttcatgttcattttccaagtcttttaaagtttttcaattttgaagtctgatggtaaaataattaaaagtaggaaaaaaaaatctgtaacaaacctaaataaatctgaatggggtttatagaaatgatagcatttggtttgtgattaatattgttgtgaacgagtgtttaaatcaaattaatgaactaaacttggatagatcttagaagaagtatatattccatggaggtttctatttcgtactaatttaaatttaacctaaattcacgactaaacatgaggatcctcccatctttgtatgagattagtttctgcacatcatggagggaatgtttattggtcgaaattctattttcttaaatagtgttttatcgctgtaaataacggattacatcatagttagatagaaaccaccaaaccattaacacaattttatttccaacgtatgtatgtcacatcatgcattacatcttttccattacaacgtgggatatgtgtagtggactatagttcatgtagttacctaatataattccttacaaatttgaatcacatttgtttttcaataggattcattcaaatagttggataagttgaagacacatttatctaagaactagaacagtttcaccttcatatttcacatagggccaaaaggccataaacatagagagagagaggttctacctctttagttctacatacttatatatagataactttagggtaagctaaaaactaaaaagtcttttatatataaggcgttatatgcgttatattcgcttgcttatctaaaggtcaatgcttttaatgagcttcatgttggcgagtctctcgagaaagacattgaaaacgtcttcacgactaagcatgctgactcggacatgcttcttgtcagatccacaacgctctccagctctgctcattaccttgtgtctcctcaattcacttaccagatccgtctcttccttcgtccctagccacgcaaacgctgcatccaaattaaagacacatcgaccgttacgtcttattcatttatatccaaccgttacaaaaacatttgtcgtttagctagtgtataatttagtaaaatttaattaccagggtaagattcgagtgattttccaaagtagttgcaaaatgcttcagggtacttgggaagagtgaaagcatcgctctctttcacaacttcacgtagcttctcccaccgattcttcatcatctcacgaccatacttgaagaaattctcagactcggactcgctcttacaagtctcctttagaacgttgagtatcttagctgttcgaacctgtgactccttagacacaccaatcgagttcacaataatatactcaaccatcttcttagctacctccttgtccttcaccaatgcccaccttcatcatcatcgaacaaagtttacatacatgaatctttatatactgtattatgttgtaataaaaaagcatgttttgaataaatatctaacccaatacgggacccagcgtggcctgtgatcttggagaaagtgaagagcatgatgtcatggtcttgacggcgagtgatgggagtgtagtggggccagtaataagcaaagtcatggatcactttggcttcgtcgtcgtctggacggttcaccaccgtctctctgatggttccgtcagggttattaggtgacgtcactagctcgatgtacggaccctttttgtcgaaaccccatgcgtctccttcccacttgtacatacccgaccgaacatatgtcgtctcctccacatatgtctatattcaaaataagaataaaacttttataatctcaagaatgaaattattaagaatgggaggaataaaagtggggacatgagcatgttactgatgtctttgcacatgaatctacaacacatgtagtatgtaagaaggaaaagtgttttgtaaaaaattgttaaaatcaaaaagaaaaaaaaatgatggatcgatgtgttgtgttgtgttcgagaaacatgtctgtcactgtgtcttttagatctccaatcttgcttttcagaaacaacgcccactgaatctttgattcacatcaaatcaactttatttttaaaaacgacttacgattatagataaaaatacattaacattctaatgaagcttcttcaaagcaaattataccagagaggaagatactttttggtaaaacaaattatataaattctttaatttaagtaacgtatgacatcccatataagtgaaaaatacaataattgcttctttgtcgggtttacatttggttaggcagtttttaaaagatggatccaaagcaacatttgaaaaccgttaaaattctgtttttcttttatttaagatttagtttatttattcagatcaatttcaagaatcatttcccttatggaagaaaatgtgcagtagatttgagaattgaatttaagataatattaacaccaaagaatagatctgcacttgtctagctaaaaaaccggctcataagtcaagaatcaagccctactattatatcgaattattaaacatacaatatttacctgatttttttgttgttagttgcaaaaaacaatccccacaaaagttatataatgcaaaattaaaaatatgtcaacggagatcatgttatagaacaaaattaaaaaggaaaaaaagatacgaggaggagttttagtggtggggacttacggagtaaaaaggagcggcggcgacgacgctgacaggttgactcctggctagtgaagagagtgcgtggacggcggcttgacaaagctgcgtcgaaccggtcccaaccactatgtaccgatcctccgtcgcagcgttaccaacaacaccgtgcaagtccttgatcgcatcttcaagctctggctcaaggaaccaacacaagttcgtcatgtcgctgaagtaactcatgagatcacaaccacgtatcgtcaccgtacacctgtcacccatcttcctccagtattcttcgtacgccgttggatcaccactgcaacaatatagcgaaaaactatataaaaatctgatttgttagtgaaaacggagatttcgatttctttttgagcctatgatcttgcaatgccgttagggtttatttttatgagagagaagaaacgtactgatccagattgaccacgaaatcggacatggggatgttcttgttcgaaattttttcgggtttcctcgagttctccagtttcaccatcttcttcttcttggtttggtcgtttgtatagtgtttaatgattagagaatagtgtaggtcgaagtgtatttatagaaggaaagcgatattttactaaaatattttattagtaaaatatatttttttccctaaaaaaaagactggtatctgctttttaaatggagaaaaatatattaaaattaaaaatctttgctttttaaggtcaattatgtaaacatttttctgaaaagaattactcaataataaacaaaatagcaaataaatagcaatagttgccacgcaatatataatacctatttaacaaagaataacaagatggtaatgaattaccacataattaacaaaattgccatgagttaaaatgtaccctcggttttattttaaacaagtgattttattaaatcacatattttcttatttcaaaaacatttttttacaaaactaaaaagaaaaattacaacagaataactcaataaatatcaggttttacgtattttgttttgaatctgataatttgaatctgatgttcgcactttttgtccgacattctcatcttttaaagatcctatttgtttttacattttttgtcgcatactatgcaacatttttctcgctaccaaatgcggaaaaattcttatttgtcgctttcgtaaatctctaaatagattaaaacatgaacatgtttaataaattccaaactaccaaagagttagaaaacaccaaatatatatgattgattctagagttttcttttcctgcattttaaattttaactgaagagttgatgaccgatattttaaaatgcttcctaagaatttgtcaacttatatttttggctattactgaaaacgaaccaaaaaattgtagttttagaaagtgatattatttaatttattttttaaaattctaatcatttattatattaactattaagaaaccaactaatgttttttttgtgcattattaatttaaaactctgtatgatatgaattggtttttttagtttttgttaattttattttatatgaaacagatgaagtataaattcaatattatgtaacatctttgacgtggtcaaaaacctttatccaaaatgtcttttagcaagaaagtgaagaggtttgtatactatgtgtagtgcttttaaccttcgagaactcttctagtgatgtaaccaccaaatgttgaattaacattttctgctccggtaaattcaccggtgagctgtggtatactttgaaataactaatataccaaatctatttaatatatattaagttacttaatttaagtaacgttttggaaaaatatcattttctgtttcaaaattgattcttttcccggaatttcattttcaaaatcagcttcatttattgtcagtgggcgagagtaaatcttgtaggattctttctttatattcgttggtttattctttcctatacattgaatgaacatcaatgaagaaaatccgagggtagtaaatgcttaagagttcaaacaacttttttacttcttggcttcttgtaaaccaagttttgagtttgatgcgtcctatcacgcatcctcaatgcatagtgaaatgtgaatgatccattgtaaaatcttaaacgttgaatgttgtttatctaacataattgatactgttgtggacaaaatttgtttagttacaatgacttatctttatttattagatacaattgttttgatggcgtgtcatttgaatataaatcaattcatcggcagttgggatatttttccatgaaaaaccatcaacactaacatttaacaacgtagtggaatttcttttaaattaataaaaagagtactgagaccaccaagttggaaagcgtaggagattggaggaaatgatgaagtcacaagccattcaatttaaacaattaattctccatccccatagcacttcatcatcacatatcattttcctagatggacctatttgaacactatctctattcataccctcgatatggaggatattagtccatcgaaatcatattaacaactatgaaatttgatcgactctttccaagaaacaaaagtgggtggacgtgagagtcgctctatccaattatgtatccgtctaaactgaactaaatattgttttacgtaaggacgattcaagtcgttgatccataatcaattaatcatactagttccggggaccaagtattgatatatacgcacaaagagtcaaagagtcccgctcaatgatgactatgcatccaatgataatcttttgatatatacaccattttatattttctcaaaacaaatcatcttatggttgtgtttttgctctctacaaaacaattaatgcgtatctataaatcgaacacaatataatgtcttaatatattaaaactttagtacaatgaggcactgacaaaacatattgaaaagttaccaataaagttatgtaaatacacaatatagaatatgatatttctgatcatctgaaggaactataaacctatttgacaattttagaaattgcgtctaaactcttaagtgatgcaaaatatctttatctctatgaaagtaaaactatatttaaaggctttgtcaatggacaatggttgacaaaaaagagatgtcaatgtttttcatttcttctaaattcatttcattaatgggagttaactgttaacataaatagtcatactcatgattttatcattgctttattgacgagattactattttaataacaaaaccattattacatcgataccgcgaataaaacaaatttggaaaagtgtgcatataacactaaaatgcatctactatttgtttcaaacaattacgagttttaactgtttaaggagtatgtctttttgaagggtcgtgactcgtgatattcacgtggaaaggttcgatatgattatttagccttacctataattgaatgaagaggaaagctactagtatttaattaggttgacttcaaaattgtcgactctagtgctaattatcgaagtgtcgtcttcatttttaagtccttccttaatcatttaaaaatattactagtataattcgtaataaatagattctccgagagtgtttgccaaatggcgagcctacgtagttaaaacggtgagagtaaaggacaaagaacatgatgagtcggtttgcatgcttcacgcttccacttcactcgccgttgttcttgttgcttgtcgtcattttttatttttatttttattttttgtaatgaaaactgtttatgtattaacagaaatccaaatcatattcgcactttcaaatccaaatccaaatcataattctcatagctaaaattttatttttttaacccatcgattcaggttttactgtctctaaactatgtagtttgtggcctataccatctaaatcattatcaaagataaacaaatcaatcgtaacaagaaaaactaaatttaagtaagagcatcttcaatgtaaatttctatattttctctattttgaaaaactctattttggaggagattttgctccaatatataactctaaaatagagttttgtcttacaaaaatggaagagacattggattactctctctatatagaccaaaactaaatcaaaacctatttagtatcttttcaaaccaaatcaaaatttggcaaacctaatgtgttttgagttgtcgaaacggatattttgtgcattttaaatgaaaattgtgggattgatgattgcataaacatacccaaaaaaaataccaaaaaaaaaatacaatctgagtttctcccaaaaaggccaaggccgtaaatttgactagtctcggctcatgttttctcttacaactattaggcctattttgggcccatattatttcatgcataaacaaaacaaaacaaaaatgttgataatctgtgttcaacactattttagtatttttggttaacgaatttttaacactcattttacacaccatgtatgaataatgttatgattatttaggttttagagagttttaaagcttatttatgcttatttaaaattaataactaaaattaacttcagatgtgatgaatatgtgattttctcttgtataatctaaccgtgtgagatttctttaaatagcattttagtgcatagattatacacaaattaaaacatggtgcattacgaaaatgataaaaacaactggaactgaaaattggattaactgttactcggttacaatcaaattagaactatataataaaattaacattaagaaacacttttaagggaataaaaatgttatggatgacaaaaaaaaataaaaaatgttatggaactggctcgaatagttatatgaatctggtgaaatgtgttctatcgaaaataataaaagaaggcacgtggggcgattaatgaagaccattaaatcggcattttaatttatggtcccacgtaaatacattaccacctctaattttattttgcttaactcttcatatattattaatcaataaatggacagttgtgactaatattcgtcagaattttacagccattcccaattaattatgaggtctctgctacaaccaattacactatgacttttccatagaacaatcaatcttttggtccacgaatgatgaatctgacaattttaatactgcatttaactctatattgaaatcaaagaaacttcagaaccatatacgacataacatagcaacactcgattctccatctcacattggtaacactaatcaatgtaaacattacaaaacccataatgccatcacaaattccaaaaaaaaaaaggtataattcactaccaaactttatactgatcatttttaaacaagattttgttcgctcgtggtgatattgttatggtaaagaaagaaaaaaaactcatctacatgatatttgcaaaacacctagcggcaatgtaaattcctaatctcccttaatcccaaaattcatgtgcactacatgtaagaataataatcaataacctttttctgcttttgttttcttgattcttcatggacatctagggttttttcctggacctccatagtaaaaatagttaccccacacacgattcgtcccacctcttatatcataacaattgggatggtctgcgagaatctttagattcgaagcgggtataagagtgttgtcccagtcaacaatttggagattccggaaataagatgctttaccaaaaccttcaccggcaaaatgtccactacccatttgagtcgtagtgtgtgaaccgccgggtcggttgttcacaatctcgcccccgaattggaccatgcttccatgttgctttagatgcgtgaataaaaacgctggccaataaccgactaatgcacctgacccgaattgtagccaccagtgaccgtgcttcggatcctatacgtagattatacaagcatgtgtaatgttattgttatgactaaaaaaagtcaaattatttaagactttctaaagtaggagctggttgacccacgaaacattgatgtgaaccatgtgaaattcttcttaaaagattataaattatataagaaatgtgactggtaatttttttgcagaatacagctgaattattataggtatagtatgttgtaaaatattgttagtatttttcattgatgatatgcataaatatgtatatgagagaagaagaaaaattaccttccaaattaataagcttatatcgaattgtccacctttatacgaagatctaggagaaatcgcagctcctatcgcgattcgacggttggtttgaacgaaaccggaacatagcaaattgtagcaacccgttgttcgatatgcatcggactgaaaatcactatcactaccattgttaacaaaatgttaattcaataaaactaaaaactttaccgtaaactaaggatactaaagttgaaggtaacatttaccgtccaataggtaaagaatcttgggtaagtatcgccgtacaactccgggctaatttgccaaccggcttcaatggtattaagatcgtgtgtgaacgaaccggcaataacccaaatctgagaaagactaaattcgtattggctcgtaacacgtggcgaccacacgttaatacttgcttttgccccgtaatattgtctcccggttacatatcccaccgcatgctacaaaataagtcatttttacaaaaataatcaatcaaataaattctcaaacgctaaaattggagtatcattttcgtaaacacagaaaaagagaaaaaggaacagagaataatcttttttacgatgtgaacagagaataatctttagttatgtcacgcttcactcctttggatgatacaacttagtaatggtcgtgcaaagaattacgaaaaagctgaattttggtatcattctctatctttttctttatagaggataaaaaaggtaagaaacctctgactttttgcttaattatggttatcaaaatggtacttacttcgtgtccgttatttgtggaatctctcttcacgcgcctgattttccgaccaaatctttggacagaacttgctcttaacatgtcttgttccgttgttcttcttatcggaatcgtaccttccggacaagactcaccggataaactccaaagctgggagttttcatatgatccatcatcttcgctgtatccttttggtatctcaggcggatcctaaataagaacatttgaaatctttgataagaatactaatgaaaagagataaaatggagaagaggagggaaaataatatttaccaatggtttttgtccttgtaagagaggatgatcgaaagctggttgctgatgagttgaaacacaatctattttatctccatctgagctctgcaaacataacacatggaaaagaaacagagcaaaaaacagagtaagaacagagtaacaaaacttgcatgtcagttaattaacaaaacagagtaaaaacagagcaaaaacagagtcgaaacagagtaacaaagtaaacaaagatgtctgtatatatatacatttatcaaattgagatatttgagaatagagaaattgcctgaatagttttcacagccggcttgttgattttgtcgagttcttgtctaatcagtgttagcttctggagctcttcttgcggccggagagtttgatcggcggcagtggagttggaggaagaagtggtggaggagaaggaagaagagacgagacagagtaaaagaatcaatctgagaaagctagaggagaacatcggatcagacttgaacgaaacttgttgtgaagaatgatgaaaacatctgctgtcttgttgttttcttcttgagtgatcaaaaagacaacatttaatacggttttgaattgttgttcgtcttcttgatgtcactgacacatctcccaacaaacctattaaacacataatcactttcttaagggaaaacacagaagatcaaaaacaataaagaatgaattaactcatcgaaccctccaacaaaaatttattagggttgtgtgttgctaaagttttgggcatgtgggttagtgatgaattcaaattaagggctttgcagatatctagaaagtttatgaagtaaatgataaaaagaggaaagagaggtaagagaagtaaactttatatttatgtgagataggtaatttataggggaaattttggatttggtgtgatcattctttggtttgaagaaatggggtcagagctagtcagatgaaattgagtacctttgaatttgggtttcttcaaagctctttgctttctggtgttactctctttttccaagcgctttattgttttttaccgtttatgtagagtactgtacaagttaaatttatggtccatgttcacaatgttgcttgtagaataatgaaatgtttttgttatggaatctcttggagtttctaacaaacaaatatggtgatttttttcttttaattatagaagtcttgaggttacggtacgtaatctctttaatcagagaccaaaatatgcttaatcttctctccaagctggaaaaagaatatatcacaaactagtagtagtagactattaataatgcatattatttgttaggctcaacaccaaccggtgatataaatttaataaaactatatataaaattgtggaaaacaaaccaagtttattgattgaaaaacattacaatagcatagtacgagttgtgacatttgattgtcgacattcgagagtctctattttttaaagtataatcatattgtctctcgaaatggaggactgatttaaccaagcatgcgattatatatacttacttgaatctcgatatatagcttgaccaggttattcgtcgtgtatagaaaatataaaacatttcacaatcttgtaacgacaatatacaacaatatacgataataattataagtgggtcattataagaaaagagggtcaataggtattgaatttggggaattaagtgggtgcggtcctcgtagggacacttacacattgatgatcgtttcgtttgttagtccatttaatcttaatgggtcatcgctctcctctagcttttcccctctcatttttttttctcttccatttctttcaaaaatcactatggcatgcatatagatttttgtctcttttgagatttgagtcttgtaccatactgttttctatttggcttttgattaattatactcaataccgaagcagagttgaccagagagaacttatgattgagagaaaaataaaattatgactgagtttggcacaatggcacaacatgacgttatataatagctaattaacctcaagaagacaattctcgtttattttggataatacagttagatccaactcgctttaagttttttaacccaaagtagtaaaggatataaagtttttccccatctttatctgaattgtgaattc

SEQ ID NO: 1237 - DNA, 66653 bp, Arabidopsis thaliana
tatcctctatgttgaattcttgacaaaattttattagttttttggggttttttttgttgttgtcaaaattagtttttattttattttctttgactacaatttataatttggttctactaaaacaagctgacttggacctacaagaataatgataataactattgggccttatagctaatgggtcaaaaccaacccaatagcaatgtgtattatacattcatttttatgcttgggccttaaaattcctaatctcttactttcattttgtatgattcgaacaagagagtaggtagaaaacttagtaagaccactgaatttgaaaagcttttaggtcattcgatagagcaaagaattaatgtgttacttgatctgacttcagagttagattgaaaatgaagttttgggtcaaaatatcgactcttcgcgttggaccgtatggatttttgcatacgatacgaacataacaacagctttaattgacttgagaataaatattgagtgccatagaagaaaactatatcacttgcttagaaatttgtcccatttacattatcattttccatttataataaatgatactatgtgtgtgcaacacgcattttatttatttcgtaactagatagtcttttctaatcaataaatttaataaaatgtcaacatttgggattatatggattatacaggattaggcgttgggcctatagctacgtactgttttgtcaatcgatgtatttcccaaaaaatgacttttttccctccatcctcgtttggtcaattccaatttcaattctgtttgttctatttttcttgccgtttctattccatacaaataaaagctttaagcccaatattcaatttcacaagtcattatgctggttacaatttttgtatttttccttttcttaaagatccttaaataaagtttaaattttatgataactttatgagaaatttatgtaatgtataaacgtacgcattcatacaataaaagcatgcaccgggtgaaatttggtgtgaatttataattatcccattctttacattcacgtctgttaaaatgcgtgacacgatccaatcccccataccattttgttcccatccttatttttattatatacttttttttgtattgagattttttttttttttaaaagtgtcaacattgattttgcatttatcggaatggacgaagatggaattaaatcagaacaatttggaatattttatgtttagagttgctatatattaaaatgataccatgtatgatgtaacatatctatccatattaactagaataaattagaatggatgtcaattgtcaacaaagtgacgagattccacgtagagcttgtcgatttgtcaaatcttattattttagaaaggttaacagtatttatataaataagaagcttgtagttttatgaccgttcgaatttatatttattttcgttctaaagttctttcactagtatcttttttgttcttatgtatttgatgtatactatatatagatttcataattagcgcacatgaaaaagagaagaatctcccatttaaagaaaataaaggaaaaagagaaatgcacggtgagatacatgaatcattgttgaatggactaaaacaagcacataaaatgtgggtaatgacataaaattataaatattcaaaatttgcaagttcatgattaatagaaaggaaataaggtataaatgactagaaaattttctcgtccaaactgaacacaaatagagtatttaatgtttttctcaattatctatgtggagatgattttgagactataaacaacaattgtgtaacggtcatggtttatatactcaaagataattaactttggatgtacattgtatttggggtaagagaataaagtaatagattttgtccgaccggttctctctcgtgcacaatgcactagtggaatgtaacatcacatgagatcacgcctcattttttttttcttctatgaccatgttggtaataaataagattagtgctatgaaagtagaaatggttccattaggaaaatatcacaatggcagcccattaaaactggcaatttttccccctcctctctttttttttctaaagaaaataaatgtgtttgaaatttcgtggatttcacaattaggtttgcattttaaataaaaatatgtacactccattaaagatttcgatttcattttcagtttctaaattagctaattaggctttcgatagaatgtaaacagaattttgccctttcagaatgcagtaagagtaaccaccttccacagataaaatgaaataaatcatattattgttaacacatgcatcaccttattatgcaggtaagcaatttggtttgtacatgatgatgcacggtttataaataaatactacatagtacaaaattaaaatcaataatcaaatacttaattagtgactccttagagataattggatgaagggagagttggagaggtaaccgcaaggtgggtccatttgcaccctgaatttgacgcagacttttatcaaataccacgaattagccatcaattttagaggtccatttccgacattaacttctaaactacggtcaaaccgaaagtgtaaaacaataataattaatacttttgttgtgcaaacaattacatagatattttgaactaagtaaataccagaattagctctctttttagcggtttatctacaataataattacaaaatatattttttccatcattttataagtttataatccaccatgaataagtccatgtaatattttgaacagaataaacagtttttgtaaacaagtttataattttatatccgtaccacaaaaagctatgatacataaatgtattgattggagaataattttataaagggtttacaaaaatcatgattagagattgataattgattgaagaataatgaattcttaggttttgtaaccactgatcacctgcaaatgtctttcgtaatcagatacataaccacataatctagtgttaacacttgagtatagaatcagtccaaatgactaagatttaaactaaaaaatagtgctaagtaatttatctatatcaaaacatcgctacaacatttgtctaaactaaactatactctctgatatattcactaatccctaaaaatgaaatttaaccgaaccaatatcatatccaacgatccaatttcatctataaaaaactgtcctaagactatgtgaactccgagcatacatcacacatgggaaaaagcacaagcacaagaccattgcaaaactcacaaccgtctcagttattattaagtttaatgaccttatctcgtcgaccatataaagttcaagccagtaatcattcttatataaaggtacagaaaagttttaagaagagaaataaaacaaagatccgaaaactaaaaacgtgatggtgtcttctcacccacctaataaaatatgttttaataaacaacttattcaaaacagtattgctctagtgtttcagaaactataaagtaatttacatcaagtttttatattttaattttgatgaataggaaaaaaaggggttgaaattttaaattaggtttacttaagacttcaaaggaggcctaataaagtgataaacggatatgttagagagattaatgagcttgacccacctaaaagcctaatactacacaaacggatggttctactttactcgtattgccctttttgtcaacggggcatgttttacacgtcacgacacaagcgcgtgacaaaaattaaaaacttcttttcttttcctgtttctttttttttttttggtttttttttggacgttagttttcttatattaaaaattgaaataatttaattgataatttaatttatttattatacttttctaagccttaaaagaagagaattaatcaatacctaaatagtaaatacgcattccatttttagaaaaataaatacaccttcccatataaactgttttaaattattaactacggatatgtacggtattagattttaatccacggtatattgcgggtctatattttcattaattaaaaaataattgaatattttgtagaatgatttaataaatttatgctattgtttgatttaaatgtataattcaccgcgagacgaaattttataactcaaattttaaagttttaagttgtatttatttattttgttaaatgtttaatattatataattgtattttgattgttgtttctcggatttcacccgtagtacaccatcccatattaatatcgaatcaaacccatcaattctacgatttcacccgtgctagtatttaattatataataataacttgattgtcattgtaggatttcactcctagttctatcgcaaattattatcaacccaaaccaatcaattctaaaatttcacccgtagtacaccatcccatattaatatcgaatcaagctcgtcaattctaggatttcactcctaattctatcgcaaattattatcaacccaaaccagtcaattctaaattatcacccgtagtacaccatcccatattaatatcgattcaaacccgtcaattataagatttcacccatggtaatactgcgagagaaatcttatgaaagaatcgaaatgtgttttaaaaaaattaaagttttaagttttttttttttaatattgttaattttgtttagtgtttaagattatataattatattataattgttaattataggttttttttccgtagcatatcatcctatgttataatccactcaaacccgtcacaccatataaccccgtcccatgaaactaaacacaaatttgtcattttattataaatttcaaatatgtataaaattataaacttcaaaaaagattaatattgacccaaacttcatcattgaattttgagtgttatatctaagatttctctcgcagtatatcgtctcatattaatatcttttatattttgagtgttatatataaaatttgaaacttaaaaaaatacaatatcgaccttgattatatttaagacttttcctgtaatatatatcgtctcatattaatatattttatatatatttataatgtttaaatttctttaaaattcaatttataatttttaaaactttataagttttaaaattataaatattcaaagaattttttaaagataaactttataaaaagtttttaaaattataatatttaacttttgataaagttataatatttataatttcttgaaacattttaaagtttcaattctttaaaataaaaaaacccgagtaaatcggataactattttaattttggacgcctgataaatcaagcttcctgctcattcgtaatcagaatcattttggtccttttataatatgggtctgaaccattgtccaatttttctaagcgatgtgggacattgtacacatattatttcttcataggttgaataatatatgtctgttttaaaaaatttaaattacatcatatgcagaaaaaaatataatattttattaactatatatattttatataaattcaaaataaataaagtataagatcaagtaaaagtgaaagaagaattatatatttatgtttaaattaggtagaaatattttaggaaattagttaaggtaaataacaaatatggttagtttagagatattgtttatattaaatttggtaattaaatcattaattttcgtttttaattattagtttttaggtaacttttccaaaaattaatgttatccaagatcagaacagaattaaacatgttatccaagatccgaacagagttaaaccgggtaaaacccacccatttgaattaattgttgaattatggctcaaatcttcaacattatcttcaaaaaacgtttacaaaaatgtatatatagataactacaatataatacggttttcatagtaacaaaaatatatatctatttatatatagatattttcgttacttttaaaaatatatcgtacaatgcagtttaatcttaattcaaaatactgcaaattaattaatgatacacaaataatcaaatgcttttaattagcctatcaatagagtattaacacattttttttccttttttttttgtgtgcaagctattatacatcttgatatgcaagctattataattaaaacaatcataaagttagatcatttctcacttctccaattatatatgtatatttcaaaagcgtaacttaatcataatttcgatattatttcatttacaattcataaatttggttatcttttcgttttaatattttctatagtaaaagaattatgaagaaatttgattagttaatgcttataattttgattttttcatttacatgtcataaatttggttatcttttcattttaagttttcctatttataaatattaaacagtaaaaggattatgtaatattttgaataattaatgctttcattcaatatcagattcacatgtttgttgtggaaattaaagttttaggaatattatgagatcttctataattaataatatactcattaaataggtttatatctgctgttggaaaaaatgtgaatcaaaaagaaaaagagaaagaattttggatataaatttaaatttatcaaaatagttacacaaaaaaagaataacgccgttgatgaatggtgaccaattgaaaacggaagcttgaagatggagtcactgtcctgtcaaataaaaagactttgaaggtctttgtcatgttttttcttcaaacaaataaatacttaaggaaaacaaaagttatctatcaaaccatatatattaaaaaaaactaagaaccctagttgaattaaaaaataaagaaaaaaaaggcaaggtaaaggggaacagaggagagagaaaaaggtgtgaacagttaatggcggagcagtataaggaatcgcttctctctagaaatcttttgccatagctggatttcatttttttgatctctctctctctcttctcttgtaataacaaagctcacaacataaagaaattattacagaacaagcaagcaagaagaagaagaagaagcaataaaaattagtgcttttttatttagtgagagagaaaagctctgaagaagaaggaagttgttttcgagatgcgagctagtaaaggaaccttctctgtacttcttctctttctccttttgattctcattctgcccagtctttaattttttttcctttttcttcttcttctttcttcttcttcaatttcactcttgttgggtaagtcaagaatcgtccaaagtctttttttttttcttgggttgtttggtattggatctgtttcttggttcttttaaagattggctaatactttgattttggggggttttgatttgatctagggtttctagttagagtctgaagacctttggatttgatgtaggactttgttttttgttctaaagttaaaaaaagaagaaaaaaagaaaaagaatctgttttctcatccaaatctacccaccatttttgttgtgggaggtttttttttttattattacaaaaagaaaaatatagagagaaggagagatttgttttaaagtaaatattttgattgtttatgggaatacctgatggttcactgctagatctaattgataaggttaggtcttggataacttcggattcaagtgattctttgttcttgttgtcttcatctaaacaagactttggaattatgcctatcgtttccaaaatgtgtcatgactgtggaacaaaggtggaacaaggatattgttgtcttagttgtggttcttgttggtgcaagagttgttctgatacagaagagagcaagatgaagttgtgtagagaatgtgatgctgaggttcgtgagttaagggttaagagctatgataaggttcatcctcgggatagccctgatccgccttcttctcttgctaccgaaagcgagagtcttgcctcgagtcttgaaatccgtgattgtaggaacatggcttctattcgttgctatcctagcaggtaaagtttcgatttttacattcaattatgtgtgaaaaagattcaatttttatgttcaattatgagtctttaaacatgttggagtaagtgaatgatttgtgtttgcaggggagaggaagaagaggctagatattgtggtaaacagttgttaagcccttcgagtgataactatcaggacagttcagatatagagtcgggtagtgttagtgctagacatgagctttttagttgtaaatcttctgctgggtccagtcctcacgacagtccattaaggaacaattttagtcctcttgggcgctttgtacagcacgcgaaagacctaagaagccctactgtttgttcttttgataatcatcaagaacaactcttggctgataatttagttaagccaggtcagggggtattggaacaggaagatcacgaggaggaagaggataagttgcaacagccgttggattttgagaacaacggccgcatctggtatcctccaccaccggaagatgagaatgatgatgctgagagtaattactttcattatgatgacgaagatgacgatattggggactctgctaccgagttttcattgagtagtagcttttctagccacattcctaccaaagagaaattgggagaaaacagcaatgaacctcttcgaaccgtggtgcatgaccacttccgagctcttgttgcagagctattacgtggggaggagcttagtccatctgatgatggcagtgccggggagtggctggatattgtcactgctttagcgtggcaagctgcaaattttgtaaagccggatactcgtgcaggcggcagtatggatcccgggaattatgtaaaaataaaatgtgtagcatctggaaatcaaaatgagaggtataactagttgttgaaaccttgtttaaatcgtcctctgactgatgattactaatttgggtgatagttactaaatgaataccttgtttctgcagcattctcatcaggggaatagtgtgtagcaagaacattacgcacaagcgaatgatatcgcagtacaaaaatccaagggtgatgcttttagctggttctcttgagtatcagagagttgcaggccaattagcatcctttaacacgttgcttcaacaggttggtgtgttactgtttctttatgatggctgcataaaatctctgattaacaaactgaacaactgaattatgtgtgttggacaggaaaatgaacatatgaaggcgataatagcaaaaatagagtcccttcgtcctaatgttctgctggtagagaaaagtgcatcttcatatgcccagcaataccttctagagaaggaaatttcattggtgctcaatgtgaaaaggtcattgctggaccgtatagcccgttgcactggtgctgttctttgcccctcactagatagtattagtactgctcgattgggtcactgtgagctgttccggactgagagagtgttggagcaacatgaagctggcaatcagtcaaacagaaaaccatcaaggacattgatgtactttgaagggtgtcctaggcgcctaggttgcacggtatgctcctttattggtttcacagttcttgttttgcatagcttgaacctttgtagctaagaagtctgctatcttaaatttattaacttccttactgacttttctgaaacttgtgcaggttgtgcttcggggaagttgtcgtgaggagctaaagaaggttaaacatgttattcagtacgctgtatttgcagcttatcacttatcgttggagacttcattccttgcggatgaaggtgcttctctgcctaaaattagactgaagcaaccagggatggtgcggactgcatcacaaaggaggataattgatgaaggcatttccttaataactcaatctcctacagaaacagatagtcaagctttgcttgaaacagctgcacatgaagatgaacatacggctcctatgcctgagcatgaagtttgtgaatcattgtgtgaggattttgatcctactcagatattcccaccgtcttctgaagttgagactgaacaatctgataccctgaatggagattttgccaataatttggtaacaagatcatattcttcgaatcagttaaatgatttgcatgaacccactttgtgcttaagtagtgaaattcctgaaacgccgactcaacagccgagtggtgaagaagataacggcagaggtgaagaagagaaccaattagtgaacccccaagatttgccacaacatgagagcttctatgaagatgatgtctctagtgagtatttctctgctgcggactctcatcagagcatattggtctcattttcaagccgttgtgttttgaaagaatcagtatgtgaacgttcacgactcttgcggattaagttctatggatcctttgataaacctctcggaagatatttgaaagatgatcttttcgataaggtagctctttcatctataaagttagttaatccactttttcatctttcttaaattttgaagtctaatgcctttctgttccatttctggacagacttctagttgtagatcctgtaaggagctggttgatgcgcatgtactctgctattctcatcagaatggaaaccttactatcaatgttagacgtctcccttccatgaagcttcctggtgaacaagatgggaagatatggatgtggcatcgttgcttaagatgtgcacatgtagatggagtcccacctgctactcgtagagtagttatgtctgatgcagcatggggattgtcttttggaaagtttctggaacttagcttttcgaatcatgcaactgcgaatcgtgttgcatcttgcggtcattcgcttcaaagagactgccttcgattctatgggtaaacgcaggctgtataatatcattctcttacagttatctcaatgctgttacactaataatattatgatttgttttgtagatttggtaacatggtggcattctttagatattctcccatcaatatacttactgtactcctcccaccgtcgatgcttgagttcaatagccatcctcaacaggagtggatacgaacagaggcagctgaggtagattttaagaaaaacttaaggctcttttgcttcaggttttggatatgtaaatgctaaaactcaaatacttctctgtttgcattttacagcttgttggtaaaatgaggactatgtatacggagatatctgatatgctcaaccgcatggaagaaaaaagcagtttgcttgaacctgaacaatctgaagcatgtgatctacatagtcgcatcatcggattaatagatcaacttgtgaaagaaaaagatgaatacgatgtaagcttcttctgtttctgaaatcttgatgatgcttgttgaatatgtatttgatggaatattcctcatcgtgaacaggatgcactgcaacctatttttgaggagaatctgcaaattcagggaagtttggatatcctagagctgaatcgattgagacgagcactcatgattggtgctcatgcttgggatcatcagctttacttgttaaactctcaactcaagaaagcatcagtctttaaaactggtgatgacaatgctcctcggaatccagagatgcatgatcctccaaagattgaccgtagaatgcaggaaggttcagatgagagggatgaacaatcccatactgattcagaagctaatggtgataacaaagatccggaaaacattccctcccctggcacttctctatctgagaggatagattcggcgtggttgggctcgtttcaaaatctagagaaagccgagactattgctgagacggaaggcttttcagctgttaattcttctctccggaggcttgccaggccaattcgagtccagtcttttgattcagcgatacggtttcaagaacgtatccaaaaaggtttgccaccatcttctttgtatctctcgaccctcagatctttccacgcttctggcgagtataggaatatggtgagggaccctgtttcaaatgtgatgaggacttactcacagatgttgccactggaagtacagaaattggatctgattgttggttcagcgccaacatacatctcttctgcatctcaaatggctgatggggcacggatgttgattcctcaacggggccttaacgatatcgtggttcctgtatacgatgatgatccagctagtgttgtatcatatgctatcaattcaaaggaatataaggagtggatcgttaacaaaggtcttgcttctagtagtagtagcagcaatttgaataacagagagtctgaaccttccgccttctcgacttggcgttctctgtcgatggatgttgattacattcaacacgcggtgtatggatcttctcaagacgatagaaagtctccgcatttgaccatttctttcagcgaccgcgcttcttcttcctctactgccactgaaggtaaagtgaagttctctgtgacgtgttattttgcaacgcagtttgacactctgagaaagacttgctgtccgagtgaagtggactttgtgagatccttgagccgttgtcagagatggtctgcacagggagggaaaagcaatgtttactttgccaagtcattggacgagaggttcatcataaaacaagtcgtcaaaaccgagctggattctttcgaggattttgcacctgagtacttcaaatatttgaaggaatcactcagttccgggagccctacttgtcttgctaagattctcggtatctaccaggttagtgacaatataggagggaatgtgaacttgtaggactctgaaatgaaataagtgagcatgtgaatgattgatttggaatgatatttgttgtaggtctcaattaaacatccgaaaggtggaaaagagacaaagatggatttgatggtgatggagaatctcttctacaacagaagaatatctaggatctatgatctcaagggatctgcacggtcaaggtacaatccaaacacatccggagcagacaaagttttgttagacatgaatctgctagagacactgcgcacagaaccgatattcctaggaagcaaggccaagagaagcttggaaagagcgatatggaacgacaccaatttcttggctgtaagtgttttcattacccccaattcatattttgttcttaagtgttttgattaatctgtttccccattatcctcttgtggttagtctgtggatgtaatggactactcattgctggttggattcgacgaagagcggaaagaactagttctcgggatcatcgacttcatgagacagtacacatgggacaagcacctagagacttgggttaaagcttcaggcattttgggtggacccaagaatgcttctccaactatagtctcaccaaaacagtacaagaggaggtttagaaaggccatgaccacttattttctcactgttcctgagccatggacctcttgagtgaaagaaaagaaaccatttttcatcattcttttgttcactgattccaatttgttcttctcaaataaaaagggaaattggttaacagacacatataatataatacaggttcgaacctgactgattgatttatcttttttttttttttggtgtgttggtttctctgagttctggagaattgtatattgtaattatcggccaaactaaagccccccaaatttaaagaaaaagaatactaatgatttgcctttttctcatatctctttctgtttctctttcgtcttagtattcctcttaagaattgtgttaaactaaactaacaataagaataagatggaggaaaacactgaaaatcacaggtcttctgctttgctcttttcaagaaatctaacccttttctgcaaccaaaatgatcaaagaagactttaaaaaataaaatattcaaagattatctgaatgacacaagttattcttccacttgttgttagtttgtatatttttttttcttgatttagaatagactagaagaagatgtaagttgtgacattagtaacacaagttggagtacatttgtttcctagtgtaattaaagaagcgagaaacgtggcttgagaaacggatcgatgtttcaacaaaaataaaataggatcaaagcccttcaaaagtattgatcacctcatgtgattttggcaccttcttctttttcttcaatcccaaagtttcttcctccattacgaagcaaatgttgtctttgatgaatcaaaccacttggtatgtgaaggagacaaagttgtgtgatcttgttggagaaatcagagccactctcactctctttcctcagtttctcaattttccactttggtaacttcaacttcacgctactcacttctctctcttcatcattaacctctgtcttcttcttcattaccgagagatcagatgatgatctacgagacagcttcagattctctaatctctccttcgcactcatctggattcccgaccgaacccttcttggagttctctctttccatgttctgtcacatgggttttaaatgatttactcaaaaagattctaactttgatacctaaaactaagtagaaaattgaggaatataataccttggaagttcaaccatgaagtaaatccttttggattccaagttttggtgaggctccaagggctttgctctgattcctaaacgcttcactgcttcggattccaagagaacgtggcctggaaaatctttaaccactgtaccagcttccacaggcgttttcagtttgaaactctcgccattgatgttcatgattgtcgctgttttcttggttcccaagctatttcccattttggtgaatgatgttgtgtaaaatgttagtatcttttaggttcacaaatgagatgaaaaaactttgtaggttggtgtctattaagagctcagtagttcaaggtgggtgttgtgttagatcagatcattatagattttggatttgatttatggttggttgctgatgatagtgaaccatttcttggtcaacaaaatgccaaaatcttgaaaattattaaaacaatgagaagacaaaagttacgtcgcatttcactatcaatcttgaaaagaccaataacaacccaaaatttatgcttaattttataaatagaaatggaaaatgtgtactgttcttcacttcgaccatagtatattttgtactatgtgattttggaagttttgagaccaatgttttctgagaaaatgacacttgcgttaatcgctccgattaatctggaaaactacgttgtcgaaacattttttctcaaagacacgtgaagagattgacttttaacgaatttgaaaacaaaaagctgatttgatttctctttctaggaacagtaacaacacacgacctttatcaaatcatatgaaacattttttttaacaaaattaacaaatcaatacaaagatgagtcaaagagttcgattctcgttaactcttttgactccaccttctcctcaaatggaaattaaattagtcttccaaaaactcaataagatacaggacataataaacagatcaatagccagcaaaactaaattaattcatgttaagggctatttagagtgaacctaattttcgggatgatttacggagaagctctagtaaagaattagcttttcgtttagctctctctgtaccgtctcttgatagttccatcaatggaacaacagctccaagtctaccaatggagatcagtttttcagtatctctcttgcaaagacacagtagtatcgcagctgcgttctctcggtttcgcggttgatccttctggagacaatctatcaaaggtggtattgcgttggctctcaaaatcgcagttttcgcgacttggttactagctagaaccgagagtatggtcaaggcttcatcagccatcctctcgctcgaggagtctgtcagcattttcaccaatggctttactataccggctctaactgctctgcctttgtttccctggtaaatacacaagttgaacagagccgtagctgcgtctttcttccctctgacgcttccatattgaagcagatccactaaggccattatcgcacctgatgcgcctataatgatcttgttctcatcagctaacgaaagactaaagagagtagctgcagcgttttctctagcttccatgcttccagctcggaggactagcactatagatgtgactgctcctgcaagcatgatcagttctttgttgtgttcgtatatggagaggttaagaatgcaagtgacagcattttcctgcgtttcagtgtcaccatctgaggtcaaaagcttgaccaaaacagggatggctcctgcctctgcaatcagaattcggttgtctgtgcttctttttgacagagagcggatttcagaaaccgcagtcctgcggtcttcgattgattggctagagagtttacaaaccaatgctcggatcgctgacatatctccacttagatcacggaaagacccatcactgtttttggtcctaccgttcatgtaaccacctggttgctcaatgttgtgcttagtgcaccactgagatatcaggcttctgaggacatagtttggagtaagagtaaagttttcaagtttctgctgtgtctttgggcagctcagatttccacagtctatccatctctgaatgaacgacctctcgtatgtctgccaacgaagagagaagatcattgttaaggtttcaaatcaacaaccatacgttagcactatataaagatttgattttttaaaccagacctgtcctgtggaaacaatagcaggatccttcatcagttccagagagattggacaaagaaagtcctctggaatcgtgagattatccgatttctgtgagtcatcgctgttctcggtaactgctttctctaatctctcatcatcaccatcctttgataaaaagaaggccaatgatactgaagagctcttccaaggagggggtgattcaaatttcttctcatctgataaagaatgcactgtctctggaatactctccaacttttcaataacttttctattacttgaggcatctttctccattggctcagataaaccactcgagaacttcttcgaatttaacgatccatatctctgcattgctcttcttaactgtaatcttgctagttccacctaatcacaagcaaaaaaaaacccttagaaacacctccatggataggaaaaccaaatcttcatacattctacataatgaacaaacttttacctgttcacggacttcgtcagagatatcatatctatcatatgtcaaatcacctaatgctttctccagcttccatgtaacacattggaactggaatgagatcctcttggctgccccatccttcaatcaaaatcacacatcaaagtttagagagctcctcatgtatatattaataatgctcttcactacacaaatgtcaacaatagtatcttccaatctaaaaaaactaaaaacaaattcttcctataaattacgttcctgccatggcgagaccaaatcttcgtgaaatcacaaatccattttcaatcgttgagaatggtttagaatgcttacagaggactcgcgagcttggaaactagtagctgaagacaaaagacgcttcgcggcttgaagtcccaccacaagatcagaccaccaatcacattcatgagaattcaacgaagaagaagcatcagattccgacggcggagaagaatccctgatttcctcaatcaaatgcgtcaggagaccgactcgtcgcgcgagatcggaacaatccttcttaaacaaaccaaaattccccggaatctcattgatttcagcaataagaccgatgagagaatcgggagtgatagctccaccagccattacgccgtctcacacggcggcttaaaattcgaatttttgtgactcgctctctctctctcgctggctcgcttctgactcagagatgcgtctctatcgcttttatgtatccaacgaagccatgtggcgaaaaaggataagtcgctgttacgacaccgttttggttttagtgttttttgttttaaactttttatctaactctaaaaatggttttttcttttctttttagtttactggctttatatttttagataaaagtttatgtgatacatttaaataatacaatagaacaaactagataattgagagcgagattcacggtgcaagtagaggttgaagagaaaatgatacagttgtcaaaaaaataatcaattattatcatttatattagatcaaaactgtataatagaaatgaactatacttttaaattcaataaaaaaatccacttttctatttattgaagaaaatggtttgttgtgtgcttagttgtaaagtagatcttatatgattgtattttatagttgtgttgaaatttatgttggagttatgaaatttatctgtatgtattatttatgtaatcttaaatggtaataaatagtcaaattagttattttttctatttgaaaagaaactaagataaaatttccaggcctttagatgcattgtattgacatgtgtttctagtatatgatctgtcttaccctagtgtttattaaaagatggaaaaaatcttctttgtaattaactaaatatagctttacatgttttattttcccttaaaaataactttgtatgtgtaagaaaatttaatatctcttacagcaaaaatgttctagaaaaattatgtcaattaacataattttggtgagtattatatagcctgcaaatggaacggtcgaacatgacccggtagatcgaattttaacaacattttagataatttgaagcatgtatacaaattgggacctataattttcttaaaactgttttaccacagtttagtatacttttgattaaaatttataaacatgacttacatatagtttgtgacagtcttgtattgaaaagttatctcggtttaacaaaagaaaggttcaaccacgacatccacatcatatcggccgacgtccatgcccgtgacttctgcgtcctacataacaaccgatagcaacttgaaaaatagacaacattatcttttagacatttttggcaagtttgactggctggtttcataattatttttggacatatgcaaaaataaaaagatctacataaagaagagggtattcgtctgaatcagatgaagattaataaccttgaagtgtttgatgaggcatgtgatttttgcttgcacatccacacacaactctccattaaccacaatactcaccgttatttctgaaatttatggtgtagttgtacttgcggaacaatatgaaagtgaaggtgagatcagagtttatacagttgtggaaacaacttctttgatggttgtagatcccgcaatcgtagaaacaaccttaatgatgattgtagtttcgatgataaatattggtccattttcttagcaaacaatctcctcttctatacttgtcaaacattcatattctttggtcatgcaattttgtttaatatttgatgatgtttgaatagcggttgtacaaatgtatttactttctaatttttattttaagcatgtatgaagatactttaaacaaattcattgtgagttttgttcaaaatatatgtgaacgtgtttgtactagttggtgcatatttgaccgtatagtctccatgcttaagacatccttaaatcgatacatttcattattttataagttaactaatttgcttcctttatatctttagtaagtaattttcgtatttatagattcctttgtgcgaaacgagagtttgaaattgcttttgaataaagagtaaagtgtagtttggaggaaaatgaacatacttgtccattttaagagagttaattaatacttcccgtcaatgtgcaccgttaacattgctgtattagctataatttcttacagcttgattgatcaaataagcagcggttatcgtcggttagttattaacgatctactataatactaatcactgaaaacagaaccggacatttaagagaatagttgttcaatgaccagccggtccaattcaggattaacatatttcaaacatcgttataccatctctctagtgaatattataatatgtgcatttgtaatataacaaatgtgtacaaacaaatacaccatttctcatcggaatagaagaagcgtttcttgacctgttgaaccattggtagaggattcgctagagtcctgaaggcaaagagctggcaaagaagtcacggccgggatgagaccaatgtttaggtcaggcaaatgacttcgtccggtactagtactatcctccgagcaattggtacttggaatgggcaaaattgttacaccacatgattcggataccgaagaagattgatcactaataatcttggtttcatgttccttatgtgaagaatggaggtgacgtctagaaatgtagttggtgtgatggtggagacgatgattggttgggtcgattcccatttttacgagcttcctttttaggtaagtttcccaatggatcctaacttcgttgtcggttcgtcctggcaatcttcccgctatcaatgaccatctgaaaaaacataacatcaaaatgattattagcacgtaccgttcacattactattgaattaaagaataagaagaatgaatacgaacctattgccaagaagtgcatgaagcttgaggatgagatcgtcttcatcttttgagaagttgcgttgtttaacttctggccttacgtagtttcgacctctcaatcgacatctcttacggtgttgcatacctaagagaagggatcaaaatttaacaaattaaaacgatatatcgtcacaaagtcacgtatgtacacatgtatatctatgaattctacatcgacctctttaaactatgaataatttggtgatgtgaatagcaaaacacatgattaatactgtttaaagagaaaatagttaccggaaggtggggagagagcacgaaggcgggttttgttcatgtctttttcaaagtgagattggttgagttatgtctttttttaaaactgttgatagattgtgaggtggtttgcgagaagaaactgatatataggattaggggatggcttgaggaggtttgacttggactggtgggttgagagaagcgtgcatgctcaatcaaactattaatgaacgaggaagaacaagaagaatacatcaaccttgttaattggtcccacatttaggagttgaaacaaataaaaattggtcccatatttgttcaaatccattagaatttgtggaatcatgaatgtggaagtgtgtcgcatttaatttgccttaccaataccaatccaaatctcgctcttatccacattttcgtaaaatatatgtacggctccgatagataccttttgtgaaatatcaaagatgtgtgtgtggtatcaataatagattcactaaaatatatattaagcaagaagaagacgaagaagatatttgactagtggctcaaaattatttggatgcattatttgataaaatatctgaagcttccgaatatgacatgaaaataaacaaattaagagaaaataggaaaccatgaaattaaagagtgtaggttcaggaacagataagggagaaacatgggagcattcaattgaatttgactggtggttaggactttgtatacgaggaattttctaatttcactcaccacttccctatctcacttaccatctactccaaaatcatataagaagcaaaagagttttgttattgggcccgttaaagcccgtaactgttaaaagcccattaacaagctgcttctaatctccgaggccaagtgaaaaacaatgatagagatataacatcaatccaatcgaattatcttttaacactttctgtataagatatttatgtaatctgaaatctcaatctatatcaactcgtttgtattctgcactcgtaattgtaaattgttttcgttttagaattatagcaccattgcaaagggcctcatcatcatattgtcttcatggtccaatatctgcaatgccaatatcatacagttagttctaaaagaaaaagctaaattcgtcatcaactttttagtattttaccaacttacgtgacagtggtaaacatagcctggctcttgagttgcgtcaaaggagtaagattcgtttgagtgaatgtaagaaaatctaacgagtatcttcgttacatgtcccggcatcatcttgaatacgtttttccatccccgctcgtgtaccgtaaccgcggtcttgttccctcgtgcgtatttgctaatctcacacttgacggcatcgtttcttttagtcatgcactctatgaactcctcactcttcaccaatgccgtttgctccaatactttaaacaatcccaagtgaatgtgcaacggatggttatcctcggttaagtttatcacttcccacaccttcattattgtaagcattaaagatttgaactatacggttagtgaatagtgaaattttggttataaatacctcgcttgtgccgatttttggagtttcggttacgggagcgttgtaaggcagaccgttgatgtatagatgtgttggctcgtcaatgcttgacacatactcgaacatagcaatgtaacgtgtacgtgtggaggttgatacatgagcaggagggtattcaattagcttcttcggaataatcgacgtgtcaacttctgatttgtagttgattataaacttcatgactttgctgttctcttccgtgacgggatctcccgacgggtaaggataaggtgcattgttggcaagaattgccgttttcgatgttgactttgaaaagtcaacgagtacgtcgacaatctccgacggagctaggagaacagatttggtcgatactggtttcgctagataagcggaatcggaaccaacgacaatgaagtcgagaccgttggagaagaagaaccggaagaaccttgcgttactagcgtttgtgattcgaaatctatatttccggcggcggacggttaatctcggccatgctttaccgttcacaatgatggcgtcgccgaaatactctggctgccattgtggatgaatcgttggattgttccctgtagcgttcatgtaaatggaaccatctttacgaaaagatcggtcaaagatgaccaaaggacgatcgaattcgcgtccggtaggtaaccgaagaggcgattcgactgagctatgacggagaatgtaagagcctaacaaaccggcaagaaggttgactctggtcaaccctgccgcgtggtcatggtaccacatgtttccaggttgttgcttgttgacgtaatgtgtagtctttttggtccatttggaaccagtttctttgaaaccagcggtgaaccatgaatctgcatttccatcgctagttggttcgtggatacctccgtgcaagtgaaccaccgtgggaatgccgccgtgtttagggattgccggagagattgttgggtcccaagggaggatatgatgtaaagggaggtgatttcgccacgtcacgtaggtgtcgacgccataaacagcttctattgttggtccaggaactgttgctgaacgctttgatgtaccatatgcgaacactggcgtggcaggcaagtctctgtggaatttctgtacttcacaatgatttaactcatatcagtgtgtgacagagttagagaaattcaaaaacttaaatcattcgaatcattagcagagtaataaaatagtttaaaggaacagagcacaattagctaggccaaagtggtagaaaagcaatcataattatatagttagtgggtaataactttctatcaattaatcattagatttgatgatgttcttagtataatttatcagaacaaaacttaaagagcttatagaaactataaaaaaaatgtgtattcattcggtaggagagcaaaataatattaaatttgactagttataaaagagcactgattcgtcagtactataaaccaatagatatttttctcaagaggacaaataagtgagaggataagagtggagtacacaagatgaatcaattccaaatcactttaccaaaaaagagccgtagccaactaaaaagcacttaagttttcactgatctatacgatttcgaatatttaatgttaatttttgtcattaatgagtttagattagtttatgaacaaagaggaatttgagtattcattcggtgaagggcaaataatattcaacatgacgagtgataaaaagtatacaattattaatactttttctcaaagacgacaaacaagtgaggggacaatagtgtgaacacaacacgaatctattctaatcactttacaacctaagaagagccgtagccaagtaaaaagcaaattaacttcactaatcttatacgatatcgaatttaatgttaatgtttttcattaaggagataatgttcaacattagttagtcggcttaagttggtcaagaaagttaatgagtctatttttttgcatgtaatacaggtgtaaatcactaaatgatggttatttgaattttctatctaaatattttggccatttataacctcatgacagaaatggaagatgatctgttttcacgaacgactatagactggaaatttaatttaataacataccaaatataacttcaagaaaacagagaaaacaagaggaaaatatataatagaggaaagaaattagaaaacaaggaaacaaaaattagaatataaggaaaatgagaagaaggaaagaattaaatacccatttcttgaagaacatgcctatgtgaagagatttgggtttgaggaagccattgacgaagtggtagccatgaagtgttggtatatgaggaagcttgtcaacgaacatctcaagcttcccaagattaaacagtcgctcctcttgctttatgcctccttcgtctccggttacgagccatgccatcgttacgattagaagcaacatgtctctggtcattctcctccgagaaggctccatgtctttgtccttcacgagctgtcgaaattatatgagaaaagtcaagtgtgtgtgtgtgtttgtatgtgtggaatacttaaaagttgaggagagaagttgaagaagttctttggggttttgcgtatttatgcatacgagtgtgtggtgtcaaataactttgttgttctttgctttcattctcttgactattgagtcgctactttcctagaatttatcttccaaaaaggaatggttttttttttaattagtaagcttctacattataaaactagaatttgaatattatatgtacatgacaagagtattgatttttcttaaaaaatgaatatatatatatacgtatataatatatccattaattatatggtttatatctatcaaaaattaactgaaaattaaacagggttcatacttcataattctttttgtgaataacaaggttaatagttctgtcttctcaaatggatcttttacgaaaaaatcaacattcttctaatggaactaatacaagaaagaaaccatggaaacttttgggcctagttcgtccactatatttcgtcccgttattaagatattttctctaacttacgcgttacaaaaaaaattagaatgagtttttccaatctctcaaaaattgtcttaaccatgttatcgttttagctccttcagcctcccgtaacatgcattatcgcagacctataatggttaaagctaaggttatcatccaagcttgtgggaggtctcacaaacattccttcactaaacagatctttattcgcatgtccaaacaccaaatttcaaccattgaaatttgtagttatgtttgccttaaaggtcgaaccatttctctgcgagttagccgaaatctagcaaacctaatgttctctaaaactaattctttttgttttttctgtttttttttataaactttttcttcattaatattgaaagtagcgaaaaagtaacccatcagtctataaaagactgacaatataaaatatacctagccaggcccaaaatgaacccagcatcaacaaataatttttcaaaagggagaatcaaaaacagcccaaaaacctaacatattctttatttgttacaagttggaactatagttccttttaaacttctcttgatgctactccaaagattatcatctagcatgagttctaacgtaaaaaacacgcaaatagtggttatacatatatatatatatatactctatgcttttcatttgaatacacatcatatattatacaactacaatatatattcatgcttttaaaaaataattcagacaaatccaagaaacctaaaaattaaatttaacaagaaaatacaccaaattaactttttgaagagtgtgaggaaaaaaatcaaattaaaccaaaattaatcaatttgactctgaatcaacaaaatttaaaacaaaatcaaccattatatatacaaagttcctattatatacagattttgtgatcaatccagttctacaaatttcaggtttggttcgtttttggtttcacagataattgctagtactattgacttttgagcctgtctatgttttggtgttcctagtcaaaatgactggaagccgtcgatgtctggggtactgtacacgtggaggttatccaaaagcccatctcccacctagctaaaaatgcggttgtcgccatcaaacgacgattttaccttaagtcccaccttgatatgttcaaacgcgcgtttgcgttttcccttcgtgtgccgcttctcatctctccatttgtttgcgtccttttcacagtttcaaatctaacatatccatttttgtgtttcaactttcgagttatgcgaagtcataatttaataatcagtcatatcagtttcgtcccaaacagttgatttgaaatatccagcgagatacttaaatgtcatctcatcataagcaccataatattatgaaatttcaaattctaatattcttgggattttatttaaagatcactcattctaaggattaaacaggtgtttgttttacgtgaggcattaatttgttttgagttgtacaagaataaaatctcccagtatattatatacaaattcacagcaaggtttgaactacaaaaatatattaagattagactataatgtattaaggttggatatgtgcacggtgccacagttttattcgaagaataatatattacatttctgatcatccatgcatgtaacaaacatactcaaaatagttataaagaaaacaagaagcagaccaaattgtgcaataaattaaccgtttcgtaagaaacacaatttctaatttcacttacaaattgacttgtctccttgcgagtggtcggaaatattttgctatggttacgttccaagttaattacggttactactaattttcttgattagttacgcgtcattttctaaacctaaagtcatttactaagaaagttatgactacaaatacctttctttttttatggctgcatcatcagccgcatatctacttcgattgaggaacaaactatatttaatggctccgaagaaaatctagttaaacgctgttggatcttctatgtgtcaaaaactacgtaatggaagataaaatatagagataaaaagttgatattttattatctgatgatgtatggatttcacttggcacagccgcatagattaccacaaaaccacttcacaacacttttttcgctgactaatttgccttcacaaaaccaacaaaactccaacagcacgtagctttttgtttattttctcttaattaatttttaaccaacctgagcacttaaccgattttccttttttcgtatttatttttaaataacttcaattaattccactaatataataatttgcataatcgtaaataaaaacataaatcacccgaaaatactttgatattaaacacattgattatacacattccactaacttattttgaaatattgaaatttttacacaactagctatagttggttcttcctctctgcattaacataacaaaaagagagagagagagagagccaattgcttgataaaaacgttacatgctgtggataatactactagagtaaattatttattacataacggtgcaagcgttgggattctcgtcgctaaaaagagaaatgtagtggttctcgggagctcccggcaacagctgcaactgcgactgctcagatttcctgacataaccggccggagcttttttgtcgtaagttccgaccgcgtatggatatgcgaccatgttgtaaggaacgtacggccatatctccgcttttttccctgtcctttcgattctctttaataccttctttggttccacgtatccactcaccgtcactttatgtatctttctattcacctccaccgatttcacacctgcgcgatttttatattgatataaagaccgtgttaatttggcttgttgtatgtagaaatggtttggcgtgcttacatgagtactcgtttaatggaaatcaaaattacaaaaaaacttacagaaaccattcatgacataagtagtctacgagttggagattcgaacctttcatggaggaaaccgcgttcttgactctgcgttcacaaccatcgcagtccattttcacctttatattcaccgtctgcatgactttccgcttcctcctttttctggtgacgcggaagtagtcggagatatactcggaaagagaatcaagagctcccatgtctattactctcaccaagaaagatcagagatgcatatattatggactggacttgaccatatttatagcaagtacatggtgacttaatggacaagtgttatgccgaggattaagtacaattaaatgtgtttaatattcgtaaagtgtaattagagagatgtatatgtggccctctaatgatgttttcctccaaatacacacgttggacaacgaggccaatgtttttgggctaaagcacacgactcccgccgatttctttgttacaaaattctaatatccgttttatattaaaaagctaactataataataataataaacagaagagtttgtagttataatttctttttttctaacaatgtccgatcggtcgtttataataaaacaatgtcacgggattagaggtttatcatccacatcacctgagtcacctcaaaattcacatgcgtcaaagttaattcattgagaatggcaattatggttgtgtagattcttcttttaccatctaatctttttcttttacaattttgtttatgatcattttcgtcgtatacatatatatgatgtcggtatgtatatataagtttatgaaaaaattgtaatcgtgtattgaaaacgacatgacccttctaattaatttaacacttttgttactttggataggtacacgatcggatgaatgataatagggtttatagataaactacacaatcacacattcaattatttcaatttaggtcagaaacagtaaaagggaatagttataagagaaaaatagaaaggaatgtagcaatttaaagggcaatgattcgatgagaaaaaataaggtgtgggggtccgatcttatacgaagtagacaactcaatcaaactatttaggtagtctatagtttgaaataagaattgttataaagcccctccacatctttttattatgtacatttagacatttttgttttttgctttatactttccaccctataaacttcgttggcattttcttctcttacaccccaattatcatattcttcttagacctctttttttttttccttttacaaaattatattttttctatttttctcttctaagctactcaacacaattgatcgaatttcaattttgagttaaagtaccccacgagtaattcttgaaaaaaattcagcaatatactaaagaggggtgttaccgatatgaagttaattccataagagggtttcattgaaatagccagtgacaacataaaatctcgagattaccaaatcgacagctattatatagcatgccatagcatttagcatagcctcactttcaaaattaaaggttactaaatcaaggaaacataagctttgatcaatggattatgcatgtccacatccttcatttacaaaaaagaacacaacaactgtttttaactatctactatttgtgaaaagaaaaaatcatcatagcccattcaattactttgacccattcttgtttgtttaataacattgacttgtccatttctcataacgaaataacagtgttttctatatggtgactacatcatacacttttgctcggatagaaaactgtctctaaatgctcagagctctgaaattttggatagatcatagatcataactattcaatagtccaaaaatatcaaacaaaatgtagtaatagagataaacaagaagagaaaacagagccatgaaacccacttcagccaacaagttgggttttcctcagcctatccatctttacaaccaaatccgtgactttatctttccggccttcatcgagaagtgtttgtttaagacggctaaacatatgtcccggtggcctaatacccacatccaacatctcattgaaatactcacaagcctcgtctaatttgttctcatggcacagagctgtgatcaaacttgagaacatgtgcattcctggaagaacacctttccctttcatctcgtcccaaatcttgatcgccatatccaatctctctttgttacaaaacatcctcaccatgatctcgtaagtactcaccgtcggttcacaactcatcgtctgataaacttcatacgcttctttcgagcgctgcattctaatcaaatgatgaagaattatatcataagttctagcatttggcccaaccccttttaatctcatctcatcaacggttttgtatgcgtcttccattcgctgtgaccagcaataagcacctactagcgcattgtaagtaggtgcttcaagaggaaacccggaactctttgatctctcaaagaactcaagagcatcattcaacttcttctcagagccaagtccattaatcaaactacagaaaatgtgaggacttggcttacaattcctctgttccatctcattgaagaatctaatagcttcttcatacttcttcgccttgcaatgcgcattgataataataccgtaagcgacaacatccggttcaaaaccttcgtctttcatctctctgttaacctcatcaactctcaaaagattcaactcctgaccccaaccttcaagtagaatagtataagacttaatatcaggctcaaaccttttctttttcattttatcgaacaccttctgtgcatccccaacatttctagatttgctcaaagtatcaagcatacgattaaaatcacttgattccatcttaaacccaaactcttccatcttatgaaacgcacctatagcttctttaactttcctagctctagcgtaacgtctagagataagagcaaatgtctctttgctcaaaagcttttttgctttcatgtcgtctactaaactccaaatgagtttgaattgtttgatcttacctaatgattcgatcaatgcgttgtagtttgaagtagtgtgcttgaaacccttttgattctctgcccatttgaatacagacaaagctaaaacaccagcgttgcttagcttcttcagtacttcttcgattaaggctggtgaaagtttaacagaagcttcgttcagcaaagtttcaacctttgaatccgtgaatttggtgagaatcttgcagattctctctgcgtcttgtgaagcatcattagcagaaacttgggtttcaacagaagaagcgtgaaatgatccgtaaagtgtaaagtttgaagctttatgaatccatggaatcgattcgagactcggtgacgaagacgaagagattcgagagtacacacgtcgagagagattcactccggtgactctgaagaatcgagagaagaccattggaggagaaagtttagatctttaactttcaattaactaagatacaacagaggaacaaaggtttatcaaatttgcgaacaaaagttctctaatggctttaacaaaggaattacaaaatctgggaaagagaataaaaatatctcctttctcttctctttctccttctcctcgtataaatacagcagccactgtgttgttgcccaaagaatttaaccttacagagactgaaaacaatgtagtctcgtgtgtcgtataatcacttgcattgattcgattgtgaattcaaatcatcaagaaaattcgttattgtttcgtctagcttcttagcttgaggtccagctttgacaatgtttacttcatcccactccgagcaaggatctgtccaccagctactgtggctcgagcaccaagcgccaggagtgactctgtaacgtccacgtttcaggatctctctatcgaccatgtcgagtactggatcatctttcttgaattgtctagcgaaagctgctccgctttgagccatttggtcgaaatccgatatagtaaggaaatgtggttccatttttggtggactgtcccatatcatgtatcgtaagtccccgttgactgtcgtgttactgaactccggtgcgttgcatatcaccgtgtggaagtagcattcttcagagagaatgacattgttaaaatacatgagaaggattcttggtaaattatcccaaccgaagatgcagtattctaggaaaggtctgcttagtacaatccaaggcgagcctgcagtgatatcacaaaccagcaacatgagattgtatacatataatgaatgtagccagagaaagtattattagcttctgaatcttttgcctgtaaagactttgaatgcatctggtgttggtcgcttttcggtagcagtgaagagctgagttcttctagctaagtaaagtgctggatcaacaacaataggcttgattctctgagatctacataaagatccattatcatcataatccccaccaaatgtacaagaaacagttcaagagactggcaaaagttgtttacttactctttccaagcaaggtcactagtgtgatcaataaaattgagacttctgttcaccgaggcaaacacatgagataggtctgagagaaatcatgagcaaagaaaattcattagaatccaggtcataagaagacaaacaaacaaccagtggagtaataaagttctaaatcagattatttgccataaagagatcagtgaaagtgattacatttccactttatttccagaaaaagagtatatatattctagagtatatcataaacactgcaatctcaagaagctaagagcagaaactagaacattaaaaagctcaaagacaggtcaaaaacaaagatctagagtgaaaatgaatcaaaatcacaagcaaactaaaaagctagtttcttctctagtttaagattaaaatagaaagaaatcaaaattaaaacataccatcttgagttatgagaggataatccaaagcactaagctcaataaaccaattccaagtaggatcaagcttaagaagaatagaaacagcgtgaagagtagaagcaatcttagaagcaccattctcagacaaacgatcaactttccctaaaacatcaacattcccaaaagcattcacagcaggaacagatttcaaatcagagagaagagctagcctctctgcatcagtagcttcagcacccagatggataagataccgattcctaggatgataaaccgcaagcaataaccgagagatccggtcattatctccacgaccaccggttatgtaataagcaaaagcaggtgggtaatgagcaccgtgacgaattgaagaagggaatggtttagaggtgaaagcagagatagaataaagtaagagaaggaacactgagaggaatactacagagaagagtgtgaaaagccatttcttttcagctcccattgttcttcacttcttcttcctttctttgatttgttagaatctggctccgattgagcatatatacggattcacagattgaaatctgtggttttagagctcatatatggatctttgaaaaaatggaggaagatgagatctcggtgagagtgagatcgaacatagattgggatcagagcctgacgagatctcaagaagaagccaatggaggtaagagagaaaaagaaagagagtgagtataaaggttggggtttgagagacgtaaccaaaagatttagactttggaggctctgcagaagaagaagacaacgagattcttaggttcaaaacttcgatctccgactcggtcggttgtagaaaaaaagaaaaaactttggcaaacttttaataactccattgttaacagtaatagctaactttcttccaccacttccaatttcaggcgcgtgttatacacgctcttgtagaaaaagacaaagaaacctgcgtgttctgttcttcacgcgcttattacagagagtgaaaataaaagtgaagggtggtgtggtcgggtggttaaccagtcgaggagagagatttactttactaattgaattaattaaagagtaatacaagattactaactaataaggacagctttataacacgagattctggattttaaaaaatggaaaattgctactcctggaatagtaactggatctttatatcatttgtatttactactttcgtagtaaaacataaatttttacccttttggattcttcaaccaaattattcagacaaagtgtctcaaatatggaaatattgtttgacaaagttgttgggagctggttgttatacggagttgacttcatcttcatcgtcacttcctccacttccacggctactgcttccactactgctttggccgccgctgccacttccgctgcttacgcttttgctacgaccatcactgtcacttccgctgctacttccactgctactgcttgagcttgaggtttgactcttttgcacctctgcgttcacttgtgctctaagtgcttctgctgcgttaagacctttttctccttcaccgccgctatcgtcatctacatctgcaatctcttcttccgtcatgctaagctgtttatttaagctttctacatattctccaccatcagcgttctctttctctgcattgtcgttctctggtgtaaatgagccaaatatttcaaccagatcgatctcttgatgctcatctccatcatcgttcttgtcctcgactggtgaggttgcaggcacgtttccagtgttggcaggttcagctgcaaccactttttatgttagattttaaaactgttaaaatagttttaaaacaaagaccagaaataccatatacatgcttagaacagtagaacggatatgtacacttgaatcaacagtttgatattcctgcctagtctcatttgactacaccaatacagaaccgagtactcataacggcattaagaaatgacggaataatccgactactaaaaagtagtagtcgaattggggaacagagctgtagttttaattggaaatcagacgtctatgtactagcaaccaaaatcaaccaactatatcttaagccaaagagactaacaaataatgaaaactatgatacgtttgcctatgatccaagaatcaaaatccacttctcaaaacaaaaatagcaataagatgggatttaaaatgcataatcatatgaataaatcacttcaataactgctaacctgagttctctggcttcccaatttcgattctttccacctcaacctgcatacattacagaaaatgtaaacttaaaccagtagcagcaacattttataccatcaagcattcaataaatacaaaacctgaacacatcaaattggataaggaaaaagtaaaaggcatttggaaactcacaggcacatcaggaagcaaacttctattgacttgtggagatttagcagcacgaccaacaggagataaccgatgctccacaggcaccgcagattgagaagccgcagcagattcaccaggtgtcctaacatgtcgcagctgcgtaacagcccgatgcaacctctctaaacgaaacttctccccatcgaaaaacaacaccgcatcgctttctttgtaatcctcactactaccttcaaatgtcaccttgggtttacctggttggttattctgaaactcaactgaaactctgttatccttcttcttgtgcattgatcctgacctgttcttatcgattgaagccggcttaaattcatctgcaagtacacaattatcaaacatcttattctatgtattccaatttaggtcgaattaacccaaaattaagaatggtaacataatcagaaactcacatcgcaaagtgcagaatttatgggaggagtcatctttggcagaggaaccaaggacaagatcataccattgatctgtcttcggggcagtactaggctcatctctggagtgattcgacatcttcgaagctcgatcaacgattgctcaaggtgaatccatcgatcaaggagacgaagatcaaatccacgagactttgcgaaacttgagatatctccgattctcaaattgcggaggacccagaactgacgcagctcacgtagggtttttcttttagggcagagaagacgaatccgagatcagaattttggatccggtacccgccgattcatgctttttaatcttcttaaccaattacgtacagacacgagttagtatgtctggttttgggttccacgtggatctgtttggtttgcggcagctattttattcccacgtgcgattactgatcaaatctcaagccaagcgttcccttttgtcgtcttgttctgatttaatattaaaccggaaatgaccgatcattcagccgctagtgtttggtttgtatattttgacgcattaatgggcttataattgggcttcttttttagactcgtgttgtcgctagcccaatggataatctttgacagtatcgttcaaccacagattatcttcttcgcacgatgtgataaatacaaaattttcaaatcaagaagaaacttcaagatacaaaattattgcaatcagtagatttggcgtggatgatgcatctgtcatcgcaatcttgtcttcttcttcattgacaagttccatgtgtattgtgtagctccaggtgttgttctctaatcggctttatctctatccaaccatcttcacgactgtggtctaattgatttgttagtgttcttctatttcctggttcagattcttcactgctgtgtatagttcttctcattcaattacttgggttgtggtttaaatcaccaatttggtcatcttcttgtgtttttttctatcgttgacttcgagctttacatagtgagatcgagatgtcaggtttctccagtggaaatgttaattctagggttgtggatatactcagtggtgttgtgcctttgttgaagcttatctgtttaaccgtgattggtctacttcttgctcatcccaagactcaattagtcccaagagccacgtttaggctcttaagcaagcttgtgtttgctttgttcttaccttgtttgattttcactgagcttggagaaagcattactcttgataacattgttcaatggtggtttataccggtcaacgtgttactcagtgcggtcgttgggtccttgataggatacttggtagtcctcatatgcagaccacctcctgagtttaatagattcaccattgttatgactgcttttggaaatactgggaatcttttgttagctattgttagctcggtgtgtcacacgaagacgaacccttttggaccgaattgtaactcgagaggggtttcgtatgtatcgtttgcgcaatgggttgctgtgattcttgtttatactgttgtgtatcatatgatggagccgcctttggagtactatgaggtcgttgaggaagaaggggttgagatagaggagatcaatgtggagaatcatgatgctagtaggcctcttctagtggaagctgagtggccagggattgaggacaaagagacagaacattgcaagacaccttttattgctagagtcttcaacagcatatctagtttctctcagacttcttttcctgaagttgatctcgggggagaatatggaggagagagttccagccctaggtctattcaatgcttggctgagcctagagtaatgaggagaataagagttgtggctgaacagactccagtcaaacacatacttcaacctccaacaatcgcatctctattagcgatcattatcggatcagtgcctcagctgaaaagtgttgtctttgggtatgatgctccgctttctttcatcacagatagtttgaatataatgggaagtgcaatggttccctctgtgatgcttgtacttggtggtatgctctctgaaggaccaaatgaatcaactcttgggttacgtactacgattggaataagtgttgcaagactcttggtgcttccgttagtgggaatagggattgtgatgtcagctgataaacttggtctcatttcctcagcagatccaatgttcaagtttgtgcttcttttgcagtattcgactccgagtgccattttacttggagccatcgcgagtctaagaggttacgctgttagagaagcctcggcacttctattctggcaacacatctttgcactgttgtctcttacgttctacattgtcatcttcttcaaactcaccgttgagactactgtccaaggtatgcaataaatctaaagttaaatgtcaactttgtttgtaaagaatgtgatgttatcaaatacattgaacttcaatggtgtgtgttggtgagtgttggtggagtattaccaattcaaagtttaagaagttttgtaccaaaagtggcatgaaccgtgcacttgcttgatcttatttcgtggcctaaatcatcttttaaatagagcatcatcgtattcacatggttttagatgagatatgtatacacgtaacgtaacagtgacctttgttatagaattttaaacaaaagaaatcaaagatatggaccgtcataatatccaatggtggagaaaggctgctttagagagatgcgattggaatatgcgtggaacttacagaaaaacgtgttaatttcttggaatgtgaatcttttaattatagtttcagagaaaagataaatcattttggcttcgttgaagaatcaagatccgattttatggaaatgagtgaatggaagtaagtttttgctagatagtaaaaatcatgcctctcttctcaccatttagtcatatccaagtggcatggcctctgattatgttgggctcctgattggtaaaatatttaatgtattaaattcatatttcaatacttaaagataatcttttcaaaattcagaaatttccgtatctataaaatttagcctaacctttttaaaatggtctttacttctctaaaaagaaccgtcaaatacgaatacgattctaagttttttagtctttatagtcagtctctcacagattttgtgcattcaaatcacaaagcaagtcgcgtacaatgggttctgcattcgatccccttgtcacggccactgaggatctcgccgccgtcaactcggcgccgccactctcaaacctcacgcaagaagaactcaagaaaatcgccgcttataaagccgtcgaattcgtcgaatctggaatggttatcggtctcggcactggctccaccgcgaaacacgccgtggctcgtatcagcgagcttctccgagaaggaaaactcaaggatataatcggaatccctacttcaaccacaacgcatgagcaagcggtgtctctagggataccattatccgatctagattcgcatccggtggtggatctatcaatcgatggcgccgacgaagtcgatccggctcttaatctggtgaaaggacgcggcggatcgttattgagagagaagatgattgaaggagcatctaagaagttcgttgtgattgttgatgaatcgaagcttgtcaagtatatcggaggaagcggactcgctgttccggtggaggttgttccgttctgctgcgatttcacaagggggaaactggaagagctatttagagattcgggatgtgttgcgaagctgaggatgaaaatcggatctaacggcgaagaggcggcgccggctgtgacggataataggaattatgtggtggatttgtatttggagagagatattggagatttagaggtggcgagtgaggcgatattgaggtttcctggagtagtggagcatgggatgtttctgggaatggcgactacgttgatcgtcgccggcaaatttggtgttaccgtcaaggataggtttggataaaagtgtcatttgaaaaccattagggtttatggtttgattttgattttcgatggattctctctggttctgtaaaccctttcctcctattggtttaaaactttgacttattttttaaaactttgtagaattttgacttttggaggctgtttactgcattgcccctgaccttatagtattcactaaattgccccggaactttttcaatctacaaaacgccaggaacttttacgattttcttaaaaagtccttgaacttctgatatataataaattgccccggaagttttgatatttaagaagtattactgttttgagtattttccagaacttctgatatatatactaattgtccgaaaacttttaatattcaccgagtctgtcccaaaatcaaaatgttcgagtctcttcattggtgtttcgggaatatttgccgtcactgtcaaatccattacgcttatgttactggactttgtggtgtagtttcgtgaaagtaaacgagcaagatacaaaaaaaagaaaagcataatgggcctttttatagaacaatgggcttttgggtataaaattattttcaaattgcatcgaatgcaatttgacaacaatctatatgttggcagccaaacctcatcaacaagggtatatattgctcaacttgcttcgtttgtgtaaagtggattcgtttcgtgtcagattttagtttcacttcagaatattcacgtaacatttacagacttatagggtaaaattttaagaaagctaattcatatgccattgtagaccagcgcgaagaaaacaatttaataaaacaaataacatgatatgatattatataatattcatctagatcttcatattctacatgaaatatgtggttaggtagactcgataacaaaagaaattgaaataaaagacacttttttcaaatattttaatgggagaacaaaatatcatgttatgggttgtttttggcacaaagcaagaaagttgcatcctcaataaaaacagatctcagacattttgggttcacatgatcctctcacatgcttcctctcacgcatttgaacactcttgactctaccaaataacccactccaatggcatgttaatattttatgaatcacaaccaaacatatatcgactttaaaaacaaattagtatcttactttaatgttagaaagaaaaacttttcatataagagatacacttttttcttttcgtattaaagataaaagtagagacgtatatcaaataccaaacccaccactcatacacattaaagtgattttggtataaaaactgttatcagcttctttgtaatatagctctttgttggttgtaaaatgtcctagaatagtttcataaaaatgtaaggcattggagtgagacactttaatagtttaattgcccacgtcaaaagaaaacttttatttccgtcgatgtggagaaaaatgttgccgtcactaggaagagtctaaaaagtcttaagatcacataacccaaaccgcaagttatggtaaaattcaaagtcttaaagtcaggtccgaaagcaaatacttatttaaaaataccctcttttcctgcaaattactttgaaaaaaatatatataaaaattctatctcacgtaactcttgaaggcaacctacaataacactactcatgtgatagaaaaacgcaatccatgtgaaaataatcatgtcctaaattcaacctatatcagtaaaaaatttggtcaaaattaagaaaataaacgctattttctttaatcaaacaaacgccacacatccaacattagttactgataggttgtagtggcgattgttaaacttgtaatggcgattgaattagatattcaggtgaattgtatagactatagacacaaaacaatgcatgattgatagaaactaatacaaacttatggcaaaatacataaacccatagtaaaaaaacaaaacacatgactctcgaataataatggtccaatcaatgtagcagcgtcccgattaaaggaccacgtggctacagaagatacagccacaagagacaccgagacggaagggagggacgccaccaccacgttaagtttatttagatccatcgagtcgagtcccctagtgggacccacttgtactcaatgtgcataatcaaattaattgaatcttaatttttaaacaaccatgctttaacagaattataaccaaatcattaattgtcaataaaaatctttatatttttattttaccattttaatttttaaaaattaatttctttatcttctctcagatttcttcctatataaacccaatacattaccagtttaatacctaacaattactcaattagtacaagttgttatacaactaaatcttcatttgttaaatcatctttactcaaattgaatagtagtgtgcgtgtgaaaacaagaaaagtggaaaaggacaaaagagagagtaaaggacgcctcctaataaagcactcttcttccttttcactttcctcattgaagagagagccaaattcagcttaaagccccataagcgtaagcgtaagcgcggggataaatctctctcttcctcacctgcgttttcgtggagcatcttcttcaacaatggctgcttctccgatctgatcatatcctgatttgaattttgctatctctcatgcctcgaactcgttttgtcgacgtagcatcctagtgactgaggaagaagaagaagatgagcttctttatcctctccgtcgtcgttttcgtttctctcgctttcttctctcttccgcattccgttgattcatctgtttccgcttcacaggatcctctcagactcatattaggtttctcctctctttgttttgttgcacgctgatgcgattttcgcgtttgatttatgctgtttcgtttataaacgtgaatcgcggttctatgtttttcatcccaaacgacgcttttttgaagtttctgggatttgtagcatagtcttggttccagaattaccaatatctaaatgcttcttctgttaacgatctgctaaattcgagattagtttgcttcctggtagtattaagcaagcttatagaattgttatgaagtttgaattctgattatgtaattttggttttgctacaaaatcaggttcaccgaattttggaacatggaaaggtggaatctcattagcaccaggacctgaatctgatgatgttgtctctgattacctcctcttagcagctcatagaaccaagagacctgacattcttagagcttttaagccttaccatggtggctggaacatcaccaataatcactattgggctgtaagtccctctcctcttctttgtcatctccgattttattagttacaggatctgttagtaatgaacatctatttgcagtctgttggatttacaggtgctcctggtttcatactagctgttatctggctcttgtcttttggctctcttcttgttgtttatcattgcttcaaatggagaatatgtgataaagctaaaggatcatcattcgatacacgaagaatctgtttcattttgttgattgtgtttacatgtgttgcagcgtaatattcctcaactcttctacattgttttttggttctctgtcatttgaaatttgttgttcctgagattgcactggtttttttttttcagggtgggatgcattcttttatctgttggacaagataagtttcataccgaagctatgcatactcttaagtatgttgtaaaccagtcagactacactgtggagatcctccagaatgtgactcaatatctgtcccttgcgaaaacgattaacgtgacacagattgtcattccgtctgatgtaatgggtgaaattgacaagttaaatgtcaatcttaacactgcagctgtaacactgggagagacaacaacagataacgctgctaaaattaagagagttttctatgctgtgtaagttgccctgtactgttagctgagtggtaccaatttatgattaacagggaagacagtgttgatataactctgtatatgtacattttcaggcgatcagctttgatcacggtcgctactgtgatgctcatcctttcttttgtaggtctatgtaagtccagttgatgtgtatatgcttctttggtatctcctttttattagctgtgacatccacttgacttcaactttttatctgttatttgcgttattacagtgctttctgtcctccgccaccaacatgttgttcatatgtgagccttttaatccccaacttcttcattttcgttaatttatagtggtttaaaataaattgaaagctgactgatggggatgtatataatgatagattcgtcgtgagtgggtggatacttgtggctgtgacatttgttctttgtggagtctttctgatcctaaacaagtaagattttgctgttctgaatgtttgttttctcttgccttattaagtagactcgcaaatgtagtcaactaaatgtcattgttttggtgtccagtgcaatttctgatacgtgtgtagcaatgaaggaatgggttgataatcctcacgcagaaacagctctcagcagcattctcccatgcgttgatcagcaaacaacaaaccagactctttcacagagtaaagttgttatcaacagcatcgtgaccgttgtaaacacctttgtctatgctgttgccaatacaaacccagctccaggtcaagaccgctattacaaccagtctggacctccgatgcctcctttatgcatcccatttgatgcaaacatggaagatcgccagtgctcgccttgggaactatcaatagaaaatgcatcatcggtactttcctactcacctatctttgtatatcttgaacaaaacaccaccaggtctgagacatgtcttactaaacttctcttttcaggtctgggagaattacaaatgcgaggttacaccatctggaatctgcaccaccgtggggagagtaacgccagatacctttggacagttggtagcagctgtgaatgagagctacgctctagagcattacacgcctccattgcttagcttccgagattgcaactttgttagggaaacatttatgagtattacctcagattactgtccaccgttagtacgtaatctgaggattgtgaacgcaggactcggactgatctccgtaggagtcttactatgtctggtgctatggatattctatgcgaaccgcccccaaagggaggaagtgtttgcggatccacaccctcaaagaaaagatgatagctttggtaacggcttggatactcatcactcagatgacgaacctaagctttctgtagaatgcgtatagtatagaggtatagttagatagaatcagatattgtatttcataatgatatgaaagagaacaataaaaacattttgtagcgttcatgttacagtagaagaggaagaagagaccagaagtggagcgaagtttcactttctggcttttgttttcacaatgatttcgagtcttaattcagatacaaactcattatgaattctatatacaagggagatataagtattaaaatgtgatcttgttggtggcaagagccatgagattaaatggtctgatatggtttttgtttccattccataaagcttttgacatgagacggtaagtgtgttctgtgggatgataaaaatcccaaaacagaaactcatttgggttattgcaaatcttgtatccttctcttccacactgcatcaatcctcccagtgtaccgttcccacaacacgcgtttgaaacatccgaaaacccttcaccaaaaacatgattcagctttctcatagacacatttgaaaaagatctcaaagatggaagttaattaactatattgagtttaccgtaacgggcagggtaggtttgaaatctgtgagtgataccatatacagctccaaacaccgcaatggctccagggtacttagtggggattatgttcactatatcttcaagtcttttattatacatcttggccataacattcatcttaccaaagcatttattggttggggcattaggaagcatggctcttgcagggacacaacctacaggacctaaggagaagaaagcgatgcggcgtgcgcctagtttgtagatctgatcaatcgttttgttcacttggtctaacattgcgttcacataagcgtctggagaaagtgtaggagctcggaatgggaggaagtagttgaagatgtcgttagaaccagtttctaataagaagagagactcttggattatagatttttcgataaggttttgctctacaagtgtctggaattgctgtagctgggtttggatcggtgtcacgccctacatttgatatgtgtacttaatgagtgattcacaagaaacaaacattttatttggtcaaggtagatatttaccataaatttgttggtatcaagcaagagaccactaccagcactagcaaagttaatgccatttgaaaagtttgaagttccattcaagatttgaatctgcaattccaagaatggtttctgtaatggaaggcctacaaattccgctgcaattattgcgtcaagaaaagaaaaaagagacaaaagtaaggttccttgcagaagaagaaatgttttagttaacgagttgggaggtaatttgttacagatgaagtcagcgacggttcttccgttggtgaacctcccagtaggacggtggaaaaaggaagaaccataaggaggaaaatcagcctgagcggtacagtttttgttgtaatggttgtttccggcgtcaaaaatagagtcaccgaaggtaaagatagcagggacggtggaagaagacttggccagaacaaccggagagattagaagaagcagacacatgagtaagtccattgaagaagaagaagacatgggacaaatgagtttataatcatataaaaggagattatatactgacacacatatatatatatatatatatatatatatatatatacaaaattgacacggaaggcaagaacattgttcatgtttttgcacttactcttatgtgtgattaaagtttcaaacttattcctaaatttctgcttcttattacatagatgaaggaaaaaagagtaaagcgttttttcctttagaagatgggcttcaagccatgttgagaaatttcatggattttactgcattttcagctctgaggcccatacggcccacataggattggttagaaaaaaatagagaagtaaataagtaaagatgaaaagcatcagaaaaagagattctgaaagaataaaaacatattctttctctcaaatgctttccttttaatggagacgaagacggaaccctaatttccgcaaattcactatgaagcgtattatcagaatctcattcaccgacgcagaagccaccgattcttctagcgacgaagacacggaggagcgtggaggagcatcccagactcggcgccgtgggaaacgcctcgttaaagagatcgtaatcgatccttccgattccgccgataaactcgatgtctgcaaaacacggttcaaaatcaggatcccggcggaatttctcaagacggcgaaaacggagaagaaatatcgtggagtgaggcagaggccgtgggggaagtgggtggcggagatcagatgtggaagaggagcttgtaaaggacgacgtgatcgtctctggctgggtacttttaacactgctgaggaagctgctctagcttatgataacgcttcaattaagctgattggacctcacgcgccgaccaattttggtttgccggcggagaatcaagaggataagacggtgattggagcttctgaggttgctagaggcgcgtgaagtggggttggtaatttagttgttagcattagcaagaaggtctctctcgtattttgtaaattcatcttctgatgttgtgtatgatcttgatgtctttcgtctatgtatatatatgaaactcgagaaatgaactatattttgatttacacacaaattttaaggtacaaatttttttgaatttttaaaacgtttaggaaagaaaagtttgggttgaaataggctctttttatttgtatactattcaatctttttaccatttatggatcaacacataatagaacagaactctaaccaaattgaacgttaatgacttggatcagagttatattttgatggttgatgaaaagttgaaaattctttatatatctttccatcttttggttcttgtatcaccgtatcaacgatacatttttatactttggggtgtctaatgaaaaatactgaatttatcaatttactttgacttgttgaagactgatggccatgggtgaggggtttggagataaagaaagtaataaagaacatgaagagatcagctaaaccaagagacttcatcatacacatgatatatatgatcttctataatactataatagtaatgactaaagaggaaatgaatgttttcgataatagtagtgactaaagaggaaatgaatgttttgacaagaaaaaaaagaaaaagagaggaaatgaatgtttacatgtacgtgcacatgagtttaaaaataataagtttgaggaaacacaagtgcgttagaaaaaaagcaaacagatattttcttttgacttacgattatgaaattgaaaaaaaaaaggatctgaagataaattttgattggttcacaaacttcacatgataaacaagaagatttttcttttttgaacaaatcttttgataccttaaagaggaagatttttgatatcaaaatgaataaaaaaacaaaacagagaaaattttgtttttgattcgttttgatacctttatgaggaagtaacatacttatattcaaaatgaatcaatgaatcaacattgtaattaattaaatttttaacagaccgcttgactaattaaacaagttaagattataatatttcaacgcattattgtatagtactttggtgatttgcatgtaaagttttttttttttaacaaagacttttcttaatttgctataatcaagtgccattatttagatcgagagagaatttatggcggctgaataagagaggacgacgcatgtatctgtatctcgaggtgtagaatcaatatacgacacgccgctataaattccacagaagatatcatataatattagtatataaagtatagggttgattcggagaaagaggttaaagtattagattgaaacaacaaatctcaggggaagaagaagagagaatggattcggcggagaagggcttgcttgttgtgagcgacagagaagaagtaaacaagaaagatgggtttttgcgggaaacgaagaaacttagttacatcgccggtccgatgattgcagtgaactcgtctatgtatgttcttcaggtgatatctataatgatggttggtcatctcggtgagcttttcctctctagcaccgccattgctgtttctttctgcagcgtcaccggtttcagcgtcgttgtatgtctctttcttgatctttctctttttcatttttattagcttaagattctaaattgtggttgtggtaatcacacagtttggattggctagtgcgttggaaactttatgtggtcaagctaatggagctaagcaatatgagaagcttggtgttcatacttacacaggaattgtctctttgtttcttgtgtgtattcctctctctcttctctggacatacattggtgatatactttctcttattggacaagatgctatggttgctcaagaagctgggaagtttgcaacttggctcatacccgcgctctttggttacgctactttgcagccgcttgttcggtttttccaagcacagtctctgattttgcctttggttatgagttcagtctcttctctctgtatccacattgtcctctgttggagcttggtctttaagtttggtcttggaagcctcggtgcagctattgcgatcggtgtttcttactggctaaacgtgactgttcttggattatacatgacgttttcttctagctgtagcaagagccgtgcaactatctccatgagtttgtttgaaggaatgggagagtttttccggtttggaatcccatctgcatctatgatttggtatatcaaacttctcttcatgcctcttttggttttagtcatagagttgttgacatgaatctctttggtgttgttggattagccttgagtggtggtcattcgaatttttagtcctgctctctggtattttaccaaatccgaagctagaagcctctgttctctcagtctggtttgtttccatttttcttttatcttctatagacttggttttagaatggaatattatcataccaatcagttgctttcattcttgtttaacagtctttcaacacaatcctccttgtaccaaatcccagagagtctcggtgcagcagcaaggttctttctcactcaactttcgattttgcaaagctatctatctaaaacctgaaaccgcctctctgttgttgttgttgttgcagtacaagagttgcaaacgagttaggagctggaaacccgaaacaagctcgaatggcggtttacacagcgatggttataacaggtgtagaatcaataatggtgggtgcaatagtctttggtgcaagaaatgtatttggttacctattcagttctgaaactgaagttgtagactatgtaaaatcaatggctccactgctttctttatcggtcatattcgatgcccttcacgcagctctctcgggttagatgatctccttctataatgttttaagagatctaattcaatgaagttaagagttataaaatgtgtttactgaaacaggtgtggctagaggatcagggaggcaagatattggggcatacgtaaacctagcagcatactatctctttggaataccaactgctatactattagcttttgggtttaaaatgagaggaagaggactctggattggaatcacagttgggtcatgtgtacaagctgttttgctcggtcttatcgtaatcctcactaattggaaaaaacaggttcgttaagtgaaagtgatgtactttaatatgttgatttatgttatggtcaaataaattggctagtgggtttaggaaagtgaaagtgatgtgtattgaatgatattggcaggcgagaaaggctagagaaagagtgatgggtgatgagtatgaagagaaagaaagtgaagaagaacatgaatacatcagctaaatcaaacagtttccattccatcaccattaatccgttaaatgttgtgtgtttttattaattcgatgtttggtattgttgttttcgagtatagtaatgaaggaattgattgttcacatgagtttttggcctcttctttctttctattcacatgatatggtcctctcagttctctcccttattgaaaagttacaatcaaacttcaattatgatttgattcaccaaattgagtaggaattttttaaaaaactggaggcaaatatatatgaagggcattttaggaataaataatattgtagaaagagacgtgaagaaacggccatcttaacataaacgacgtcgttcagcgaattgtagaaatacgaaagtgttgtagaccaagtgcaaaaaaccctaacgtaggaaattagacttgaggcgtcgagaggtgaaggaagacggagatggcgaaaccaaacatagacgaattgaatcaaatccttactagttatcaaaacaccatcaacgatactctccaggttttttatttcaccatttcgtgtttttgtgtgttggtgatggatttgattactgatttagagacagggtttggtgaatttttgcagttgttcgagcaagttccgtctccgacacaagacaaattatattggaacgatgtccttcagatttctgatcatctctccaaacaagctactataggtttttcttttgccagtttctgtcttgttgttaaagaaaaacaaattcttcaattgttttgttgttttgtggcttaattccaatagtgggaatgctatggatcactggagaacctccaaaagctgaagcaatgaaggagactatggaagcatacttcaacgctcttcaaggatttttgctgcattgtcatggaagcatggttggtgctgggactacactctcttcgaccatacacgcttctgtgaagcaaattgttgattccagcttcagattgttgcagggttctgtttccttatacggtaataagaagactctatgttcttctgcttattgatttaagaagattacttcaactgtgtatatgaatttttctggtggttctgttatttggaaacagagggatcatatgagaaaggaaggaagcccacgattccgcagcttgcaggagcagtgtgggaagcatgttctaatttaaagaacgtgcctgaaacaaacatcaaagcgattggaagagcgatggcacatgtagctgtttctatgaaggatgtgcttagggagatgaaagaactgaagcctgcttcttcttcacctgatcataatgtttcgacaaactcggatgacgatgatttaggcgatgaactgtctcctgaagaatttgaagttgctaaaatggtagcagatattgtgtctgagacgctcgttgttataaaagagcttatccgtgctatcacatgcatgatcaagctggagaatccaaaggataatagtgagtttgtggattcgtttgagaagttactgaagttgtgtcaaggaattggtgtacagattgatgagcttggagcttgtgtttacccgccgcaagagtttggtctcatgaaacaaacagtggagaacatgagggaaagtattggtgagattgagtctgatgttaagagttccaagaattcttcatcagaagctttatcaggatcatgcagaaggctgcagagtttgattgaacatatggtaaccgagttggacacaagaatcgaagctgaagtagtttacaaaatgcagaatgttactctttagcactgagaaaagtttgaacttaaggttcttacttcttaacttctagtgtttcaggatatgtttttagtgtgaaacagttcatcttgaaatactaaatcctatttgatattgcaataacaaaacatttgtgagaggagagattcaaagaaacagatcttgaagaatatgaaaatgtgaaaggttgttcctacaatgcatgaatcagcttaagagcaaaccagagagaatacgaaggaattgataaactattctatagagcagcgaaatcaatgtcaagaaagaagctctgtcttcaatgcacttgaagtatctccacagacaggatacaaatggattcgatcagaccatgcattcctgcctcttgaatcgatctcggagatgcatttccagacagcactgttagccttaaagccacttccaaacccaatctgccatactttatctcccattttcattctaccttttgcttccaggtattgcagctcataccacaacgaagacgaagatgtgttcccataacgatatagagttgaccttgaagcttctacgtcttccttgtccagcttcagatgcttctccacgccttcaattatcgcccttcctccggcatgtatacagaaatgctcaaaagctttcttgaagtttggtgtgtatatctccttgtgcattccccattttctttggatgaatgagattatgtatttgagctgctctgaataaggtagcactcgagggcctaactgcaccacgttgatctttaaggcctttgatgctaccctcacaagctgcttggacaatgctactcccacttttccttcttcatcaacttgctgcattacactctcgtacgattcagtgtctgaaccaacatgagttctgataatatgctggagtttgtatttcgccttatgcgaatcttgcttcctattggaaagaagaatcgcagccccacccattctgaagatagtgttggcaatgagcatcgacttacacttccctctgtaaccatttggactaacagcttccatactcaacactagggccaaagaatcaccatgaatcttcataagatcttttacgagattaaccgaaagaatcccggcgctgcagcccataccgctcaaactgaagctctttatgtcactcctcatgccaaacttgttaatgatcatagaagttatggatggagaaggacagaataggctgcagttagacacaaggatgtcaatactctttggatctatctcatgctttgagaaaagatcttggacaatagcgaagaggatctcatgagtttcttctctagctgcagagatagaagcgtttggtggaatctcatggactgtcgcaggcacgctcgcgtcatcactaatccctgatcgctctaaaatcttctgctggagatcaagactttcttgatcaaaaacaccggaaatggtaagatgctcaatgaaattagagaccggagctcgcaagaagtcaggaggttgataacatgagaagtcaatgaggtatataatacatcttggtttgaagaaatagtaaccaaagacagctatgagaacacaggctgatgctaccaggaattggtgaaaagtgataaaggtctgagtgataaggagagcttcattgatgaaatgaaagctcgattccatattctagaaaccaaactgggaaaagagagaagcaagatgatcaagagttttgtttttgtggcatatgttggttatagtgtttagcataaaggaagtgaaaaacgaagtttgttgcatcacaaggtaagcatgtgaaaggtgtccaaaacaaggatgaaattcaggtctcgtgacctatatgagaatttgcatgcatgatttcatgggaaatgaacattacgtgtctgttgagtaacttatggtctctgttgctaatctctacctctatctcaccaactccatgtagtggaaagattgttgcatctttcaagcataatgctagcttgagagaagtgagaactttgactttgtaattggagacgaagaccagattaatacaatatgttaataaaataaaataactaaaatcaaaaaaaagaaaaagtcggtagggcaatatcgtctttttccgatcgtggtcgtttcttacaagtttcttcgttcgttctctagaaacgcagaaatggagactcagtatccgaaactaatcgaaccatccaagacccgaattggatggattgggatcgggataatgggatcagcgatggtttctcatatcctcgccgcaggctattcagtcaccgtttatgctcgcgatcttcgtaaaacaaaggatctgcaaaccaaaggaggtcgtaccgccaatagccccaaagagttaggggagatgagcgacgttgtgttcacgatcgttggaaactctaacgatgttagatcgttgcttcttggggatgatggtgtactctctggtcttaaacccggtggagtaacagtggacatgactagtagcaagccaggattggcgcgtgagatatacgcggaggcgaggcggagggattgctgggcggtggatgcgcctgtatcgggtggagacgctggagcacgtgaggggaagctaacgatattcgccggcggagattccgagattgtggagtggttggctccggtgatgaaaacgatgggaattgtgaggtttatgggaggagctgggagtggacagagctgtaaaattgggaatcagatttgtgttggaagcaacatgattggattagctgaagggattgtgtttgctgagaaggcgggtttagatccggtgaaatggcttgaggcggttaaggacggtgcagctggatcggcggttatgcggcttttcggggagatgatggcggtgagggactataaggcgacggggtttgcggagtatatggtgaaagatttgggaatggcggcggaggcggcaatggcgatgcctggaactgctttgaacaagcagttgttcactgtaatggtggcaaatggagatgggaagttaggatttcaaggcgtcgtcgatgttattaggagacttaacggcttatcctgataaaactagtgttaactaggcaagcttgttttccatttggttagaagttgctaataagaacatggagtctcaccaatctcgagaactatagttacaagagtgtgtaacattagtttccaattggattatcaacttctacctcctataactatttctctgttacccacttagcctataatcttaaacacgaccatcaaaggtcttacattatacaagtcaccaaagtctcttcaactgaaacgttggagcagctatattcaaacctttcttcctcggatcccttcgctctacacctcgtccatgtccatgtcttatacgtagtgagcactaacctgcagcccagagacaatacgtagaatggaatgaatgagtatacattggaggcaatagaatagccatctatggaatgacaatgcaaggaacaaactgaactaaagcatatggtctaaggtcatcgaaaaaactgcaattacagcctcatgtcaggttactctatctcaagattgtatcactaaaacctcttgatagtttaaggattgattgatttgtccaaaaaaaaaaagtttgattgactaacctccaatacaaaatgttaacaagactagcaagatgcaaagggacaatgacgtaagtacccttactcatcaatcctttcgattaaaagtatagccatgactgatgtgaaataactaaaatccagaagaaaaagagatttgagctcaataaataaaaattgagtgaagtagctaagacttattttttatgttctaccaatcgtcgtcgtctctcacgcaaattcttcattcgttctgtggaaacacagaaatggagactccatatccgaaactcatcgatccttcaaagactcgaataggatggattggcatcgggataatgggatcggccatggtttctcatattatcgccgcaggctattctgtcacagtttacgctcgcgacctccggaaaacaaaagatctgcaaaccaaaggagctcgcatagccaatagccccaaagagttagcggagatgagcgacgttgtgttcacgattgttggaaacttcaacgatgtccgatcattgcttctcggtgacgatggtgtactctctggtcttacgcccggtggagtaacagtggacatgactagtagcaaaccaggattggcgcgtgaaatacacgcagaagcgaggcgtaggaattgttgggcggtggatgcgccggtatcaggtggagacgctggagcacgagaggggacgttagggattttcgccggcggagattcagagattgtggagtggttgtccccggtgatgaagaatatagggactgttacttatatgggagaagcagggagtgggcaaagctgcaagatagggaatcagattgctggtgcgagcaacctggttggacttgctgaagggatagtgttcgctgagaaagcgggtttagatacagtgaaatggctcgaggcggtgaaggatggtgcagctggatcggcggttatgcggctgtttggggagatgattgtgaagagggattatagggcgactggctttgcggagtatatggtgaaagatttgggaatggctgcagaggcggcgatgcctggtgctgctctgagcaagcagttgttcactggaatggtggctaatggagatggcaagttaggtattcaaggcgtcgtctctgttattagaagacttaacggcatatcctgaaaacacttgtgttgtaaaacagagtgttccaatgatttcacgatcaactaggcaaacttgtcttcgatttggtttaagttgataataagaagaacatcgagtctcaccaatctcaataagaaacaaagggcatttatgaatggtagagtgcagcattttgataagattacagatcgctaacattagtttccaactggatcataaatctgtaccttctatatctaattctattagccagtaaccgtaaacacacaaactatcaaaagaaaaagatcatcttacattttacgagtcaacaaaataatctaccgagtctcttcgactgcaacgttggagtagctatgctcgaaccgttcttcctcggatcctttcttccatgtcttatacaagctaatcctgtgttttaacaaaatgatgtaaaacaatgagaacaagaatatgggtctgccacgtcgggtcgtttcatatacatgaggatgaaaatgtacctctcagtttgaacggttcttttcgcaagcatgagggtaaggaagacagggaccatagcggcacacagatgcttcagagaatgcccactaataatatgatgagtccagctatatataggcttatccgcagcttcttccaccttggctaagagatagaaccctgcaattccagacaattgaatctagaataagagccagaaagtaacaacaaagcttcaagagcaaagcaaactaaatatgtatcaacacaacaataagcactaacctgcagcccatagccaataagtggaatgtgtatacattggaggcaataaaatagccatcaacggaatcacaatgcaaggaacaaactgaaccaaagcatatggcctaaggtcatcgaaaaacctacaatcacagcctcatgtcagcttactctatctcaacattgtatcgctaaaaccactagagatagtttaaggatttgactaacctccaatacaaaatgctaacaagaccagcaagaagtaaaggagcaatggagtaagtacccttatgctcatcaatcctctcgattacaaatatagccatgattgatgtgaaagcaatagtcatctaaaccaaaaagcaatcgaaaccagtgatcaaaaacaaaacaaagcaaacaaaatctcagagaagagaagagaaagaataagagcgtacgggaagacgatcccagaggagagtagcatcgtttgggtgaagatgatagtaagaagatccaaaagcaacagcagctacaccgatgtaaaagcaagtccatcctattttctcacctcgcaaactgtttcaatacacagagactttaactaatttgaatctggatttcacaaagaagaagtatgtaattacgcacctaaagctaaagtaatcttctgggtaaaagcagaggataagaccaataaggccgatgatgaggaaagggaagttggagatgacgtttaaaaaatttggaatccctgagaaaatggatttgtaagatcaaaaccctaaaaattcaaaagggtatttaagaagaaaatgatgatgatgagagaagagtgtgaattttataccgaggaaggagcgttgatcggcgaaattgtggtaagcctgagattgagggattgtgggagtgacgatcataagtattatgaagattaaaatcgccgatccccacgcggacatcgttcgcttcttcatcgtcttcttcttcttctacttcagagagagatgagattctcaggtttgactcttcttcttttttttttttctttttggggtcgatgtcagtaaaggcgttaagaaattggaaatgttgaaattacaacgacaagggcaaaacggtaaatgccattgtgataagctttcaactctctccgtcatatttgttaaatttagtacaagttaaaactccgattagtactaacacgcataatggtggaatgcatttccgatttctagtacgataatgtaagaattttatcaattatgaaaatttgtatgaattcttaatgcaagatttacgttttcgtcttataaaatacaagtaagaattcattagacaaagttatttcaagtccaatgctcaacttatttatagcaaaggtaagccttgccaaactccatattcttttggagccgtgttgtcatttttgatttggttgttgtgtctttctcttggctcctgaaacaaaagccggctgattcggaaagttgaggttgtggtccatcaaagagtggtctcacctttagactgcaagatcatagtctatctgttgtatatattttgcttccatgtttttaattattattttttttatgccatgggatcaaatctttaggttatacatttcttgttaaacctatataaagaaactttagtcggcattctaacaacttgttttggaaaacttgagttttagcttcgcaaagaaatttctatttggattacaagttatgggcctttggtagataatcctctcggatcgggtactagagcatgtaaatcgtgatcttgaggcatactaagaagaggtttaccatagggagataaacataacttctacatctatatatgatttatgagattcccaacacgaaaccaaacatgatctaagcaagaagaggaatattataagttgcgatatgcatcatcaaagatattctgttgattctatacctcactatatatcatttgcactttgtgttgtcacgaagcgaagaaatgatgttgttctttaacactgtgatgtagtcatcaccttcacatggcttctcatccatctacactttcccatatacattttgcaattgttagttctctcaaaaaagaacatccaatgtatatatgtaaatactatccaatgactttttagtgccatactatcgaattgctaaaaactaattttgaatttagtttagtgtttttggtccatagatctaggatcagccattgataatacatgcaaatatatgtaaatcatccctctttatacataatgctacactcaaatccaggttcattgaggtcgaaacagtctctctcccaccaatagaatcaatatatcttaagaacaaaaaccattggtttatgaacttaatgataaaccattagtcctatatcttttctaaacgttatataatcttaacataatctcaatgcttagctaaagttaaaacacaatcctcccatgacttggaccctaaacatgtattgtttggagaagaaaagttacatcattgttcatatccatgaagactagcacattgtctccattctatcaaaacataaactaaagagaaatgaagaagataagatgagacacagtaccttgacatggaagttgtagcaaaccaccctttgctctcggcaaacttgagaagtagaagcacttaaaacactcaaaccttgcacctccattacatgaagcaagttggagaactcatcttcgttttctttcttcaagcatatctgtacaacagcctcataacctgattcccccaattcaagaaccgagattgctcgaatagaaggacctcgtctctctaactccacaagcttctgctttcttagagttagctctccaacttcattctgtagcttgggaatgtaagtgattacattatcgattatagatggtgcagaccatttcttctgccaatcagcaagaaaagttatatatagctcaacaacaagcagaacatacctaacttgtaataataacagtgaaaacaaaacctttgaagaagaagaagaatggtcaggaagaagagtgccaagagtgaggtaagaggcatgaagtctcatcctccttaaacgctccttagcgttatggtcttgtttctttgctgcaccactacttgagccatcaacctcatgcaaaactggttctttcctttttctttgtgattgacaagtgtccttctctgcagactctttctcaacgattgtttctgcaggagggatatgcaagcgatcatggagtaaacttgatattgaagtctgatgattcggttgagaagacatatatatacgacggcaagaggaacaaaaaagaggcttgtgctctttcctaccaccgatggtcctaagttaaacttagaactgcaattaatgtctaaaaccctaattaagttaacaagatgatcatgacaatgatatatataggaaaaggtagccttagcctaaagtcaacccctgacgcagtaatatataacaaattaagaatggcacaatgcaatgaagctgcagaattaaacattaatattgaatattaaaatgcttgaagattaaaaaataaagaggttcagggaatcacaggtcacagcaagttattagaagagaaatggtcgtatatctgcagtacataagaatttgtaaatgataagacctagagcgagcgagccagagaagagcaaaaacagttttatttgttttagagaagaggaaaacttgtgagacaggatttacagaggctttcttacctgattcatctcctccgatgttctacttctttgtaagaatgcagaggttgccatagttttttcttctaatgtaagtctctctggtttggtgtatgtatgtacgtggggggtctttatgcagtacaaatggcgctaaactgtagtacacagtacacacatttctttaatatttgtgattaactgattatatgtaacccgtaatctctcctctctctcttctttaagtcctttaaaatattttatcaacagattattgtatcctcgtaacacttgctgtttttaatctcctacttattggttcatttttcaattacttttgtgtttttgctactaatttctttttgtgtgtgtcatgaggagatgaatcaggtaagaagcctctgtaaatcctctctcacaagttcttcttctttgtaactattagtcaaaacgagtcatgttatcgaattttatatgaaataatatgattatgaagacgaattagatgaaatactaaaagtacttaatgtttctaattattaacaaaataagaagattcatcattactagaactagtaaacaaatgtaattacaaacaccaattttcgaaacaaggtgggcgaccaccattgattttccttaccaacaggcaacacataaagaatatgacaaaaaattgttgaaatctctctctgagtagttgtgtcgcacaacaaaacttgtgtgtttctaggaaagactacaaacaattgtgtacataatggatactacccaattcttgtgtgtttctaggaaagactacaaacaattgtgtacataatggatactacccaattctgtaagtgtctttagtgacacatcgatctttacttaaaaaaaaacaaaaagcttctgggaaaataccatcgatcttttgcaatccagagataaaaaagctcctgcaagttacaacgtccaggacatataaagcctcaagaagaagaatctggcttttctcattcatctgttgtccatgatccaaatcccaaaacagatactgaatccaaatcaactcccttgttctctctattcaacaattctgacctctctgtgacatacttttcatcattcaagttgcctctgtctactattccaaccattcctccctaagtttgaccttgaattccgttcctctagtatgcggttagcccgttcaaggatcatgtcagtccgttcattaggcacatatcctctccgagctattctttcaaccatctcatatgcatcttccgcctggttcattacaatcattctcaacagcatattgtacgtgtacatatcaagaggatagcatttctctataacttcatctaaccgcttcagttctacttccatatctattcgtcctgagaataatcctatcaactcaccaagtgacttcatctcagggatcttatcttctatatttctcatccgtgtccatgcttcatacacccctttgctcttcattgcgttatgcaaaaggacattacctatgaaagctgtaatacgacgcccacttttcctaaattcattgactaatccaactgcctcatcatacttttcttcgttgcacaatttttgtatgtttacttcgtaacattcgatactaggctgtagtccttctcccttcatttcttccaagaaatgcatagcatcatccaatttatttgctttacagagaccaacaatcataacttggtacagtctttttttggtcttaccttgttcacgcaggtcatggaaaaagtgaagagcatcggcgattttctcattttttagataactctgaagcatgagaatgtttgaagctactgtgggcgtgataccatctctatccatcatatcatacactagtcttgcaagttttggttttcctgcaaacccagctccttcaatgaataagttgtaggcctgaaccttgtgttcccaaagagacaactgaaactttagcaaagtagtaaagaagtttttttcaccactttccatctcacaaacacattgaataacatttcgatagagactacgggtcggggtgtagcccttttcctgcatcctgatgataagtttagcagctatgtctcccctcattagtgtgattgagccatatatcaaactggtgaacattttaaaggaggtgtctacaccacttttattgaatagctcattaatcataagagcgtcctccactttcccaacatcgcaaagagctgatataatcttgcaaccagctatacgtttaggcaataagtcccgttcagcggcagcaataaccagctcccttgccatgtcaggcttccccttccagcacaaggcattggttagtgtactaaatgtctttccaccaagaaaatgccctcggtcaattgcccctttcaagacatcataagcttgttcaacactttcattggcacaaagggtatgaatcagatagttgtaagacatggcggtaggagcaaacccaatttctgacctcgaccggtataactcgagggcttcatctacaaatccagctttgcaaaagaagcataaagcagcattcatcgttttcttattcggcgaaactccacgtaccatcatctccgtaagaatatcatacacaccatcaagattgttctccttcaaaagttgaaagaccatagagttatacctgaaaacttcgagttcacaaccttccaaaggactaatcttctgcaagaaatccgcagggttattcaagaatccagctttaataagcgccctaatccaaatgttataagcacggtccatattcactgttcccaccagtttgatctcgtctaacaacttagtagcttcctgaaactttcgtttggaacatagagcatcaaccaatatacctaagccagaaccacatccagcaggatcattaggcagcaaggctcgaagataatcttcagcctcatcaagcttcccttgcttgcaaaacttcttcaccaaaatcgaatgcgtaacagcacatacgaagccacgcacggagatctggtcgaagatgacatcaaaactatcaaaacacttctcctcaacaagtgcattcaaaagcacatgatacccaaaagaatccaaatccaaacctcgaaatctcatattaccaaaatgctgaagagctatatcagtacgaccagctacagcataaccaacaacaagagcatcacagagacgaagagaatgacggcaactttcaaaaccaacacttcgatccaaaaagtcaatcataagagtcacaagcttcgcaccacgaaggatcttgaagatagcatgaaaagtagcacgcgtgtgatgaaacccaggctgacgagcagcccaatcgaagaatttgagacaacagaggatatcgtaacgagtgtgtgaaagcacgtcgaggacgaatttctcagtgagacgaagtcggagattggagaggtggagataaaaagctctatcgtctccatcgttagaaggagctcgaaggatgtcaaagattcgatcgattaattggtggctctgtttcacatctcgatgcttaaaccagtctttccattcacggacgaggaaatctccgggagcgattgaagaagaaggtttcgtgaaggtagagaacggaatagcgtcgccgttgttaccggaagtaaagtttctgaacgacgacgcagagagcgatagtatcctccgcctgaggagcattccttcgcatgatctctcgacggtgactgaccaacaccgaagcatccaaaaactcgaaaaaccctagcatttttcaaccaatcagtggcgcccacgtcatactcgatgtcgtggcttttgtacgttatttacgaaaatgtccttttagtgttagtaaggatatttcgattcccggctcgttcgttactggtttttttcttcttctccgtcgcggaaaagatggggaccaccaccaatctgagatcttggctgtatctcattcttctcttcatcgtcgtcgtcggcgtcaacgctcagaatcggagacctaagaatgttcaggtggctgttaaggctaagtggcagggtactcctcttctccttgaggctgggtaatgcttcttcttacttttttgtcgagcaccattgttactgatcttaagctgaatctgagtgatttgagttgttgtgata

SEQ ID NO: 1238 - DNA, 107579 bp, Arabidopsis thaliana
gaattcattatctgattctaatttaagcttttcaagtttatgcaaaaagttttcgaatttctcaagaattaaggttttttttttctcgtggaatgtttgctcagtactcactactcagtagctaggtcagagcgaacttgtttatgcaaaaaagtttgctaatttctcaagaattcagccttttttttcctcgtgagttttttgctcagtagctttagcttgatatgtggaattgttgcagaggttatgtggtatgagattttcagctaatggtaggttttaattacttgagctgagctagaatcatagaatgtagcaaatttggaattttttgctttcccttgcagatacatctttgtttgtttgactcaactcaatagagagaccttgtgtatatacaaaaggtagcttgacattatagtgtagtcaatcttgttggcctaagaaacaaattcgactatacattgtatcaatccctggcttcaagcacagaagaggcacaacaacaaaaacgcttatgagttctatggcttcttgttccctttttcagctaccgagcatttcttcctgtgtaacgttgctgctgttgttgtcctgttaaagcttggttttttcttgatgcagacttttctacacgtgctttgcggacagcttgttggatctgcttctcatgctctttaagcaaatcttcaagatttccaccaggaggcatcaatggtcctgagtaattgattctgtttttccttggtgcattgccctgatgacacagcccaaagcaacttaataattacataccaaaaggtttaaggtacacgatataacaagaggagagacttacggttgagtaatctctgttgggatctctcctataagattcaccagacaagtctcctgtttgagatgtcctagacttcatctctgcattagtttgtcttttgatgcttccacctccgttccattctgtatcagccactgttgggtgaaccattgaagaagcatgagctttaccattctgctggatccctcttcttggtggttctatcctaaacccggtgccaccttcctcgtctgttttgaatttgtggcttatgcatgtgactttggactgtcctgcagccataaactctggtgtctgggctgttttaagatcctttggccgtcctcttgtcacagtttctccccctcttctcttgttaccttctgcccttagtctgcaaacaaaactttcatcagaaaacccccaagagaaagactagtgaatgaagatgtatgtagctttactttcttgcttcttcgttgcgaagcttggcatcaagttccttgcttggtggatatctaggtaagtttgatggattcgcagggagtggctccgtggtgaagaactgaagagaagaaagattgaaactcatcatgagaaatgtatctaataacttgtttaagaaacatggatttctggttagtatcgatctattacttcgctcctcaaggtagaagcagccgatccccgtttttcaggttctattgccagtagcttattgatgagcatcagagctgatgaagggaaatggttaaaggtttcagcaagaacaggcttgtaaggatgactgggtttaaagcttgttgctagtggcagtgttgctcttctccagtaatcttccgagggtgaaccacagagcttaaagatcttgtgcatctgctccacctgataaacaaaaaaggataattatctcatcagctgtctataagaagtaagactctgagtctcagaatttgaatgaatgctgcgtcgaattataaagcctgagctcaaaaactgttcttaacaaactaaagaggtgttagagagttcattacttctgtgcgtcctggcataataggttttccggcgaagagctcagtgagaatgcagccggcgctccacaggtcaatggctggtccatactcagtggcaccgagcaacagctcaggtgctctgtaccataaggtcacaacacgactggtcagctgcagatctccatcacctcggtaaaaattcgccaatccgaaatcaccaatcttcaagacaccttcattattgattaagagatttgagcctttaatatcacggtgaagaattcctcgtctgtggcaatgttcaagcccacggaacaattgctgcatatagcacttgatctgaaaacgaagtaggactctttataaaacttgaattctccaatctttcaagtgcataggaaaacagaatatgtaatacctgaggttcagagaatttgattccaggagttgcagctagacctgcgagatcgtgttccatgtactcaaagacaaggtagaggctacctgagagtctagaggtaactagaccttctagcttcataacattggggtgatcaagcttacgaagaatgagaatctccctggccataaaccgaacactctctggatccatgttcacaaaccgaactttcttcatcgccacaatcttccccgtttcaaggtctctagctttgtacacgctgctgtaagtcccctgtccaatctttaacaatacacacaacataaattgttatttcaagatttttggaggatcacagatcatgactgtttagttgagagaaaacagagaagatgaactaactttgtctaacttctcaaaggactctgcgcagcgaggaacccatcctttaatggcctccccagcaacagaagccagccaagacggccattctgcagcagggagttccgttttattgctgatcacacgtgctggctgctgctgtgccggctgtgcaaccggtatagcggtgactcttcttgttggatttctggtcggagctcccacaacaacgaccggtttggtgctgtttcgatcagatgaagtggaaggacggcgtgccacaggataaccattagccacaatggtgatagaagctgaagaagtcgtacgtgtgaaagatccttccttcttggatgaagacgaagacgacgggggatgatgagggagaagttgaaggatggatttgctggaatctaatagatctttatcggtaacggcggcgcttggtgaacgggcggtggcacaaatacaacccattacaaaacaaaccaccgctcaaaactcctacttaatggaaaaaactttagtttttgccgatttgcttttatctatctatctctcattctctctactatgtcttaggtgatatggtcggcgaccaaaaactttcattttttgttgtctctctcacgtttttgtgagtttgttgtcatagaaaagtggaacgtgcgtaccactcaatggtctctttttcttctagaatcaagatttaaaattaaaacgatgaggatgatgaaggaatcggtcaacgacctttcactttcactaactgatttgtttttcttcccttcttaattgggtctcattggtttcacaaaatgggcttcattttatttgtaaagcccgacaatcttttatctggtgtcaactgtcaacataagtacgatgaagtctttgtaatgtccgtccataatcatgatttggtcgtgatttgttcccctatgtgtatgtacttgtggactttggatagtttttaaccgcattagctttttatgatatctctacaaaatgtgtaaatcatccttgagctatatgggtaagaatagttttttttttcctaatgagaaaagaagcctgagaaatgagagctcacgtgggggaaaaataaatgagaagtgtaaccaaaaaaaaaaaaaaagtaaacagatcctaaccctttgcacatcctatattaactgctaaaaacgtactcgtatagatcaaacgagatcgtcttcaagataatcatacacggagatactaagtttgtcctcctcctccatattcgccatggaagatctctcttcacaaccaccactcccagacacagcaccatggaatccggcgtccacggccatgccggcgtcggaagcagctttttggatggacttaggagatatattggaggcgagggaggttgtaagtaagtgagggaagttaaaagattcgtcgtcgagggaagatggtcggtgcaagcagtaaaaagcgacgtcgtgggctacggcagcgccttctgcggtggagaaagagcctaaccagagacgttgacgagttcccgggacacgaatctctgatacccattttccccatttccgacgacggatacctttgtacttgctctggtcagtttctccggtgtctcttgaatccatgtttttgggtggatgaagatgagattataagatcatgagggaaaatgttgcatataaatacgttgaagcggaataaagtcgtgtagatcaagtccgaataaattgaatgtatataaattgtacttttaaaattgggttatgagatgaataaacaaataatatatggtcaaagtatgaccgggggggttatgagatatggacatgtggctcgcactggttgacgttttctattttagttttagcttttgggttctttggaatattcgagtcgtgtttcaagtttcaacttgttgaggtttacatcaactaaatacccatttggataaacaaatgaattttccaacgtaatgagagtcatcatatcacctgatgatccatatcatcaatacgacttgattcaaaaagtctgatagaaaagaaaattaaaaaacacacaagtacacaacagtccatcacgacatcacgtgctgaaacttgaaaagaaaacatgagacttgcctctctctcttattttgtttggttaatttcatcaggcatgacgtcttcaaatagtcttaaacgggtgctcttcttgggcttataagtttgactaaagggcagaaaagttattttttgtcttgtctcgttttgcaatttgcacactgaaaacgaaaagggatatgagatttgtggtctcttctttgattggtggtactcaaatttaacacaaactaagattccgcacacggaatcactcacttttgagcaaccaaatttgaatgcaatgtactctctagtctctacaatgacctccctttcttcttttaataaaaaaattatggttaagaggtttatattatatgttatttttacatttaacatacattatctcataaacttaataatattttccaaattcttagagttaatttatttattaaaaaaaagattatgtatgcctatattgctaattgaacaaaaatcataaaatgaatagaaatgaatagaaatgaagactatatagtccaagtggcctagcatggttattgaaattttctctcgtttttgtttcacccaatcaaatatgaggtgttgtatgtcaaatacaaaagatagtgggaaagcttgaagattataatttgaactcaaggagaagaaagaatatctcgtataaggggtaaacacaaagaaagacagagcaaagccatctctatatactattacatggttttttttttttttgtttctcggcaaactgcacaaaggaggcaagcaaaaccagaccaacaaagatattacctctacttgaaagcatctgaagcagagtaaaggaagtccaagaaccctgttcctttcaatagacctttacctgtcaatagctcgaaatctaacagcagcaagaatcctatcactgccgccttcccgtttatcacttcgttcttcttcgtgaaaccaaatccttcagaaccctcgtccacaatcattctcacctgtgattcacaaaatttatcatcactcttttgtttttatcttcccagatgaaacaaattcacatgtataggtgttttacctcgtctacattgacgtttgttgctgtgagcccaggctgagcttttccactgaagacgatctcagcagctgcctctgttttcccgctgtctctaatgctgatatagatgttttcctcatcatatttgacagggtatacaaatagtttcctcagtgcaggtgtcaagactctgagaaccgggtttttcgggtaccattcccggatctctccagttctaagatcaaacgtactatccgtcgatggacacacaatgcaaccatcctgatataattgccaaaaagagatcactcaccatgagagaaaccaagagtacttcgagcaaaaactactattaaaaccaagaccctaatacattatagcaacagtttaaaaccataaccaatgtgatgaagcaactcaagctatgtgttgattaaggagctaaagatgtcttatgttataagcttggtttcctaaagctatcacactactcggtcaggcattttcacaaatacctttcatgctcgaaatttttccaaacgacgaaaaaagctcaaattataaaaagtacaaagacgaagaaaacctgagtgagcctagcgttgagaagtccttcgctataagctccttcagctggtgaacgattctcaattgcaaaaacatcgttcttataccaaagcaacaatatcgtctcatcgtcttgaataaccactcgccgttcacctttcggaagcgccgataacggcaccaccggcacccaattccttccaggtgtggatacagaagaagaagaagatacctccgtcgcctcgcatcttacgtttccaccacttctctgcttcgaattctggtccaatcggtaagtgagagctactcgacggttacggcggagatagagaggcagcgttctagctaatggcggtcctcggatgaatgatgaaggtcgcggagttgtgaaggagtaattacgggggagagatgaagatgcggtggtcgccattgacgagagtgagagaaagcgtaagagaatggagggaaatgcatttgaccacacaaaggagagagaagtggataacgaagaagaagaagaataatggtagccacactttttttatatgggcctctatttagccaacacgcctcacttcttcagatattttgtttggaaactagccccaatgggccttgtaaacagttgggccaatgtgggccttaggagaaaggctcataaattcagtaaccgacaagcaaatttggcatggagttgtcttcactcttcatcttcagagtctcgtactcttgttgcgttttttcgcgcgcattcttccgctttgctttgttgttccaatatctctctcttacctctgtttcgttattctcaatcatataggttctgctatgtatatactctcagctcttagggttcaaatgtgtatatagtatggttcagcaatcagcacaccacgtgttcgatgatatgcttcaatgaagttttctcaacttgtagtcttattctgctttgatctcaagtagagaagcatattttttgttgtggagctcgaatatggcgcgttgggcatggtgttgttagacagagtatatgccgtatattcttggaggtctcaccatagccgacattgtcaagtttattcccagattatggaaaaagtcgcagtcttgttccaagaactttccaaacccacattgaaccaatgctgagtgagagtcttttcaaatctcttggacatttggccagccacggtcatttgcacgacgctttcaaaacgttttctcttcttcgtcttcaatcttcttctgcagtttcagatgacctcgttttgcattccgcggcttcccttttatccgcttgcgttgatgttcgtgcatttttagcaggggtgcaagttcacgctcactgtatttcgtcgggtgtcgaatatcactctgtgttagtcccaaagctggttaccttttactctgctttcaatctccacaatgaagctcaatcgattattgagaactctgacattttgcatcccttaccttggaatgtgctcattgcttcgtatgccaagaacgagctttttgaggaggttattgctgcttacaagagaatggtgagcaagggaatccgacccgatgccttcacttatccgtctgttcttaaggcttgtggtgaaacacttgacgttgcctttggaagggtggttcatggttccatcgaggttagctcttacaagtccagcttgtatgtttgtaatgcattgatctctatgtataaaaggtttagaaatatgggtattgctcggaggttgtttgatcgaatgtttgaaagggatgctgtctcatggaatgcagtgataaactgttatgcttcggaaggcatgtggagtgaagcgtttgagcttttcgataaaatgtggttttcaggtgttgaggtcagtgtcataacttggaatattatttctggaggttgtttgcaaacaggaaattatgtaggagctttgggtttgatctctaggatgagaaattttcctacgagcttagatcctgtggctatgattattggtttgaaggcttgctctctcataggagcaatacgattgggaaaagagattcacggtcttgctattcacagttcttatgatgggattgacaatgttcgaaacacgttgatcacaatgtactcaaaatgcaaagaccttaggcacgccttaatagtgtttcgacagactgaagaaaatagtttgtgtacttggaactctatcatttccggttatgcgcagctgaacaaatcagaagaagcctctcacctgctgagggagatgttggttgctggctttcagccaaattccattacactagcaagcattctccctctttgtgctcggattgcaaacctgcaacatggaaaagagtttcattgctacatcctgaggcgcaagtgcttcaaggactatacaatgctgtggaactcccttgttgatgtttatgcaaaatcgggaaagattgtagctgcaaagcaagtatctgatttgatgagcaaaagagacgaagtaacatacacttccttgatagatggatacggaaatcaaggtgaagggggagtagccttggccctgttcaaggagatgaccagatctggtattaaacctgaccatgtaaccgtggttgcagttctatcagcctgcagtcattccaagttagtccatgaaggtgaaaggctgtttatgaagatgcagtgtgagtatggtatacgtccttgtcttcaacatttttcttgtatggttgatctctatggcagagcaggtttcctagcaaaagccaaagacataattcacaatatgccatataagccatccggtgccacgtgggctaccctactgaacgcgtgtcacatccatgggaacacacagattggtaaatgggcagcagaaaagctcctggagatgaagccagagaacccgggatactacgtgttaattgcaaatatgtatgcagctgctggttcttggagcaagcttgctgaagtgaggactataatgagggacttgggtgtgaaaaaggatcctggctgtgcttggatcgacacagattctggattttcactgttttcggtgggggacacatcaagccctgaagcatgtaatacttatcctctattagatggactgaatcagctgatgaaagacaatgctggttatgccatcaataaggtgcaaagttcagatgaagaacttcttcaagaaatgggatgaaggtgaagagctgaggatgatcaactggagctttatttagttaatagcacatagtctatatacgcctgcatatcaccagactgagaacaagttggatacacatgacaagttctagtatatacattaactaaaattggacaatggtggggattgctgcggaagtatttttcctatataacacaaagaaaacttatattgtgagctgattcacttcatcgagcaagagctttgtaatgccatcagaattggtcggccagttgaggaaatttctgcagcagccaggtaactccctttatagcagcctgaatacacaaaatgcaaaagctgttaaatcttcattacctctgcaatttcaaacacatccacacaatcaaaattgatagtagctcatgttaccagaactgtttctccaggtttgattgcaggctcaacgcagtctcttccatatctgcaaacaaaacagagaagaaatgtttatcccagcaagacaaaaattggcatctctgtcagtctacacgatctgtcgagaaaagtgtgcttacacgatctgtctcttcccatcaatcacctctaaccggtaaaagctgcaacctttgctaaatgggaagttctttcctttccattctgtcaaaaatctccaatttacgacttatcattagagaaacatagacgactaaatcataaagagtctgttaaaaactaacctaaatgccatgaaactccaacagctgaagagtcttctgttgagatatcatctatcacgaattggagatccgtacttgttgattcaatgaattttccgaagaaatcaagaattgcctgtcatggctttatcaaaattaggctctgagacacaacaaagtctgaaaagaagagactttggtttattagaataataatcgtttcacctttcggccaacaaagggagatgagaagacgagatcctcgtagacgcagtcctgagcgatgaggtctgtgacagaggataaatcatggacgttaacggcggcgtagaagctggagacgacctccgacgctgatgtcggagctgtttctggaacaacgtcgttggctgtagcagcttttgcagctggaccataggatgcggacaatctcggaggctgtgaatgagtgaggcttgttggcttgacaagtttggttgggaggaagaaggaaggaggaagatggttgagcgagacgagtgagggagacgtcaaataagagacgagagaagcagtgaagctcatcgtcgtttcttgatatgatgtcttcgtttttgtggctcatttgtgtttgtgattaagagagcaaagagttgaattttgaatttcaattggaatttgtggacagaaattcttattagtagtccctatgattatcgatgccatgtggatactgtaacaatcaatagaagtatactccaatcctctttcctattaattgatgatttttctatcatcatttcatcttatttgtttgtgaaatgatacttttaatttagttgtgaaatgagattttataatttttcgaaatataagactaggtaatgcgtagcagaacagaaaagtaaagaaaaatatgtgttggtggataaaaagttgaattgtttttcataatttttagatcaatgatatattttcagtaaattcttgttcatcggttctcaaatctacataaagagagaagctaagcaaacatttaaccctattttttagattttgttttttcactcctgaacatataatgaataaagagatggttatgaaagacgtttataataatctttaaaaaaagagaaaaaaatcgaatccttcataaatcttttacattcatagatggaacacaataattataacataaataaaaacgagaaaatcaaactcaagccatgcacgtcactatcgaaaagttctcacaaaaacaacaactccaaaacatcagccatgaagcgatatttgttgatgagatgctctatctccttgataaacaaaacctcacatttttcattcaattctttggccttattatctccaataagcttacctttctccaaaatatactcttcagaaataaattctttgaccatctccttacttaaaaacatcttcaaagatggataccgagcccaaaactcatctttaataccattagcctcagtttctgtaacaactattgacataagatttttttttaagaaagtattaaagatacgatacaaaaactatcttaatcacttttaagatttttatatcaacgtaataatcttgaaacctcacagtcaaacagaacatgaacatgcaaagtatttcttaacaaacgctccaacttctttacagtggaaacatgtgaaatggtgaagtgaaaaatctgaaataaaatagagagtgatgcatgcatgtacctccattgttgttttcagagtctgatggttcgtcttccattgagtcgtcgtcttccgatgagttggaaacttgggagtcgctgagttcttcttcggatgattcaggtttaggtggagagttgatcgtaaccggcaccatcgtcgttaagattaagttcgaagagactagataaagtttctaaagagagagatagaatcggacaaacaaagagtcgatatgtgaacaagtagaaacatgatgtttatttatacagtatcgtcgggaaaacgaagagtcaattactttatttaactgaatatttttagtgacaaaaatatgaaacgttttttttgtaacttgtccaagttgacatgaattgtttttaaacgaggaagattgaagcaaccaccaaaataaaagccaataaattctaaatacatgctttttttaaaaacgaaaccgtgtgtgaactgatgggctacaattgttttgggggccctaagcccatatttcaattttctggcccaaatattagctttcaatttcaattgcatactttataaaaatagtttaaagctacatataaatactaacgacctttagcttaatcaagtggttagtggtcacaatggaagtagtgtcgtctctcggaatccgagacctcccggcgtccctctccgtgacgacgagtctcaaccaccgtcctcatcgttccgataaagatggcgctccggcgaaatctccgattagaccaagcagaactagacgaccttccacttctcccgccaaaaagccgaaaccttttagggaaagagatgctttcccttcttctcttcctctccactccaagaacccctacattatccacagagatattcaaatttttgcgaggcagaacaatctcgaagtcgctctcacgattcttgattatctcgaacagagagggattcctgtaaatgcgacaactttctctgctcttttagaggcgtgtgttcgccggaagtcgttgcttcacggtaaacaagtccatgttcatatacgtattaatgggttggagagtaatgagtttctaaggaccaagcttgttcatatgtatactgcttgtggttcggttaaagatgcacagaaggtgttcgatgaaagtactagctcaaatgtttactcttggaatgcgttgcttagagggactgttatatcagggaagaagcggtatcaagatgttctttctacgtttacagaaatgagagagcttggtgttgatttgaatgtttatagtttatctaatgtgtttaagagttttgctggtgcatctgctttgagacagggattgaagacgcatgcacttgcgattaagaatggtttgtttaatagtgtctttcttaagacttctcttgttgatatgtattttaagtgtggtaaagtagggcttgcacgtcgagtttttgatgagattgtagagagagatatagttgtttggggggcgatgattgctggattggctcacaataaaaggcagtgggaagcgttgggactgtttaggacgatgattagtgaagaaaagatatatccaaactcagttatacttacaacgattcttcccgtacttggggatgttaaggcactgaaactggggaaggaggtccatgcccatgtattgaaatcgaagaattacgtggaacagccgtttgttcactctggtttgattgatttatactgcaagtgtggggatatggcttctgggagacgtgtgttctatggatccaaacagaggaatgccatatcttggactgcattgatgtctggatacgcagccaacggtagatttgatcaagctttgaggtcgattgtttggatgcagcaggaaggttttaggccagatgttgttacaattgctactgttcttcctgtttgcgcagagctgagggctataaagcaaggaaaggagattcattgttatgctttaaagaatctcttcttgccgaatgtatccctggtcacttccttgatggtgatgtactcaaagtgcggtgttccagagtatcctatcagactgtttgacaggttggaacaaaggaatgtgaaagcatggaccgctatgattgactgctatgtggaaaattgtgatttaagagcagggattgaggtattcagattgatgctgttatcaaaacacaggccagattctgttacgatgggtagggttttgactgtttgcagtgatctcaaagcattaaagttggggaaagagcttcatgggcacattctgaaaaaggaatttgagtcgatcccatttgtttctgcaagaatcatcaagatgtatggaaaatgtggagatctcagaagtgctaatttctctttcgatgctgttgctgtcaagggctctctgacatggaccgccattatagaggcttatggatgcaatgaactcttcagggatgcaataaactgttttgagcaaatggtatcaagagggtttactcccaacaccttcacatttacagcagttttatctatttgcagtcaagccggatttgttgatgaagcttatcgcttcttcaacttgatgctccggatgtacaatttgcagccatcagaagagcattattcactggtcattgaacttctcaatcggtgtggtcgtgttgaagaggcacaaagacttgcggtcatgagttcctcgtcatccctacagacctgactgcagattcagacatcttctttgctttttctcaaagccaccaagtaagttgctcgaagagttatgagaagtatattctgttctcttgtttccaagaacttgcattaatagtgctgtatatactgaatttggttccagaatgattgaattttgttcaacttgtaaaaatcttgcagtatcaaatgtagagttttcttaagattagttaagggaagaaagtcaagagagaacacaagtctagtaagaataaaatatcttatagctttcaggaaaccattcaatattatatcaaatcaaatacatcaatgaggtaacaaacaattgtaaaaaataataataagtcacacctcataatctatgtttctactagtaacaaaaaaatttaaaaatatttgtgaagaggtcctttcagggacccatcaagctcatagagtctttccctccaaaatctgatgagctttattctttgctataacgtcagaatcaacaacccttgtggtagactctgaaaactaaacttcaataaatttaagtattctaagccagtaacttatgctggtattgtaagattgagctgtagaagctctccatgagttaggttttggggttaagggtcccaaagaaagtcactctggtatgtttcccaagcattcatctccacatcattagcaaactccatagggtcgtatgttgaatgcatcattgtagtaggagatcccaaagttgactcgttgatcgcttgaatttccctgggcgagagtctgaccattgttggagctacattggaggagcttgagctgtccacttgcatggctgactctgttccttcggtggtgcggcagagtgttgcctcatgaactgccatgcgaatgctgtctgagctagagtctgcaggacgtggaaggctgctggcgagctcagggaagttgagacgagcttctctccctctgaaatgaaatgctgccacgtcgtatgcggttgcagccatttcaggagtctcgaaactgcctagccagatacggttcttggtccccggttcacggatttcagacacccatttcccccattttctcttccggactcctctgtaggcagatggtacacctttgccatcgttttgcgctttgtcgctgttaccggaattcctaagaccagccatgaacacacacacacacgcacacaaagtttttgctcaagagtgtttgttgtttttgtattttgtattttgtctgtttggattttgatgttggaatgtttgtaactgtcagcacttatttataggtgtggattagtatcttaacagcagataaactcctgtgtactcgttttaaaatctcaaagcctccaaagttagcttcgaggaaacttcaaaattgttatgggcctttgtgggtgtaacaagtgttatctatttagtatcaatgcactgtagattccctcaaatagtaatatgagtaaactaatgagaggttttaggaaagaggcagaatattaaggttttgttttaagagattggatttgctatagtagacgcggttttcttgcatcatctatgggacccttttgtgatccattccataactttgtgatgctaagagttggtgcaaaagtgggatttatcctaaaacaaatgtcaaagctcattgggtcataataatcttccttttcttgagtcaattgatcaattaaaacattggtcgtaatataaaaaaacattggtaataatttattttactaatcaagcttactaattctaagacattttggttgcttcaaggatgaaattttgatccctagcatctatctacaagatatgcccttaatcattaggctaccacatttgattgattaccacatttgaattttattgatagttcttttgtgtgatcaatatatatgagttaaaaaaaaaaatctaactatgtgtagctttatttagtctgattttattttttagattttagattccattatatagtcatagattgtggcaaatatctctctctctttttttttaataaagaagtaaacaaaatatctcttaagctttggaattatgcatttttgttatcaatgaagtttttttttagtcggacattatcactgaagttagacaactagatgctcttagactgctttagttgactcaacacatacgataataaatgatcatttaatgttcaatctttttttttaattgattgtgcgcctcgataaattatttttaaatttcgttcctactaaaacatgacattcttaattctttgaatataatgttttgtctaattctcatatatgatattttttaaaatattatggtttgctatttgattatatatatatatatatatatgtctatatatatacaaatattatcagtgataatattttagatagtttcccatgtatctaaatatctaatatatattgtttcatcttaacacgtttagaaaatgagttatatacgttgggtagttgcttgcgtagtgttttattttttaaaacagttgttgcaaccatttgagatatatcggcctatgctttaaaacaaatattacatttctttgcatcacggtcttttaagtaagacggtttagacaattttttgttttgttttgagtaatagaacgaacgtgtataaaatcacatctctgtctgctttgcatgagtgtcggagggaagagtcttggtttgaaaaggatagctttttgttttctctggcggaaaagacagaagatataaagttaacttgaaatgagacagaaatagaggaatttgaataacaaaaaaacaaacaaacagaaactaatgctgtgtaaacatgtgtcattgattatatatgagtttagaaagttagaagctagaagaaaacaaaagtttctttagaccaccgacttcatttttcttatatttctgatttgataaaagctctttagtatatagttcgtacttgtaaataactcaacgtaacaatgggacgaaaaaataattcaaatttgattggttcttcttcttctttcccttttgttgtttgttttctactcagcgtaagcactaaacatgggtcttacgcgttgaggaaaacaatgaaacgagctccaaaatttctcctccttagaaaagatccaatgatgtatgctttgatatattaacatatacctttatattttcatatatttggttgtatcaagaactaaagctaattaacaaaaaaaaggaactaaacccttttttatttaaatttagaaggaccaaatatatgaaaagattatgtcatactcaaattcaggttttggagaattaaattctatttgaaagattttatttagttaaaatactaaattaaacaaaagaagtgtggttctcacttctcaacaatggaagatgtccattgggcttcgtaaagatgaacattgagagaaagagatatgtgtgcgtgcgtgaattcgaattggtggtgaattgcaagctggattcctaattagagaggattttttgtactaatggtgtgttgcagctggattcctattttgaggacttaagtgtctattatcatcaaaaaaaaaaaaaaagtcttaattattagtttaatccaaaacttaagtacactcctttcgtccgaacatagccaaaacaaaagttgccactttaagttcctttgaccactgtcggcacgagaatcgtttgacttctttctcatatgggctttaaattagcccatctctataattttacttttgttgagggttttataagcccattaagtttcggcccactcttgacgttaatctgacgtcagcttgatttttccggcggatttctcaaatcgacaaattcgttttcatcggttgtttcagacgtaatttccaaaaatgaaggctgagtctagcaacgagtctttcataatcgggcagcgagtccactctctcaacgattcgcgtcgtgtgggcaccgtgaaatacgtcggagatgtggagggatactccggaacttggatcggcgttgattgggatcaagacggtgatggaaaacataacggttccgtcaatggcgttttctactttaacggtcgttctcagagctcagcttcatttgttcgttcccagaatcttagtcgcggtatcacattgcttcaagctttggagcttagatacagaacaatttcaactaaggacgaagaaggtcttgaaagagaatgttatattttagtttcagtgagtttttggaatttgaaataatgaatcttcttctttgtttttgttagatgaaatgtatgttctctctgctgggaatagacgtgtttcgattcagcttttaggaggggataagatccaggataagttaagtcggttcgaggagcttacgagtgcttctctttcgtatcttggtgttagttctcttggagtttcatctgatttgggttcaattctaccaagtaagtttgatctagtttcagctctgccattgtcaaagataatcgtgtgactctttctttctcacgacctttagatgagcgtgttgtgatgttatttggttcctctgttacagatttgaagctgctggacttaactggaaacttgatttctgactgggaggtatgagtcgttactgttttatctatcatcaactaatgtgttagagtttatgattgatcttttgttcttttggctttcaggagattggtgctctttgtgaacagttaccagcacttacaacccttaatttgtcttgcaattctttgtcaagtgatatcaagtctctgccacagttaaaaaatatccgtgttttggttctgaataatagtggtctgagctggactcaggtgatatgtgactcttttactatttttttttttgcttatgaactagttgagcattattgcagtttttgacttttatggttcttaccgtcctggagcaggttgaaattcttaggcgctcgttacctggaattgaggagttgcatctgatggggaacatgatatctaccataacagtaatgttttattttgtagcttcaatggttactctgttgctccaagtaggatatagtctgaaaacgcttggaaatcggtttggtctctttgaagacgatacttgaattacgctcattctaacacttcttttgctttaaaaacttgggtatttagcttgcaaattgtgaactccctttttccccctggttggttcttgcagtccacgtcctcatcagatgatcaagcatttaactctctgcggctactgaacttggatgataattgtatttccgattggagtgaagtattaaagctatctcaacttccatggtcagtaatacttttttttttcctttctactcatagttgatggacctgtaaatatacattgcaccgttaattctttctaaaaattgataatctaaacgttgtttctcagcttggagcagctttacctgaataagaataagctttcacgcatctttcagtctgtaaatggcactgaatcatcagagaaaggcagcgacccatttcctagtctgagttgtcttcttctaggtaatctcctcaagtgtagtgtcctcctctcttgaaatttggccatttattctgtccattgtatttctcaggagccaacaacattggcgatttggcctcagtagacgcactgaatgggtttcctcagttagtggtactgatcttttgttctgtaatactctaatagatcagtcatgatacttgttatagaggcataagcattaattatttaatagccaggtagacttttaaatatgtactttaattgaccttccctcgtcaagtaataggacatcaggctttcggaaaacccaatatctgatcctgtaagaggtggtgtcccaagatttgttctcgttgcaaggttgacaaaagtacaagtgctgaatgggagtgaggtagaacaagtgccttaaaaaatgtttaacatactgttacctttcattcatctgactctactgggttattcttttcaggtaagagctcgtgagaagaaggattctgagatccggtaaatcgtcaatgcctcatcttggtcaatcttgttgtttggttcagcgtcagtactatgcttagtttctttggatggtcgcaggtatgtccgaatggtgatgtcaaagttaaatgacaagtctggggagattgagctgctccaccctaggtacattttgcaaaactatattttcttcaatcaattcttcccaaacaaaacagtaaagggttctattttggttttcaaaccctattttcttctttcaatgaaagtatctaccagatgaaagtgatataagaaaaagttagccgtgcttgtgatatttcagattttatgaactcaagaaacttcatggaattgaggacgaaagagcatcagctgagaacagcggccctaagaatatagcatctggacttatctgtatgactcgttaagcgtatcttacttaaggttcattgattgtatagaacctgcttttaaatcacaatgacatgtgcagccattactctcaaatgcgttggtccatcaatgggtgaaaaacctcacttgacaaagaagttaccgggcagtatcacggttgtcactacttttttcttttgtattgagaatccgaagtctaaaactcggaaaatatgtaccgttttattgaaagttttcgattggtgtttgtaacaggttggaaagctgaagatcttatctgagaactttttcaagctcaagtccatcaagccaagattatttctgcaggaagaggtatcttttcctaataatcattaacttgaaagaaaacgtttcgagtttcgactatatatgtatgttgtatcgcttatcttcatcatatcaacgaaacaatcttatatttccgtggcagggctcaccttttccgacagcactcgatgacgagactgcaacattacttgacgttggaatctgcgacggctccacacttcttgttgacgaagagagttaagttaaggtcatcacatactacacactcttcagaatttaaactcgatttattttatggattgtcactgtgaacattaatagtttatccatcttttgcaagtaacttgaacccacgtaaaaacattaatagttccagaaccatcatcatcattgcaaaagtttcatacaaagttaaaaaaaaattgaaattgagaagagacaacatgttttattttatgagagctcaatgatcttggatcgttttctgctacattctgcactcttactctcctctccttcactttcgctatcactctcatcatcgctgctcgaatctccactttcagcggccggaccaatgccggcaatagcagcttcagccgcactgactgcttcaggcgtgttgagatcagcgacaccgagcatcaagtccatctcgataagttcagattcgttacccgttagtgcttcgatattataagcttctgggtttgcctcagactttttgttagcctccgccataacccccaagaagcctttaagtttaccaagaagttggcttttaggaactggagcaatcgttggcttcgatggaggaggagcctccatcttcttcttcttcttattcttatccgtacacatcaaaagtgctgaatccatagcagaggaagaagatggattcttgagctccaatttcaggagatctttgcagttttctttcccttccatgatttttctttggtgaaatcagtgagaattatggagaagaagacgaactatgagcttgacctagaaaaagagtttgcgtcggtggagcttgaagtcgccgctatcgctttagggtttcggttctgacattcaatttataattcccaaattatgaatttattaagtatcgaaaatattttacataacgtatatggaaattgtactaactacaaaatagtaacttccgctctttaaccgcttgttaaaccgacagctttgatttaccctacccggttggttcctcaaccgaatcgcagaagatctatcttgatcaagcagcaatacccggtttactttacctcttaacttttttatcttaccatctcttaaggaaaaacagaggatttagggacaataaagtagacacaattccgattagtttagttacaaaaggcgtttctgtcagacgaaacagttggttacttaatttgtcttcataaacaaggtaatgaatttcgagcgtcgatgattacaagcttatctcaaatctcttttgggacattgaggcgctttggctcttctgttttaccttctgcactgaaacgcgaatttgttgaaggattgcgtacgttagtaaggtctggtgatatccgtcgagctgtttccttattctattctgcgccggtcgagcttcagtctcaacaggcttacgcagctctgttccaagcatgtgcagagcaacgcaatctcctcgatggaatcaacttgcaccaccacatgctctcacatccctattgttattcacagaacgttatacttgctaatttcctcattaatatgtatgccaaatgtgggaatatcttatacgcacgacaggtgtttgatacaatgcctgagaggaatgttgtttcatggactgcattgatcacaggctatgtacaggctgggaatgagcaagagggattctgtcttttctcgtctatgttatcccattgtttccctaacgagtttacgctgtcaagcgtgttaacttcatgtcgatatgagcctggaaagcaggtacatggacttgctctgaaacttggtttacattgttcgatctatgtggcgaatgcagttatctctatgtacggtaggtgtcatgatggtgccgcagcatatgaagcttggactgtgtttgaagccataaagtttaagaatttggttacttggaactcaatgattgctgcttttcagtgctgcaatcttgggaaaaaggccattggcgtttttatgcggatgcatagtgatggagtgggatttgatcgtgccacgttgcttaatatatgttcttccttgtacaaaagctctgacttagttcctaatgaggtttcaaagtgttgtcttcaactgcattctctgactgtaaaatccgggttggtgactcagactgaagtggctactgcattgattaaagtttattcagaaatgttagaagactatactgactgctacaagctttttatggaaatgagtcactgcagggacattgttgcttggaatgggattataacagcgtttgcagtgtatgatccggagagagctattcatctctttggtcagttacgtcaggagaagctaagccctgactggtatactttctcaagtgtactaaaagcttgtgcaggacttgtcactgctcgccatgctttgtctatacacgctcaagtgatcaagggtggttttttggctgacacggtgctgaacaactcattaatccatgcgtatgccaagtgtggctctcttgacttgtgtatgcgtgtatttgacgatatggattcgcgggatgttgtttcctggaactcaatgctcaaggcttactcattacatggccaagtagactcaattctaccagtctttcagaaaatggacatcaaccccgattcagcgactttcatagcccttctctcggcttgcagccacgcaggacgagtagaagaaggattgagaatattcagatccatgtttgagaaacctgaaactcttcctcagctaaatcactacgcttgtgtgatcgatatgctaagccgagctgagcgttttgctgaggcagaagaggttatcaagcagatgccaatggacccagatgctgtagtttggattgcattattgggatcatgtagaaagcacggtaacacccggttgggtaagttagcggcagataaacttaaagagctagtcgaacccacaaactcaatgagttacatccagatgtcaaacatatacaacgcagaaggtagctttaacgaagccaatcttagcataaaggagatggaaacatggagagtacggaaagaaccagacttaagctggacagagataggaaacaaggttcacgaattcgcatcgggaggaagacaccgtccggacaaggaagccgtatacagagaattgaagagactgattagttggttaaaggagatgggttacgttccagaaatgaggtcagcttcacaagatatagaagacgaagaacaggaggaagataatttattacatcacagcgagaaacttgcgttagcgtttgcggttatggagggaagaaaatcgagtgattgtggtgtgaatttgatacagattatgaagaacacaaggatctgtattgattgccataacttcatgaaattagcttctaagcttttgggaaaagagattcttatgagagactcgaatcggtttcaccatttcaaagattcttcttgctcctgtaatgactactggtaattttctatgttactttcatcacaagacaaagacaaggactgatttggcaaataaataaaagtataagaaaatgtgttaattaagggaaaaaaagaaaaaaaggaaaaaaaacaagttgcagaaagagagagaggtgggggaagaagacgatcttcgatccagagttgagcttctcttctgccatcgtcttcttcctcgatctcggtcaattacgcattctctgatctgatttgtgagatctctcgtcggatcaccgttttttacatcgtcgccgacaacacttaggagtaattggatccagcagaaatgtcgataaacatgaaaacatttactcaagctctagctagaacggctgctgtgattgagaagacggttcataccacagtacaggaagttacgggaccaaaggctcttcaggattacgagctacttgatcagatcggttccgctggtcctggtctagcttggaagctatacgcagctaaggcgcgtgattccacgaggccacagcagtacccgacggtctgtgtatggatgcttgataagcgtgctttgtcggaggctcgtgtacgagcgaatttgtctaaggcagctgaagatgcgtttcttgatctgattcgagctgatgcggggaagctggtgaggttgaggcatcctggtgtggttcatgtggtgcaagcgcttgatgagaataagaatgctatggctttagttacggagccgctttttgcttctgtggctaatgcgcttggtaatgttgagaatgtgggtaatgtgccgaaagatctgaaatcaatggtaacatatataatgttgttgctgtgattaaaactcaatttaaggttgaccttggattttattaaattgattgtttaaaatttgatcaggagatgagcttgttggaggtgaagcatggtctgctccagatttctgagacactgaacttcttacacaataacgcaaatctcatccatcgagccatttctccagaggtttctttagtcttacttctcttcttagaggttgtgtttatatgttttattaacatgtggagttgtgatttccctgcagaatgttcttattacttcagctggttcttggaagcttgccgggtttggttttgctatttcagcagcacaggctgggaatttggataacatgcaatcgttccactattctgtgcgtttattaaacttgaaatattatttgactgttgtatatctgatgtattcaactctacaagcgagatgatttcttgggtatgactatgcaggaatacgacgtcgaggattcaatactgccagtccagccatctctaaattacactgcacctgaactgatgcgcagcaaaagtccttcagctggagcttcgtcggacatttttagttttggatgccttgcctatcatttagttgctcggaaaccgttgtttgactgcaataataatgtcaagatggtaaactctaaaatccgagcttgttagttttgatattcagatagatgctgtcagatacgttttctctcaggcttgatgtcattggagtagttttaattattcagagtatcctttggatttcccatggttggtaatgtttaacttgaatttttttgcagtacatgaacacgttgaactatataacaaatgaatctttctcatctataccctcggaattggtatctgatttgcaaaggatgctatcaacgaacgagtcctttagaccaacagcattagatttcacaggtaagtggagataactttgacgaggtttccttctttcttgtggcaaattttctctttttcttgttagttacatctttaacttgaactctgactctgtaggatcgaattttttccgaagtgacgctaggttacgtgctctccgcttccttgatcatttgcttgtacgtgtatatgcttccaataattgtttcagacagactgttcttagaagtcttagatgatggaaaatgtatctccacatttgataaccttttcggaacaattttctctttatccaggaaagagataacatgcaaaagtccgagttcttaaaagcattatcagatatgtggaaagattttgattcccgtgtattacggtataaggtagtcactttactgacttatcttgtgtcttgataaaaaaaaagatttgatgctcaaatgatatgtctagcaacaactaagcaaaccatgttttatcatgcaggtgcttccacctctttgtgcggaacttaggaatttagttttgcaaccaataatcttgccaatggttctaactatagcacagtctcaggtaatcttaagtgataacgaaaactaattttatcttgaaaccactgactgaatgaatgcttgaaagttgaaacctaaaattacctttgcaggatagaactgactttgagctgataacacttccggctcttgttcctgttctgagtactgcttcaggagatacattactgctgcttgtgaaacatgcagatcttattactaacaaggtaaagttgatcaattctatacaatactggcttatgtttttcttaccctgcacttgtttgtttctgcttaagttcttctgattggacatagtatgatggaatgaaggatgtatgtgtacaatatggttcactttaacaacacatcaactcgatattatagtcttttgtgctgtcataacctgatacatgcagatatagtcagatacatatttggttgtaaggttccacgttgaagatacacagactgttatttgtttctggatccagttgtacattgaaatcaatatcttttttctaatgcatatagggtgagatccttactcggcttacgtttatgtcaaacttttcagactgatagtgagcatcttgtatcgcacgtcctccctttgcttctgcgagcctacaatgataacgatgtccgcattcaggaggaagttcttaaaagatccacatctgtggctaagcaactcgatggtcaggtgatgctcaatgctttgttttaatgttttattggaataatatgtttttctccgagaagagtagaatcaatttttgatgtatggctctgtggtattgcagagtagtgtcggttaattatgctggatgagttcttctaattatcattttttccccgtctttctttatttaggttgtgaggcaagcaattttgcctcgtgttcatggcttggctctcaaaactacagttgctgcggtatgttatgctttgttagattatctcagctcgagttgcttctaataccagtgtctttaatagcttgagaaagaaagagaaaatgaacataactgatcccagcttcttataaataattgactggaatgtacttgttgcgcaggtcagagtaaatgctttgctctgcttagctgagttggtgcaaacgcttgataagcctgccgctatcgaaattctggaaacaattcaacggtgtactgccgtagatcgttctgcaccaaccctaatgtgtacccttgctgtggcaaacgcaatcctcaaacaggtaggattcaggtcaaattttctccttaatgtttgaaatttgaatgtcttgacttcccctcgttttgatatgtggtatcgttgtatctcattatctgcatttttcatcattgttttctagtatggagttgaattcacagcagaacatgtgcttaccctgatgatgccgcttctcactgcccaacaactgaacgtccaacagtttgccaaatatatgctatttgtcaaggatattctcaggtgtgcatcttgttatcagtcagtacttttgaatagtgttttcacgtccgtaccacaacagtgttgttgtctttattgtgatttgtattcatctattgtaacaggaaaatagaggaaaaaagaggagtaacagtgaacgattccggagtcccagaggtgaaaccgcattctgctgccaatggactccagtttcagtcatcaacccaaatacctgagaaggttgcttctgcagccaagagcagtcctgcatgggatgaagattggggctccccgagcaaagattctgctgtgggaaatcctgcttcttctcgtcataacacaaacgatcagtttaacaaatccacagatcagtcacagccatcgatcatgtctactctgcccaacaagacaacagcgccaacaacatgccctgcagtggacatcgagtggcctccaaggcaatcttcaagcctcactgctccagcaactgataatcagacacaactaaacacaggaacatcatttgcttcgggtttcgatgagttagatccgtttgctaattggcctccacgtcccaacaatggtgcttctgttgcttctactggtctcaagaatggcgctgcatccaattttagcaacaatttaccaggcggcacccattttcagacagctaacaatgacaactgggcattcagcagtgcctccttgtcttcgctaaaaccaccccagcaagggaatcaaggtatctctgcaaataatcaagatccactcaactctttcggtgtaccaaaacagagccaaggaatgccatctttcaccagtggttcatacaacaaccagaagccagcagacatcagttccatattcggttcaagcaaaaccgaaccgtccgcaatgaaactcgcaccaccaccttcaatagcaatgggaagaggaaggggtagaggtagaggtggtactggcacatctacctcaaagcccagtggttcacaaccatctctattggatctattatgaccacagttcttggtgttgaacctcttggtgtggtgttggtgttttgtcgtgtgattaagagaagcatatacacatggagattgcgctccgtgctttgtgatgcagagaaaactgttcagaaaaatggagatgttatgtaaacatcttctgggattagcttcttccactatataaactttactacagcttcaggttgttttatgtctttctcaaattgtacaaattttgttatgttttctcaccattgcttcatttgtcacacataatattattttacggcggctacgctattttcatgtatactttttcttcttttggcagttcctggatcattttctgttggtaagttggccgtaccaccgagtgactgttctagtgttccaaccacgtccgacattacatgtggacctctgatactaaaatatgccatgaatggattctcagtttctcactatttgtacagtcatgatcgtaagtaaagtccactacatctatatatgactaccaccaaagacgtttattacataaatagaaaatacaaacgagtcttttggagtacacagttgacaaattcagtataaacacgaacaagacgttacacaacatttgcttcacaaacgcttaaagagaacacttcacacttgtaagggctttgtgttgttttctaccaaacttttctgtgaaccactcatgattgtgtgaagtgtagaaatgtccgatcaccaatccacataacacgccaggtccataggctattgcagctgctacccagttgaacatgttttcctcagcctctgacaagtcctcgggtagctgcgatgtaggattcaaggcaccagtatccctacaaatatcttcgagaccgtagagtccagggttgtccaagaatgaagaacatttctgcctttgaaactgtgtgcctcgtggcactggaccttggagaaggttatgggagaagttcatgtatgacagaaaagagagtgcagcaagatcttgagggatttgacctgacagcttattacgggatatgtctaatgtctccagctttgtcaaattcgccaagaatcgtgggatgacgcttgtgaatgcgttacctgacaagttgagaacccgcagttctttcaaatagccaagggattcagggatattaccattgattttgtttccagaaaaatcaatggctctgaagtctcttcggatccgctcaaagctcatatcaactcctttattcaccatttccatctcatggtaatagctatcagcatatctccaaaactctgtcatgtactggtccatttcttctgttaatgtggtcatgtctttccagttggaaaaatagtaaggtgggagagttccactgaagttattgtgtgatatatcgatgatccttaaactctgaaacccaatagatgcatgtcgatgatacaacggcccatagaacttgtttgatctgaggttgagaacatgtaatgacggtagagattccaaccatgatggaaatatatccttgattttgttgctttccacattcacaagttccaaagctttgcaattgatcaaagactttggaaactttccctccagctggttgtgactaacgtctaatgataccaactcggtagctttggaaaatatatctggaagagttccactgaagttgttgtcccccaaatttagctctttaatagaaccactgaagttccttatacatgaaggaatcgagccgctgaagagattgttggacaaatctagaaagcctaacgaactaagcttgcagatcatataaggaattggtccttggaatgaatttgaattcaaatccaactcttcgatcagtgcttcctcttgtgaagtgttttcaaaactgctgaaagaattgtgagaaagcaccattgtattcaatctccataagcaagctggtacttcaccttccaaattgttcttggaaagatcaagatgaaggaggttgactagctttgatatagttggagggattgccccagtaaagttgttgtggctgatatctagctcttcaaggttgagaagtctagatatagattccgggattgggccatggagtctgttacgaccaaggattaggtcctgaagcttagttgatgaagatgtatttgcaaactctataggtcccgtaaattggttttcttgcagataaatagattctaaggaaggaatcaataacagagatttaggaaaaggcccgctaaatgagttataagaaacatcaaagtactccaagttgtggaatatactcatgtcaaatggaaacgtggatgtgaagttattagagctgaggacaaatatagaaagctttgttaaattggcgaaggaaataggaatgttgccacttaagctattgttttcaaatgacataactcttagttcgattagatttcctatggaggcaggaacttcacctaccaattgattatgcgtaagaacaagatgtacgagattagaaaggtttcctaaggaagaaggaatctcgcctatgagattgttagacgcaaggctaaggtttcttagctgctttagatctcctattgaatctggaatcttaccaaccaatctattagaaaaaagctcaaggtttacgagacgagaaaggtttcctagtgaagaaggaatctctcctgtaaggacgttattagcaaggataaggtgtctaagctggtttagattgccgattgaagccggaatttctccaacaaacttattaaagtaaaggttaacaagtgtgagatgagaaaggtttcctagtgaagaaggaatctctccgtagagattgcaattcgtaaggtctaggtgacgaagatattggagtttaaaaaggctactgttggttttcaaatagttgttgagaaaggtgttaggaatgtcgagtgatattacctgaccagatttatcattgcaagtgactccattccaaagacaacaatcagtgctcttattccacggacctctccattgattcataatatgccatgacgcatttatcggaaactcgcctctgaattccaaaagagcatctctctggtcatcacggcaaaagtggggcgaagaagaagctagagagtgaacaaggagggagagaaagatgataatacgactagaaaaaacccaatgacgatggcttcggatcatcatatctttctgttttgagattgtgtagtgagtactgaattgtgtgattcagtggttctctctttaagaagaaattcctaacttagcaaatcttgcgtcaactcgttttgagattaatagattcaacttgtggcttttgattagaatataaataaactaaacttttttttttcccacttgttttaaagaatcacgtacaccattgttgactctgactcatttagtcctctcttaatttttctaaaggattattaaagttctactgaatttaaggtctactataaatctccaactttgtatagcttagccaatttttctactcacatatgaaatatccatatatagactgtctctgtgcatctgtaaaactggtttgagaaatcaaaagacttagaaattagctatactttttaatgacccaagtgctataagagaacagatttgtcgtatcgtaatcgtatggtttgacttccaaattgatagcctatgaactgaggatgctcgtcgttaatttgttaattttaaatttacatgattttatgaagttaaattttcattctaaggatccatgcatctatctatacacatacatttactttggtttagaaaagatgttgatccatatatcatatataatcgaatggttacctattacataacgtacagatcacattttcaagtcaagaaacatatatcaataccactaatgacgtttacataggttggtggtaccattgaccatcccaacccctgtctcgcaattacatatagatctgtgacctaatatatgtcatgaatcatgactgtcactatatttgtatagtcatggttgtaaagtcctctaagaataagagatctatattatataacacactagagtgagaattgcaaaacacaacgtacacattttaaagccaatatatattaaataacaccaaatacacgcagtacgtttattacaaaaccataaaatagaaaattacaaatagaaacgagtcttttggaggagacacctgaaaaattcaatacaacatgaacaagacagtacacaataatgcttcacaaatcacaaatgcttagagagattgcaacagatgggcttaacgagcacttgtggttactctgatttttttccgaccaaacttttccgtaaaccactcatgatggtgtgaagtgaagatgtatccgatcaccagaccacaaaatacaccaggtccatatgctattgcagctgctacccagttgaacattttttcctcctcgtctaacaaatcctcggatggttgtgatgtaggattcgggacatgagtctcctcacagatatcttcgagaccgtagagtctatggttgtccaaaaatgaagaacatctctgcctttgaaactgtgtgcctcgtggcactggaccttggagacggttatgggagaagttcatgtacgacagaaaggagagtttaccaagatcttgtgggatttgaccagacaacttgttacgtgataggtctaacgtctcgagctttgtgagattttcccagacccgtgggatatcgcttgtgaaagcgttacctgacaagttgagaagacgcagttcctccaaacaaccaatggattcaggtatttcgccataaattctgttttcagaaaaatcaatggctctaaagtcttgtcggatcctctcaaaactcatctctactcctttattcaccatttccatggagcgatagataagagaataattctgaatatcttcaatgtattcataacttccatggactaatgtaatcatttcacgccaactagaaaaaaagttaggtgggagtactccagagaagccattgtgtgatatatcgatgattcttaaaccttgaaacccaatggacatgctgggatgatacaacggaccatagaagtcgtttgatcttaggatgagaacttgtaaagatggtagagatcccaaccaagatggaaacgtatccttgattttgttgctttcaacattcacaaaatgcaaacctttgcaatttatcaaagactttggaaacttcccctctaactggttgccacttacgtccaatgattgtaagttggtattattggcaaatatgtccggaagagttccactgaacttgttgtttccaagaattagccccgtaagattgaagttccttaaacataaaggaatcgaaccgttgaagagattgttggacaaatctaagaagtgtaaccctttcagcttgcagatccaaacgggaaacgtccctcggaaggaattgaaacttagatccaacacttggatcattgtttcttttgaatatattttttcaaaactgctgaaagaattgtgagaaagcattgttgaagacaatctccacaaccaacttggtacttcaccttccaacttgttgttggaaaaaccaaagatacggaggctaactaactttgacatagacctagggactggtccactgatattattgtgggcaacatctaacagtacgaggttgagaaacttagatatggattcagggattgagccatctaatttgttacgagtgaggattagattctgaagcttagatgatgaagatatattagcaaactctataggtcctgagaattggtttctatccatagaaacccatgctaacgaaggaatcgagaacaaaaatttagggaaatgcccggaaaatgagtttgcactaatatcaaacgtcaccaagttgtggaagccactcaggtcagaaggaagggatgtgaagttgttaaagaagattctaaactcggaaagtttggttaagttagtaaatgaaataggtatactgccacttaagctgttacggtcaagtgacatgactcttagttcgtttaggtttccgatggaagctggaacttcacctaccaaagaattattccaaaggtcaagatctaagagaagagaaaggtttcctagggaagaaggaatttctcctatgagatcgttatccccaaggctaaggtttcttagttgctttaggttccctattgaatacggaatctcaccgaccaatctattagaagaaagctcaagattttcgagacgggaaaggtttcctagtgaagaaggaatctctccatggagattgcaaccagaaaggtctaggtgacgaagatattggagtctaaaaagactactgttggttttcaaagagctgttgagaagggtgctacgaaggtcgagtgatattacctggccagatttatcatcgcacgtgacaccgtcccaagaacagcaatcggtggtcttattccacggacttgatttagactcaaagatcggaaactcgtctctgaatttcaaaagaccatccctctggtcgtggcggcaaaagtgaagcgaaggagaagctagagagtgtataaggaaggagaaatatatggtaataatacaataaaaccaataacaatggcttcgagtcattattatatctatcatttgatgagtttgtattgtaagtaatgagttatatgtgcttcactgattctatttaaatagaaaaagaggaattagaaaaccctaagatgggatatgacttattagctagtcttgcgtcaagttgtcgattcggttgatttgtctaagtctttgtcaatcaattgttccatttgtctcaaaatttccacgtaaaatcatgcacgactaattcttcctaaaatatttcttacgcgtttactgtctcatgttttattttaagttcttctgtatcctttttttaagaatatcgttggctataaggataattattactatacatataaaatatatatatatatatatatatatatatatatatatatatatatatatattatgattgactctattagtagaactcctctgatgggtgcaatagaatatgatcaacttcagttttctttcagatatttagacaaatgtaatcatgcaatgcaaccgttgaacagtaaaaaaaaaaaaaaactcaaaatatgcaccatcaaagatttaaataaccaaagaatcacaaacttttagatgttgcatcaaacctcaacttttaccacaagcttaaccaacttataatccaaaacgaaatatatcattgttcgtcacaaaaccctatactgttctgtgtccatctgaaaatttggtttgagataaaaccagaagcaagaagggaacaactccgatatatgtaacaggaaatcctcactatcctttactctaaaccatctcaataattaattccggtttgttacccagtttagtaattacttttggtactttaatttgtggtcacatgttggaccattgcagagaatcatgatttacgtacgagcagttcccatagaacacaatgtagtctcgtaaaggaaccagccaaactccagaaacaataaagaaaaaacgacaaaacaaacaaaagtagagagtgagttttactaaacgacataacaaacaaaagtcaagagagaaagatcaaactaaaactttttaatcatacgattcatattagttgacttttttgattagttaccgcgttaatgggtgacatcactgacttatatgataggttatgaaaggtttgcgtaataacctattgtactatgtatcacttattacacgttgtggtcacatgttggaccattgcagtcttcagagaatcatgtttttatgtacgttcatcttcttcttcttcttcaaggaccaccgtcctttaaggtgataattacaatcacttttcatgttgaggtttagagttctagatcggatttattatttatcacacaaacaacagtttcaggcaatagacgcgctgatttactcctcaacgagctagcgaacattgatttattatcgtcgtcctggactcctggttggtttccaaattgatactctattagactattaagccgattactacgaatggcacatatataagctcaattggtaattttaaaaaagtacatgattttatgaagtcaaaaacccattcaaaagattcatgcatatagttggttaaacatacgtttgatcaaatgattaacaactgttttgttataacttataactcaactcattttaactcatcaatccagttgttataaatttgtttaccttgatagaatggttggtgaagacgaattcaatttgatgttaattcatcttcatacgcatgcattaaccttgactaaagtaagaaaaaaactaaaaataatgattttaattctaaactgcatctattaattagtcctgatgtgcaacaagccaagatgtattaaacaccaccatatacgtttattacaactcatacaatagaaaagtacaacacaaacgagtcttttggaggacacacctgaaaaattcaatacaaatatgaacaagacgttacacaatgcttcacaaaggcatagagactacaagaaatgggtttagcgaacacttggggtgactatgactttttttttttttgggaccaaacttttcagcgaaccattcttgcttgtgtgaagaaaagatgtatccgatcaccaaaccacagaaaacaccaggtccataagctattgcagctgctacacagttaaacattttttcctcctcctctaactactagatccttgggttgttgtgatgtaggattcaggacaagggttaattctccacagtctttttcgagaccatagagtttagggtatatctattaaagcttagccaatttctattcctaaacgaattatatcatcgttctcaacagatggctagattatgtccatctgaaaatttgatttgacaaatcaaaagacttggaaattaaaactaccttttaactccggcaacatacacagatttcttcataacaagctgtgggataagataattgtcgttatatatcgtaattgactcaaacactagaccttggggcctgtgtggttggtttccaaattgattgcctgtgaaggcccattaatacgaatagcctacatatatgtgctaatttaaatccctaatacagtacatagtcgtgcatctatatataaatatataataaatctacatttattttggtgtagtttttattataaagaaagagtcaaatggttactagaggatccaagtccaactttagcaatcaaatcttcggctaaaaaaatttcctccaaaattttcctcgcatagtcgtggatggtatccactgtttgtcctcctcaacaaaatgtaaaagccattcagaagtacaaacatgaaagaataaaaagaaaacacctttttgacaaaaaggatacaaaaaaatcatttgccaacaaaacaaccgaaaattcttcgagtagtatcagtgggtagggccaccaggagtaaaaaaatcattaagcatgtgagtaaaaaacaagagataaactgttgcttaattctgaaatctctcttgatctatttattattctcatgcaaaccattaatctttacgggagaaaaatattagtatgatattttgagtcctgattgcgactagtgatatcgaatgattacaattactaataagtattacctgaagctttcatcacgcgtctgcttaaacattgataaatacattatacccaagttaatcattctcttaactcatataatgtcagaagatcaatgacatcgagcagacacgttgtcgcctttttactcgcttttgttattacacaagctaaacaaaaagaatgtcccatgaaagaaaaagcaaataaagagagtaatactataataaacacatgggataagaaagtggattaaggcatcaatttcgtctccattacactaaacacacacttttgattacgttccaagactcggcgccgttatcttggcgccattcacgcttcccttttatcttttgtctcctctttttaaattcaaaatcacttaatccccctaacctaattcaactatgcactccctaactatacccatatatgaacatattcttactacggtagatccattttaaccccgaaactgcccatttcaaaattttaaacagtctatgtatatcgtaactaggaaatatattaaaaacaaacttaggtttgcataaaaggaaaacgttacttgtttagcaagtattagatatcttagaaataaaatcgtttagttaggaatcatttccaattcagtaggtgtgattgaatgtcgattttatatggttcagttgatttatgagacaaatattaatggggtcataatttgtagcatttttataggaaacagtttaaatatcaaatattggtttgttaagttaatatacgttggatatttgctttgcattaaaatatgaaaccatttactttacaagtatattgtatatacacgataaattgaaaaaatcaatgattaaatgtcgtttggattttatgtaggaaaaatctcaaaaagggaacgatctgattcgattgcaaaaaaaaatcggatcaaaatctcatataaggaaaaatacgaatcaaagacttccgcttcaaatttttttttttgaaatccatccgattaatttttttaaaatacatagatatcagtatatcaaaaaactgaaaactcttccgtcttttgagaataaaagagtccaacttttgcattcgacatttgactataacagtatcttttcgagaagacgcaaagtcgttacgtgcgtttatatttcgtttattcatgtcccaatactacctcttaggaaataagagactattaagactttcttgcttcccaatacacccccactaatatcaaataacctagtttaatttcttccgtttctcaacacttttaagaaaatacttaacaattgacataaaagaaaaaacgtacagaggaatttgaatggacaaacaaaggtgaaacaactagaatggacaaacaaaggtgaaacaactagaatttaacaatagacaaaaaaaaaagaaaaggatttggttaagcaatattaaggtatgaactaacctaaaccataaaatagtaaaaaaggaggattaaggttactttgtttaggagcagcacgttgataaccaaaaagccataattatcgcttccttcagcgcaggatccttctctctcctatctctctgtatatatatgtggaccttcacgtaatagcttcgtacttcaaacctcaaaagcaatttagctctctgtcttcaagatgacttctcttttcttctttgttctccttttctcgtctcttctcataagcaatggcgatgccaacccaaattacaaagaagctctctccaagtcattgctcttcttccaaggtcagcgatctggtcctcttcctagaggccaacaaatttcctggagggctagctctggcctttccgatggctctgctgctcatgtacacaccttaaaccatatttaactttgatacagaatatatctttgttagtaacattgatatatgaattgcaggtggacttaaccggcgggtactatgacgcaggagacaacgtcaagttcaatttaccaatggcgtttaccaccacaatgctctcatggagcgcactggaatacggtaaacggatgggtcctgagctggaaaatgcacgtgtgaacatccgttgggccacagattatctgctgaaatgtgccagagccacgccggggaagctttatgtcggtgtaggagatcctaatgttgatcacaaatgctgggaacggcctgaagacatggacacaccacgtacagtttactctgtatccgcttccaatcctggttctgatgtcgcagctgaaacagcagcagctctagctgcagcttctatggttttcagaaaagttgattccaagtattcacgtttgctgctcgcaacagctaaggatgtgatgcagtttgccattcagtaccagggagcttacagtgattccctttcctcatctgtctgtcctttctactgctcctactctggttacaaggtctgctttcacatgaaactaaaccactcttaccactacatcagatcctcatttttaaaaatgtgaatttatgaacacaggacgagctaatgtggggtgcgtcatggctgctaagagcaacgaataacccgtattacgcaaacttcataaaatctttaggaggtggagatcagcctgacatcttcagctgggacaataaatatgctggtgcctatgttcttctctcacgggtttgtctctctgctaataaaaactcattgagaacatagcttttagcatcacactatctaacttttacattttggcagagagcattacttaacaaagacagcaactttgaacaatataagcaagcagctgagaatttcatctgcaaaatccttccagattctccttcttcctctacccaatacactcaaggtaacctacttcacgatatagaacacaaattgctaaacaacaacctcttctaatcatatgtttaccaattacaggaggattaatgtacaagctacctcaaagcaatcttcagtacgtaacctccataacattcttgctcacaacttacgccaaatacatgaaagccacaaaacacacattcaattgcggaagctccgttatcgtccccaacgccttgataagcctatcgaagcgacaagttgattacatactcggagataacccaatcaaaatgtcatacatggttggattctcttccaatttccctaagagaatccaccacagagcatcttctcttccttcacacgcacttcgttctcaatcgttaggctgcaatggtggattccaatcgttctacactcaaaaccctaaccctaacattctcaccggagcaatcgtaggaggtccgaatcaaaacgatgggtatccagatcagagagacgattatagtcacgcggaaccggcgacttatataaacgccgccttcgtcggacctttggcgtacttcgccgccggccgttcgacttgaaattgaattcgccaccgccacattctccgatttgtagttccattgttagttaaagatccgttggtccaagcctaacgtgaaaatcagaagggacaaagttatttaaatgtaaaactcttaatgggctaagacccaatactaaaggacccgacggaaatatttctcgtggtcttatttaactctaaccatcatcattacgcgtttcaaatattcaaccaaggccgttaattaagcaccacggaaatatttcatgtttggttatagcaccatgaaagaacactagaatatttacttgtcaattatgtcatgaaagaacactagaatatttacttgtcaattatgtcatcagtacaaagattaaacagctgaaagatatgcattaagtaggaaatgtaaagacaaaatatcgttttctgctaaaaggaattacacatatgccaaacaatgggccgagagagaattgaaactaatgggccgagagatattttttctcttagtgggcttttaggagaaactgtagcaaaaacaacagatttcgaacaaaattttgatgtagatcatagctaaaaaataatctggagtgagcgacaagcaagcggcggccgtcatggattcatcgccgccgaagactatcaccaaggctctgccgcgtttctctgaactcaaacctccgctctcagaagatatcatcgaggcgcttgaccggtccggtttcgaggtctgcactccggttcaggccgagacgatccctttcctctgcagccacaaggatgttgtcgtcgacgcagccactggttctggaaaaaccctagctttcctccttcccttcatagagattatccgtcgatccaactcctaccctccgaagccacaccaggtaaggagaattagccgaatatcaagagtagtagcttatgctatatgttaacaatttcaatctcaggtaatgggggtgattatatcgccaactagagagctatcagcgcagatacataaggtggcagagccatttgtctcgactttgccaaatgtgaactctgtcctgcttgttggaggtcgagaggtggaagctgacatgaatactctcgaagaagaaggagccaatctcttgatcggcacccctggaaggctttcagatatgatgaaacgaatggagtttctggattttcgaaatctcgagattcttatcttagatgaggccgatagacttttggatatggggttccagaagcaggtcaattacattatatctcgcttgccaaagcaacgtaggactggcctcttttcagctacacaaacacaagctgttgcagacctggccaaggctggccttaggaatgctatggaagttatatcgggagctgagtcaaagtcgaaaacgtcttctggtctgtattgtgaggtattattattgtaaggtcaatatttaaatacgtatatgtgtttcgggatagtaagtttatttcttcttcgtgtctctgcagtatttaaaatgcgaagcagatcaaaagtcatcacaactagtgcatctcctgatcgagaacaaaaataaaaagcttgtcgtgtaagttttgtcacaacgtacttatcaaattaagcatccttttacagatagtctaactagtatctcttctgcagattcttcatgacatgtgcttgtgttgattactggggactcgtactttcaaaaattcctaccctcaagtccatttccttcttttccacccatgggaagatggatcagaaaggtagagacacggcattagcttcgtttacagaggcatcaagcggtgtccttctatgcacagatgtcgctgcacgtggacttgacattccaggcatcgattacgttgttcaggttgattgattaatgcttgttatgccatctttgttgcaatggattttgacaggttattgtatgtaactggtgcagtatgatcccccacaagacccagatgtatttatccatagggttggcaggactgcaagaatggaaagacaaggtagggccattgtgtttttaatgcccaaggagacagactatgtagagttcatgcgcattcgaagggtccctcttcaggagagaaaatgctctgagaacgcttctgatgtcatcccgattgtaagaaaacctccacgtatctcttttttctctctttctctctctcgctctcggccacagggtggtttaataataagtgctacaatgtaaaatgcagatacgttcactagccatcaaggaccgggcagtgttggagaagggattacaggcatttgtttcctttgtccgtgcttataaggagcatcactgctcttacattttcaggttcatttttcgccttgtgttgttaaaatatgttagcttttgtaactccattcttttgttccccttaaatttacagttggaaaggacttgaaatcggaaagttagccatgggatatggcatcttgtcttttccttacatatctgaagttaaacaagacagaattggcattgtcggttttacacctgtccaaggcatcacgtttgaggacataaaatacaagaacaaatctcgggagaaacaaagacagcaaaacttactagcaaggaaagacaaactgcaacaagaaaagagagggaaacgcaagaaaagctccaaagaggcggttgatgattctaacaaagcgtcgagaaagagaaagttaacggggaggcaaagacaaactatccaaacagcgcaagatgaagaagaaatgaatttgagattatagcttactggaaaaactgaagaaaggctcaattatagaagatgattttgctaaacttacaggagctcatgattttgtctgataaagaagcaagaaaacatttcaggcttcagcagagatgggaaggtggacgactatttattataactgagatcatgttttgtcttttggttgattctaaacatattggtcagaaagaatttaacaaaaggattctcaaatttaaaaagctctggagtggttttgtttttggtgagaacaagggttggaaaagttctgtaattagaaacgaaagctcaagacacatgtctaaagctattttcaatcctggtgaacataccagccggatttcagagtagagaatatatagccactgttgagagtcacaaaatacctcaacgctctttaagagatgtcaatctaaaatcgccccattatttttccagcttagctttcggcccattatatatttatttgaaaaaaatacccgctcttttattttaaaattttcataatctttcatgatcatgatccactgatccaggattaaaacatggcataaccagcaagtgatccgactaattctagaggtgaaacctacctgataatcataagaaatctattaatccatgtaattagcaagatggattactatataaaatgagatgaacatcaatgtttgtaactttgagaattgtcatttgaaacaaatctcatcttcatgattttatatctcaatctattaatctattataacttggtgatttcattctcccctttttaaaaaactttcttgcacctaataaaattctaatttatgttaataagctcatttgagcataaacctatcttggtttggttacataattgcttttcgttaacaaacatatgaaggttgctggtgtcacttgatttataactttcaaagactttcgtgtacaactccaaataaaaagagtaaaaatgaaagaagaggtcggccaaaggcgaggtcgacgcagatgaaaacgccaggtgtctcagaagaagggagcaatcgaagctggatctctctttacgccacgtcatttttagtcaacatcatgtgggacccatttccttaaccgtcattctccttctctaccgttcactagtttcctaattttgaatttcaattatttattggatttttaatttttatgaagtaatttcacactgacaaatatagtactgtaacttattcaactattcaaacttgctactttggttgctgctatatacgataacactgttatagaaaggtgtatactcattgctcgttggttttaaattggaatacaaacaaatttccagaagataaacaaattattgaaagataacttatgtcctaagtaattggtatgatggtttttactctgataattaaattagtgattttggacaaacggaaaaatcaggaaatcttaaaaatatttgtttattttgtttgatcggtttgttgttgctgaaagtttttgatcgaaaattttgtgattgaatatttagagttactttgtcaaagttggatacctaattaccaaattgcatttccaatctaaatctaacttatacatatgtctgtatgtttgtaactaacataggaacacatatgtcttgttttaacgcatatataattttattttattttgttgtgatgttttgttacaatctaaaatatgtaatagaatttttgaatacttttaatttaaaattttgggatattcctaatgatgatattaatagaccaaaatgaagtaaatccattaggaaaaagtgattggatccacatattcgggaatatgcattcctaagataaaagttcacttttctttttaaacaaaagttaaagagtcctaggatttaaatgattttaaaaagtttttttttttaaattacttttcttcgtaggaagaaactgaatgaatgtgaaactggaataataataattatgctttctggagatataatagtttgaattgaatactataaccaaataaatataaggccaatactatagtggctataactactaaactacatccatgtccattaaccccacaaatgaattggcaacctccccatatgttaatttctatacccaaatcaaatcaaatttggaaaaaacaaaaaaatgttcatgtacaaaaatatttaaacgtaggaaatttaataatcagtttgaacaacaacagagaaggaaatctaataataatatctttagtcaaaacgtaaagataaatatgataatttacttcaatttaaaattattcactttacagctaagcacataattttgattagaaggtaagatatagtaaggaaacaaatttaaagaaagtaattgcaaattcaaaattattgaccggtacaatcatttcatgtgtatattaaatttgctcaaaactcttctcacacccatctctgtgtccattgtcttgtctttcgcggatcagttctgtcgactctacagattcttccgcgtttttttcaattttcgaaagtctctctctttttgactcttcacctttttttttaacaccacaacggttaaaaaccctcggcttctataaatcccgtgaaaaaagtgggatagattgaggtgcgtttcattgattgtgatgcagagacgaggtagatcgtcggaatttcatcgaccgggtttcattagatcggatactcatcggagacgtcgccgttgaaaagggttttgttacgaagaagccttccttttcggtttgtcttcctcaatcaccgattcgcttctcaggtaaattcttactccggctactttctcctcaattcttcgtctttctacaattggatctgaaaatcatttgctgggtcgttatcgtttttcgatttcattgtaaaattttgcagctttgactcaagtgctctgttgttattgcttgtatttatgagatctttgtttctgttgtttagtttatacaattttgcttttagttgtgaatctgatgtgtgtcgttatgaacaggtgtgaacagtatattaagtttttgtttggtgatctgatcttattggttggatgtgaaatgcaaagatcacggagagctcttctggttagaagaagagtttctgagactacttctaatggaaggaatcgcttctacaaagtttcattgtctttggtttttctcatatgggggcttgtcttcttatctacattgtggatcagtcatgttgatggtgacaaaggtaactttttgagttccttatttggacagaatgcaaaacagttattagaatatggttagagaactgaacttaagtaatatacgctcttagagatatgacaatcatgaagatgtatagaccatatcttaagtgtatctaaggcttactcttgggcatttgcaggtagatctttagtggattcagttgaaaaaggtgaaccggatgatgaaagggcagatgagacagctgagtctgttgatgcaacatcactagagtctacctctgttcattctaatcctggattgagttcggatgttgatatagctgcagccggagaaagtaaaggctcagaaaccatcttgaagcaattagaagtcgataacacaatcgttatcgtaggaaatgttacagaaagcaaagacaacgtgcctatgaagcaaagtgagataaataataacacagttccagggaatgatacagagaccactggttcaaagcttgatcagctatctcgtgctgttccgcttggccttgatgagttcaagagcagagcgtccaattctagagacaaatctttgtcaggccaagtaactggcgttattcataggatggagcctggtgggaaagagtacaattatgcagctgcttcaaaaggtgcaaaggtcttatcttctaacaaggaagcaaaaggagcttcaagcatcatatgccgggacaaagacaagtatctccgaaacccgtgttctactgaagggaagttcgttgtcatagaactttcagaagaaacgttggtgaacacaatcaagattgcaaatttcgagcattactcttccaatctgaaggattttgagattttggggaccttggtttacccaactgatacgtgggttcatctagggaatttcacggctttaaacatgaagcacgagcagaactttacatttgcagatcccaaatgggtgagatatctaaagctaaacttgctaagccattacggttcagaattctactgcaccttgagtttactagaagtctatggagtggacgctgtggagcgaatgctggaggatttgatatctatccaagacaagaacatattgaaactccaagaaggagacactgagcagaaagagaagaagacaatgcaagcaaaagagtccttcgaaagcgatgaagacaagagtaaacagaaggagaaggaacaagaagcctcaccagagaatgcggttgtgaaagatgaagtatcacttgagaaaagaaagctgccagatccggtggaagagataaaacatcaaccaggaagcagaatgccgggggacactgtcttgaagatactgatgcagaagataaggtcgctggacgtgagcttatcagttcttgagagttacttggaggaacggagcttgaaatacgggatgatattcaaggagatggacctggaggcgagcaagagagagaaggaggtggagactatgagactagaggtagaaggaatgaaggagagggaagagaatacgaagaaagaggcgatggagatgagaaagtggcggatgagagtggagacagagcttgagaaggctgagaatgagaaagagaaagtgaaggagaggttagagcaagtgttggaaagactggagtggatggagaagaaaggtgtggttgtgttcacaatctgtgtcgggtttgggactatagcagttgtagccgtggtttttggtatggggatagttcgagcagagaagcaaggtggcttggcttggcttctgttattgataagctccacattcgttatgttcattttgtcactttgatgagagaagagttctcagttttggtctttctttttgttttctagtttttttcttactgtagagttagctgagtcttctttatacccaataaaactatagaagttacctagataagttatgatgtgcctatgaggtttcaaatacaagagttttgtccggttcaatggaaaaaactcttatcaaatcaaagcttatacgtagaaagagttttcattgcagaaagttgatttacaaacaaaactattattcacagaaaacattttcttatgaccaaaataattataaacattttctttcaataattaaccctagcttcgtcattgccacagagcaaagatagttttaaaattcgaatccaatcaacctcttataccaatctctcacatgtcatctcctactcttcatagttcatccaaagtggggttatttgtcaacgtaacttcagcataaaactgagctttatactagagagaaataaagttagctataatcatttataaactgaagattgatggaggtttattaatggttaataaacctttccaaaaataggcgtatgccgctaagaacagagaagacacggtattctttagtaaaaggcgaaagaacagttcgctttgtcttcactgcacagctccgtgactcttgaaggcaagctctcgatctttatttatactaaagtttactcactgttctcaagaaatgagccgatgtgggatagtacaatcaatcaaattaattcatgggttattaatagcagtatatgggccatatcttgtttatttttaagcccatcccaaagcctggaggtttcatcatcttacaattctagactggttttggtgaaccggtttgatgaaattagaaattacaatgcaagagacacgtggcaggcttagaaaaataaccgaaagcaaaaacaaaaaggtttaagagagagacgacactagtctggttttggttcgagtcccgcagtggtaaagggacgactacaagcgaacataatgtttaagaaggcggtggaggctaagtctcaccagcgtctctccggcgctgaccggaaaaaactccgtcgcaccgtccgaaataggcttccccttcttaccgatgaactcctcgacgcaattcttcctcccaaggtttgatttctcttttccctcaatttttggcatcgttgttttctccatagattactaggtctttcttcttgttgtgtaatctgattgattctagattagattgcatcgagtattggcttacttctggcattgattgttttgtctaggtcgagattacactttccaagtttcagaatcgagttattgtttatagtattgaaggtggatgtcccatgtttttcgatatcgatggaagaggaactgagattttccccacagtttttgctctgtgggaggctcctgaaatgttaccttcctttatgttgaaaggaggtgaggtttcacgttatattataggcggtgcagatttgatgttcccaggtattttgatccctccccaaggctatccttctttctctgctggagaaatatgggctgtcaaagttcctggaaatctagcacctattgcggtaagctttttatgtcttgttaactgatgaatcttcttaatgaatgtaaagtttgcgtattgagttacatgatgtttatgaaggttgggtgtaccacaatgagtagtgaagaagctcgtaaagcaggtttacgtgggaaggctttaaggataactcattattaccgtgacttcctatggtacatgagatgctggcaaaagtttttttatattttacatctgtggaggaactctgtctcttacatactgaatttgtgtttcttagggaatcagctgaggggcattatgttccaaatgcggggtttatggaggatgtggtcatggaggacccatcgtaccttgctcctggttcaggtgaagatattttagacacttctgcaagcaccggaaatgaagaagatgaatctgctctggaaacagcttcaacatcggctgcggatgctaagaatgatgctgaagtacatgtcgttgggagcatgaatgagctatacttggtagatgatgtatgtgctactgaaactaataccgacaagcagattactctctcccctgaggaggtagatacccttcttgaccaatgtcttttgcaagcattgcatacaacactaaaggagaaagaccttcccatcccaggaagcactctatggtaagaaccgcattcagatacttgacttactttgaaagccacctatattctggtatttgactatgattaggttgttttattacgctctgaagctctattctgtgttactcttgactttgtcaataacaagcaagacaccttaaaccattttctttctcctttccacgtttgactgacatatatttttctgtgagtggtgcagggcaaatcatgtattaccttgtaggccttctggtctcacacttgacattaagaagtcttcccataaaaagttgtcaaagtggctgcaatctaaagcgtctggtggaatggtcagttttcatacgaatttcccttgtcttatgatactttttttggcttgattttatattttagtagatgttgttcgtagatgtttaactgcaaaacccaactggtttatcaatataggaaactattagtatcaagtgttgtaagctgtatctccttaaaagtatgtatgtaacacattggtatacatttaccctgatatactcataattgctagtagatttactctggtgtcttgactggcaactgcactctgtcacaatctttgaaatatatgcgcagatatctgttaaggaagacaagcataagaaggagatagtattgatttcagtcaaccgcagccacccagattacaaatccttcaagccagagaaaaagaaagcggaagtctccgagtctcctggagagcgctccacggcgcaagctcagtcagagaaagggcttgaaattatagaggtctataaatcaagcatacacaatagtgcaatatttgcatcagttggggaagacaaaggaaatctgtacacagcttctgaagccactgacgttgtgttcaaatacattgagaaggaaaatctagtaaagccaacaaacaaatcaatggtggtgttggatccgatactatgtgatgcattgttcaaaggagctatcaaaaagggatcggcatatccgtcagagatccacaaaaaggatgttgggtcgacatttgtaggtagaatgcagcctaatcacgtagtgatgagaggaggcggtgaacccgtggttcgtaaaggagctgtaaagccggttcagataatgacagaacgaagacaaggtaacaaaaaagtgaccaaggtcacagggatggagacgttcttgatagacccagactcgtttggatcagaactgcagaagaagtttgcttgcagtacttcagttggagaacttccaggtacgtttaaaatctatcctttttgttttgttcagctgtgtaagtgaattaactatttgagagatgattgattgttttgtgtgtttgctttcaggtaagaaagggtacgaggttctgattcaaggaggtgtgattgataaccttgcgagatatatggtggaacactatggagttccaaagagatacatcgaagttcttgataagactagaaagtgaatggttttttctatttcattttttttttgtgtgttttaatcttctaattttatttgatacgtacactctgtgactctagagatgtggaacaaatgagaataaaattgttttgttattagttttttttttaatataacaaaaaaattaaagaaaataatttatagtttgatggactttctctcttttgtgcagttgagaaaataaaaggactttctctctcttctctctctagatcttttagagagaggaagtttctgatgctcaaacttggctccgacaatagccagcttttttagtggtgttggttggcttccttctggcgtcgttagctcctttagcaacgtcggctagcttttctccgacatcggtggtttctttagcaccgttggtcggcttcgttcttcaaatttagtttttgcctttcaaccttgttcgattctattttgcttcggttttaattggttttgatttctctttctcttcatttcgatctaaatttgtaatttttcgatcctcccttctttaaggggcttaatttgttcttcaagcttattgagttttcattttaaaagatcaaatttttagttacggattgaagtttaatttagtgtcttttgtttgattttgatgaaattagagctgttgtttgtctttcttgttgccgatgcttgttgaatcgtttgggtttatgttgtttttcctttaaatggcagaagtcgaagtcgatagtttgtgagctatttctttcttgaaggttttaaattttacagtcattgtcacagaagatttgtcaattgtctcatcggatttgtagctgcttccgatttggcgtttacagcaattccggtgaacttaagttttttgtggttatgattctccacctgcgacattctgcaactcatcattttctgtttccacgtgtcctctttaccgtgtctctagtgccatgtgggctttgacttattagcacattagctttctcttcttcagaaggtggtctttgggcttttgtccgtttatggcctgttatatggctttgtaaaatatggcttgttaaaaggctttgtaatataaataataaaacagttgtgacaaaaaaaaaaaaatatatagtttgatggtgattggtgaacttcttttttttccaagattgcagtaaacgtcgtctttagctccaaaaacaacctttgtcttgttcagctaatggcgatttttgaatggcggcacagaagacggccattcgacggcggaggaactcgtcgccgtcgtttcttcagcccattgtattcgagaaatttcaagagaacgattctcttcgctgtgattttcttagctatcttccctcctctctacttccatttcaagctccgacgaattcgtcagattgtcgcgcaaaagtgcgattggcttcaccatcctccacttgtctgtgctcacggcggcgattccaccctcgctttcccaaacactgtacgtacactctcgatctcttcttcttcacactcttgctactaacctttttaaaccttaatctcttggactcttctcaatcgtagatggacgcttacagtttcgctatacgttctcgagttgattgcattgaagtcgatgtttctcgttcctccgatggtgttttattcgctcttcacaacaggttacagactctgatccttgttgtatcatcttcttctaatgtttctgtgtttggattctcatcggtgttcttcttattcatcttctgatcacacgcacagtcagggatctgcagcgtattgctcgtaactcttctgttcaagttggagatctgagtatgaaacaggtctcatctctccctctctctctttaccagcttttgggatatgcttttttgcatccatttttcataaaccttttgatgatctttttgcagatcaaggaactcgatgtctcggagattgttaaaggaaccttgggaagtagtaggattcctactcttgaagaggctttagcggtaatgcctgtttttttaattactatcttgtcattgctttgctttgtaatttctgcttagtaacaagtggctgaagctagttttgatcttgaatcatctagttgatatcgaattcagtccggaaagtgatccttgatgccaaagttggaccgccaatgtatgaaaaggggttagcacaagacatcctttctattgtaagtactatgtttttgttagctcttgtacttgtaaagctttagtacaatgtgctcgagatttataaacatgttttgattccttaatagcgttgcttaatcatttatttcctggtatctttgtacacaaagctagaacagcttactatagatacttgaaaaaacaagagtatggataaattgttgatgtttcaatggtggtatttctggctttgctcacatgaatcgccaatcctctgttgttagattgagagagcgcagtgcaataattgcatcgtatgggccaaaagcgacactttggctagggacataattagacgagcaccagatactatggtaaacagaaatggattgtcttgtgaggatcagatagagaagtttcttgctcatttcctagtgattttggcaggtgggatacattgtgatggtagatcctttgactggggcgagaaacagcctgctgagaatgaagggagctagggttgtgggagtttatcatcccttgatcgatgaagaattagttagagttgtccgtcggtaagcaatcgatttcaatgttttcaaataaaaacacacctgctcatgtgtttacaaccttgctcgatctgatcaacaggagaaacaaagaggtgtatgcatggactgtggatgatgctgatcccatgaaaaggatgcttcacttaggtgtggatgctgttgtgacgagcgatccatctatgtttcagggtctcatggaagatcttagaactgagtgtcttgaagaaggtttttcaatacggacgtgagaatttctttttcgagcattcttaatgactgtaataccaactcagaagtttttggcaaagatctttctttatgttgttttgctgatccacaagtttttgacaactacacactacgacgccttgatacacagtaagacgagtctttctcaagaaaagcaaagtatggccggttcttgatgaagccattgcttctatcgatacagctactgataatctgatccaggagactctgaggcaacacttttcggactgcacagtgaaaacaatctcacacagatatcttcttttatacataacgatatgagcctgctcctagaacaaggtctaatacacttgtatttaagtttaaataatcagatgactgatattaagtctgtttatataatatggatagagaacgatatgataaggtgattgaagcatgttctttgagtaaagatctggagatactttcattcggtgatcagaccgtcattggagaacgcggcatcaatttgagtggtggacaaaagcaaagaatacatattgcacgcgctctctaccaagatgcggacatctatctgtttgatgatccttttagtgctgtcgatgcacacacagggtcacatctctttaaggtacaatcttcttacttagccattagtgtgattgtgatttctccttccgtaaacaatcatgtatcaaatttattttcattctcatacttttttcaggaagctctacgagggcttttatgttctaaatcggttatatatgtaacccatcaagttgagttcttaccttctgctgatcttacactggtatgtgaatagttcactgtcttttatcattttctacagcactgagaatatgaaatcatccataaccgattttcttatgcctcaggtcatgaaagatgggagaatcagccaagctggaaaatataatgatatcctcatctctggaacagatttcagggagcttataggtgcgcatcaagagtctctggcagtagttgggtcggctgatgccagttctgtttctgaaaactcagctttagacgaagaaaatggtgttgtgagagatgatattggtttcgacgggaaacaagaaagtcaagatctgaagaacgataaattagattctggggagccccaaagacaatttgttcaagaggaagagagggcgaaaggtagcgtcgctttggatgtatactggaaatatatcacactggcatacggaggagctcttgtgcctttcatattgttggggcaaattctctttcagcttctacagattggaagtaactactggatggcttgggctactcctatttctgaggatgtgcaagctcctgtgaaactttctacgttaatggttgtgtatgttgctttggcatttggaagttccctctgcattcttgttagagccacgcttcttgtcacggctggttacaagactgctactgaactgtttcataaaatgcatcactgcattttccgttctccaatgtcttttaaaattgcaaaaacttgttcaaaaacttgtatatattcatcataactatatccaaatatgtattatattgacagaaagaaagaaaacaagagaaaataaaacataaaaataatccataatgtcaaataaagaaattacaatatacttaaaataaataaatatctaaacatcttttttttaaaaatattctttttaacttacatataatattgttaaaaattgaaagtataattaacaacatcaaagcatcaaatttgaaggagaaatcattgttggcaaatacgaaatcgttctttgtctaaaaaaagaaacttgatcttgacgatttctgatatttgaaaaataggcagccgctagaccaagcatccaaaacttttcatgtaattggttggttcttataacgtcaatcttaatagaatatattttctcccatttttcggtaggatattcttggtgtaaactccaaacgaccaaatttgaactttctagcacatccgataggcacaaacgttcattcagattccacatttctatattagtagcatatttggtgtcacactctggtaataatatccatcgaaattcttcagtgtgaagatcgatagctaatagctggtaagatgtttgactaagcttctttaatgtcaaccaaaagagggatccgttggcgtagactgatgtttgctcatcgcagaagatacaatgatgtatgtcataaaaccctacgtctctttgctcaccattatcaagggataggaccttggccttgaactcatgatcatgtatttcatatcttgtatatatcaaaaccaccttataagattttttaacaatatctttgccaaatccagcaagagacggcattctcttcactaatccaccttgacgaaaaatttttttttgataaataggtatataacatattactatgtgaaagttaaaattcaactctataatcaaccatagaacaagaaagttgacaaaccagatatgtcataatccaatactgattgagaaagttgtctccatggtttattggccattgcgggggttaagtaactaagagtaaatggccattgcataaattcgggagaaagtttcatgtgttctttagtcgtcggattgatcaagtaaatggacctgaaatcgtcatggatccgaagcaagaccaatccatcacaagaccccaatacttgaatagttttattttgagattcgtcgactggatcaccagaaaaagtgtagtaactagaagaagaaagacaagtttttctgttgttttgatcatctctagaaaaagtctccaaaagaaaagttattgagtttgaatattcttcaacaaaattcgctgtaaagtgttgactaatatgaagaaatttcatattaggggttggtaagcctgtacgaatgagtcgtttgtgggaaaagtaggttgattcgatcatcgatgtccatttttttgataagactttgaatctagccagtgattttattggaagatggtgaaagatcccttcagctatatcatctggtataaatattgtcttgggattattatgtttatcattctccattcttttcctacgatgatgattcttggagtagatttgtgtatctctatatataaagaaaataatgatctaatgttggatttttaactttagatttaacattaactgtggcgaaaaatatataacactattaatttatattagaataataaagagcaaataaataaacatgtatttgtttatgctataaataataaatgttgattaatatatgtttatattattcctaaaaataatgaaaataaattaagacaatttatgattaaatatgctttcatttaattttctttagcaattaatcccttagaattaattctttgatagattttaaaatttcatctacaaattcttgaaaaaggtttggtatctacttttttaatcctaattaactagattagaacatgtccgatgtgcaatagaccgtggtatataacgatgcatgtatcatccattctttaacaattaatcaccttcaacaatgcaacactctaaagtcttaacactctaaaaaagatttaacactaataatttagtttacaattatgaattagaaataataaatatgtataataggctataaatatatataatataatcttacaataatttaaaatatagaaatgaaaatcttacaataaatcttacaatttgaatactgtaaaatgattgtaacattgatctaataacatattgataatgtgaaattgccgagctttttttcttctgcagaccgagggatagagaggagatggagaggcttcaggagagaagggtgacatcaatacgcagcgttttgaaagaacctaggaattaaatttacatttaaccaaatcaatgtaataaaaccattggtccggtctgaccaatttaccgctccctaactaaaccgactacgtaccgttttgaaatccttccctaatcagaatcttgagattacagagagagcagcaaacgtcgtcgttttaggtcttatctaattaacctaatcatatatatgaaagttggtcaactctctcccacaatttgacacatcagcacatgagagcttggcacctagacttcataaaataaataatacataattagtaattaattcaacataataactaaaataggaggatataattaatcagaacttgaaccatcactctttctacattttttaattcaatatattctctttaattttgagatccaaacatgttacacatactaaattttaacccgcggtataccgagggaacaatttattttttaaatttagtatatataaaagtttataaattgtatctatctataaaataattttattttatagtttacaaatgttattaagtaacgtcctgccaaacccgtcctctaaaaaaaaaaccatttattttattaatgttgatcttatttatgatatgtttatgaatcattgtctaaatattttgtaattttgtagtaattaaatgctatcagattatatctctgcgctttgatgattataatcgaattgttatagttatggagagaagcaatatcaaaaatgataattttgtagtaattaaatgatattaaatatgttggaagtaatattttagtaaataatcgtgtagttaatgtggagagattttgggaagattgttaaatgtcaaatatttaattcgaagattttctttttaattatcaaaaacaaacattaaaatccagtggcaactattgtaaataagtccaactacaggatttatttcacaaaatggctgcaaaaatgtatatatagattccttgcctaaaaattagacgattattatgaaagaaactaaatgaatatgcaaattaaatatatctaagctttttgagatttatgctaagaaaacaagtaatttgaaagatgtttaaggagctatccttataactaatacaaattatgacaagaatttaactaaatttttcaagaacatcaagttgaatatgattatattggatatgcagagacatggttaataaagacatgttatatttttaatgtaagaattaaattttctaaaatttcaccgtctcacaaactaaatatataactaaaagaacaaggatatataaattaaaaaaacaacggagaatctagaacaacaataaaaaacaattcaagcactttcgttttcagatgaactaatatagttggactttttgaaaacaattacaaatcatatttatgtttaaaaaaacagatgcattcaactttactttatatgaacatacattatataaaacaattagtaaatagtaatacataaatccgtagtgaagattaaataaataaaaagtctaattaaaggaagcgggacgatgatacaaaccgaagtgaagattagtgaccctggatgggccttcgtgggcttctatttgggtttagtgtttaaagcccatttcctctttattgtcgtgtacttaagcttttcttcttctctgtaaacgagtatcaaaaagatcaatcaaaatcaacaatcatcttcttctgatttctcacctctttcttctacttctcatcataattctgttagttctttgataagcccatttcgtgcctatcagacgacaactaaaccctacacgcttacataaaaacgcgacctttgagaattttgtccggcgacagaaatggcggggttagggttacggctaaaggcggcaaaatggacgttgaggagcggatcaggtgctgtatcgagagaatggtcgtcggagatggggaaaggtgttcgtcgattctctactgaaacagagaacgatgttccaacttcaggaatcagtagaccactcgctgagattctcaaggagcttaacaaaaaggttccagattcagtcatccgaactcgagttgaagatgggtgctccatcaaatacatcccttggtaatctctttcctcagggtttagggttctttaattggggtttttgggtcaatacttatactcttttcttgtgttgattctcaggcacattgtgaatcggatcatgaatatgcatgctccaggtttgctaaaccctctcttgttcttctggggttcgttgttgggttttggttttgacattttggtgtattattctctgttttcagaatggtcaggagaagttcgaagtgtcacttactctcctgatggcaacactgttactgtggcttatcgtgtgactctctacggcactgatgctgaggtctttcccttcctcttgtttcagtgttatggtttgatttggttagcctttagctcaagtcgtctcctggtagagttctttgccttcttgcctcagaagctgcaaatatagaaacctagttgttttcttttgggttgtgtccattttgaattgtatgatgaaacccgtcaaggaatacagcttagagagtgtatgtttatcaactctggagaaacaccaactctgggttatagattctgttatcagtacttacaaaccttagagatgatatcacttgtgaatagggaggtttgacctgttttcgttagtaaatatgctagtggtttgcttccttgcatactttcttgagcatattatgttttcattgttttgcttgtaacttgtacgctgaaatcatttgctaataatcatttttttggtgttgtcaagatatttagggaatcaacaggtaccacatctgtagatgacaaaggctatggtgatgctgtgcaaaaggcggaagcaatggcatttcgccgtgcgtgtgcaagatttggattagggcttcatctttatcacgaggatgctttgtaaagggtaatctttctttaaccatgggaaagtatattattttggtgttcccactgcctagtagtagtagtctttgaaggtaaaactcagggaagcttaagtttttggtatcttagatatgtatcagctgatattgatcgctttatgatttgaaatcggttaatgaaatgaccttcagaggactctttgttgcatttctgtaacttaacttgaggttgcaactttaaccagtaaaagttatctgtttgtggcaattcgcatctgcactctctgttcactccttgtagaaattcccatgaaattatccaagacacacaggctgagaaaatacctagactaaataaggataatagtagcaaaagacataagaattatacataaggagccaatatgttatctttcagaaagtctttttgtatttcttgatctcgaacatgattgattgatagttgacaatatccctgttgagagcagatccaccatctatcttcttgatacagtcttcgagtcttgtgtaataaagcaaaagttgtgtcattccagctatcaaaatatccataccacacaagaagttactaaagcaagttatgatatctttgtgcatcaattctatcgctgtcttccatctgcttccaaagtccttcaccagcggctctacttcagcaactgtgatggacctctctaaatttggacttgaatcctcatctgctaagtacaattcggtggttattcgacttaacaaacaatgagtgcgcgaagacaagaaagaaagaaggtgcttactggctcggcttttaacaaatttgatcatatcactgaaatgctccaccagcaattcttcctgcgaaattacaagaaattaaacaaaacaataatggaaacataatacaccaaatcttactatctttttatgctctttgtagcttgtatacttgatcaaacagaaatcagcaaattataaaggcaatcaaactgaaacattgtcccttaccgcaaataaggaagtgttgctctttagtaattcctcaaaatgcatttgaattttcccaccctctggttcagcttcctagaatagatgaagattgatcaaaacagattaatatatttctggtaaggaaagaaacccaagaaacaatagatatgagttaagatttgtagataattcgcataggctgacttcttagtggtctacatgggtgcacttaaacatgagagagccaagggttcttctactcaccttcagcacagcaatggtcatatcatagttgttaatgagaaacaccatctgttgctttggccttgggaacaactttgcaagcttaagaatcaagctgtctactgccattcttaaacgctccaaatttatatcaagctgcaaagtttcatagacaaatgtcaagagctttgggtgagaagctccaaataacacatatcgttagggacagagagaatacttataacgaacctgcccatctccatattcaacattcaggtgaataaacgaagccgtgaattcagcataacgtctcatgatatagtgaggatgcacatcatcttcccatattgtatttatgtttgcatttcgcagactgccgatgtgcaagtcaaacaccgtcttaaaacgaggccacaaagaaatattaacctgctcaatttgcaaaagattcattaaggaaatcaaccaagcggcatctatgagctcatatctaaaatctatgcaagacattcaaagttataccaggtagaaaacataagttggcacaactgcaagtaatatacattaagagtatatcacacagactaaaagagagacaaggagttactaaccttgtccagatatgaatccaggcatggaatcctccggcgagacatgataagctgtgaaaaagtggcattattgagaaatgcttgatacacatagttgagatataaacaatcatcacactcaaactaataattgggttacctggtggtggtgtataatgcgaatcataagcagcaaaccgatagcatcataacagcttgagaggacggaatccaagtgctcatagataacagagaatgggcctgtgtcatggagaattcagaatttatccaagaaaaaattgcgtaagacaatatttcttacacactactcaagtaccatataaaaatttgtaacaactattctgactacaaagtttggtatagaaaaaggaggaaagattaaaacttacccgcaaatatttcataaaatatagactgttcaccaaagaaatcttcacaaaagatatacctgtcaaaatgaaaacaaatgacgttaacaagggggtgggtggtgagaaacaataacacaaatagaaaagaggaaagatcaacagaactcagaagtagctgtatccataagtagcttgtgcaagctcctgaagagcacttcataaggatacttgagagagctggcttcggctatgtgcgggatcaaagcaggttgatcaatttcctacatcatacatagtgaaacttaagtcttttaacaaactcttgcgatataatacctccaagtcaacgataagaaatacaggaaaatatcaagtgaacgtggaactaacgaattcgccaaatcatgctcaatggtctgaaaaaatataatcactggataaatgatgaatacctttataatttgtatcctctcacccaaagcaaaaacggcacaacggttctttagtggctccttagatcttgagaagaggccagtgcttctagtgtccacaccaatcaagtcgtttgatgtggctatatctaactgtagtttctcaaatgcttgaatataagactgaaaatgtgcacttagcacctgaaaccagatctcacattatattaggtgtaacattaacaactgaaagcctaacccataacataaagcttgttcaatctaacctgcatacatcatctaatcattatagctctagtgagaatacaagaaaagaagaagtaccttgttcatggtatctatgtatgcagcgcggacatccataaacacttcttttccatgttctttgaggaaggagataatatacctatgatcaaaatgtaatttggtaaatgaagtacgtaaaaaaaccaaagtaaaagggtgcatgactcacttgtactttaaaaacacactctgttgaagaatctgaatgtttgttttgggtttcctcagggctataagcttctgaacaataaaatcataaacctgcaaaacggaaataaatgagaattgctccctcgacgtgcatgcccttggaagcattggaacagaacaaacaaagacataattgttacgaatcaagtaacagagaaagtagattaacaaccttggaaatagctttttgccggagcttttcaagctcaggctctacatcttttaatgctttggaacttttaactgcttgatctgtttctacaaatttcagcttcttgctcagaattccaagtgttttgatatactcttcattcacctgaatacagaaaatagcaagactatcagattagaaataaaaatcctaccaaagcaacaattacatagaaagagggaatttgaaaagatacctctccatcaacaattacatgaatcatctttggtggtactataaagtcttcgacaaattttgctagctttgattcagtcacctgttcatataggagagcttgttttgatgagtaacacacataagaaaataccaccgaggttgaaggagaaagagataatactaatagtggtttctgatatgactatatacccttcgatttttcagtctcaaacccatgtccattgaattttcttgaagaatctttatgtctgaacttatagaaccaatctcttcctgaaagaaacgaagaagcaaagtgcgcattcagattaaggagaaagaatcacaaactatataaattgtcaaatacctgaaatccactgagaagagtttccatttgtgacaagatgcagttacagtcacgaatctgatcgtgaagtgagactagtttatcactttcttttatgtaatcctgagtattaatggagggtagaaacattagtaaattacgatattaaacttgtacaaggaacaaaatacgttacatgaaaagtagaaaacaacgagtgccacaatgtatcacaggtaagagaatagcaacctcaactgaatccaattcaaccttccgtagattgttttcaacacctttggcatattctctaagtttgtcaccactggacagtatattggcaacaacctgaactttcacaagaaaaatagccttggatcaaaacttctatccatgtacagagtaagtcaaaacggagtagatatgatactggaaaaaactttgttcactttcagtttttttttctcacctcgtcactttcacattcttcaagttcttgttgaagcccttccaatgatatatcctcactgcccaacaaaaagagtaatgtcgattttatgaatgagacagaaccaaaggagagcattctaaatcagaacaataaagagaagcagaaacttatgtcaaactcgaattaaggtaaacagaaaagacatgagaatgttaccttcttgaatcctcttcaaaagccaagtctccaaagaatgctcctaattcagattcatgtttctcaagattactgaagtcgtccatagcttggccctatgtttttagatagacacaaacttcgataagagacttgatatgagcctgtgatttcggtttcgtgcagtttgttaacgtgagaaagattttagcaagcttccttttaacgcaagtcgctcttagagagagttagggttaattgtttgatttcttattgatcataaagggactttatatacagacaaggaacaatccaacttaaagccttacaatatatcattactagaaatcctaattgaaaagggaaaaacctcaaaaccaatcttaatcatgagaaaaacgaaaaatcaccaaaaaccctagtcgatggtaacgttatgtttttttagttagaagaggaagagcaaagagaatagacccaaacttcgatgagagatcgaacccgcaaaagaagtaaaacaaccataacaataacatcatgatccaaaaggctttagaactcagcaaatcaaatttagagcgaaaacgaagtgccagcttaccaatgagttagtgggcatgttgctgtacaaattctggagaaacaccaatggttataacaatagtcaaatcttaatcttagtatatatatatacaaaatttgagaattgatttgaaggccacggagccactggcgatatagatgagaggatacgcaaataccaaggaggtctatattatttttgtgataccaacaaatgtctatttttattttattttcttacagatattgtcgagaaaaaagaagttaagatctccaaattttaatagattttgtaaaaactcaaaatctgattctcgcatatatataacaacctaactcttgttcttcacataagccaagtactatcaacatgatccaagaaggttcgaacatcatgaagctgatctctagctacaccttcaatcgtaaatcttctgagattttgtgtgactgtatcataataaaccacatagaatgatctctcaatcacagagtcttgagcgaacacaagttctccagttccaatggtacctttgaagaaaaactccatatttccaacatgttgttcccaatgaggaatctcaatgcagtttctccaccaagttccatcagtttcgttccttacccacaattcaaatactccattgccattcggttctttcacaataccaaagtcaaactcagagtcatctactaaggcaacttccccattgtagttcaccaatctccaacgatgatcaatcttgacttcctcaggcaattcaatgacgctaaactcttcagaactcacgttgaagctcactaccacagatttgtcactattggactcatcagctccataatacaagaaacctcctttacatagtccttcagtaactggtgaatgatcatgcttacatgtgatcactctccaagaattagattcttcacctgatcccaccgtcattgtgtatacctgatattccctagaacgcctaccatctccgtactgtgatattacacagtggttcctcttcttgataaacagagtgaaacacaccatcacgtccgaacggggaagttgatgaacgacaatcgaggccttgtcgtcatcgatcggcgcaagtaagatctctgaatgctctcgagcggattaaagatgccaacttcttttagacaagatacatttcaccaatgatttcagaggtaaccgtgacagaatatctgtttgtagatctctgaatgctctccgagtttgttactgtcaaatgtcaatgtttagaggtattcttttaagcaatgactagagctttactttaacaatgggccgagagatgtatctcttctcttagtgggctttagtagaaactggaccaaaaactacctaattcgaacaaaattttgctgtaggtctaaaaaataaagctggagtgagcaacaagcaagcggcggccgtcatggattcatcgccaccgaacactatcatcgaggaggcgccgccgcgtttctctgaactcaaacctccgctctcagaagatatcatcgaggcgcttgaccggtccggtttcgaggtctgcactccggttcaggccgagacgatccctttcctctgcagccacaaggatgttgtcgtcgacgcagccactggttctggaaaaaccctagctttcctccttcccttcatagagattatccgtcgatccaactcctaccctccgaagccacaccaggtaaggagaattagccgaatatcaagagtagtagcttatgctatatgttaacaatttcaatctcaggtaatgggggtgattatatcgccaacgagagagctatcagcgcagatacataaggtggcaagagccgttcgtctcgactttgccaaatgtgaactctgtcctgcttgttggaggtcgagaggtggaagctgacatgaatactctcgaagaagaaggagccaatctcttgatcggcacccctggaaggctttcagatatgatgaaacgaatggagtttctggattttcgaaatctcgagattcttatcttagatgaggccgatagacttttggatatggggttccagaagcaggtcaattacattatatctcgcttgccaaagcaacgtaggactggcctcttttcagctacacaaacacaagctgttgcagacctggccaaggctggccttaggaatcctgtgagagttagatcgggagcttaggaacgttacggaagttagattgggagatgagtcaaagtcgaaaacgccttctggtctgtattgtgaggtattattattgtaaggtcaatatttatatacgtatatgtgtttcgggatagtaagtttatttcttcttcgtgcctctgcagtatttgaaatgcgaagcagatcaaaagtcatctcaactagtgcatctcctgatcgagaacaaaaataaaaagcttgtcgtgtaagttttgtcacaacgtacttatcaaattaagcatccttttacagatagtctaactagtatctcttctgcagattcttcatgacatgtgcttgtgttgattactggggactcgtaatttcaaaaattcctagcctcaagtccatttccttctttcccacccatgggaagatggatcagaaaggtagagacacggcattagcttcgtttacagaggcatcaagcggtgtccttctatgcacagatgtcgctgcacgtggacttgacattccaggcatcgtttacgtatctcttttctctctctctctctctcgctctcggccacagggtggtttaataataattgctacaatgtaaaatgcagatacgttcactagccatcaaggaccgggaagtgttggagaagggattaaaggcatttgtttcctttgtccgtgcttataaggagcatcaatgctcttacattttcaggttcatttctttccttgagttgctaaaatatgttagcttttgtaactccattcttttgttccccttaaatttacagttggaaaggacttgaaatcggaaagttagccatgggatatggcatcttgtcttttccttacatatctgaagttaaacaagacagaattggcattgtcggttttacacctgtccaaggcatcacgtttgaggacataaaattcaagaacaaatctcgggagaaacaaaggcagcaaaacttattagcaaggaaagacaaactgcaacaagaaaagagagggaaacgcaagaaaagctccaaagaggcggttgatgattctaacaaagcgtcgagaaagagaaagttaacggggaggcaaagacaaactatccaaacagctcaagatgaagaagaaatgaatttgagattatagcttactgaaaaaactgaagaaaggttcaattacagaagatgattttgctaaacttacaggagctcatgattttgtctgataaagaagcaagaaaacctttcaggcttgttggactagagcagtagagatgtgaaggttgacgactatttaatataatagagaattatactctctcatttgtcaaaatgttaaaaagcaaaatggcttcttcttttttaaaaaaaactgagatcatgtttgtcttttggttctattttatgaaattgattccaaacatattggtcagataattgtggagaatttagcaaaagaaagacattagaggaactcttactggtttgaaagatagatacattactgacccataatactggctttagattcactttgaaaattttgacttatcttacatactcttcattaaggagccacatatgctatctttcagaaagtcttggagtatttcctgatctcgtacatgatagattggatggagacaagatccctattcagagcagatccaccatctatcttcttgatgcagtctgtgagtcttgtgtaatagagcaatagttgtgtcaatgcagctctcaaaatatccataccacacaagaagttactgaaggaagttatgatgtctttgtccatcaactcaatcgctgtcttccatctgcttccaaagtccttcaccagtggctctacttcagcaattgtaatggacctctctggatttaagctcgaatcctcagctgccacatatcttacagtttagtggtttttcaacttaacactcgatgagtacgtgaagaaaagaaagaaacaagttgcttacaagctcgatttttcacgaatttgatcaaatcactgaaatgctccaccagcagttcttcctacgagttaacatcagatttaaggttaggctactacaaagacagttttatgttatacccatgaagcaaattacaaaggtaacctagtatttgccccttaccacaaataatgaagtgttactctttagcatttcctcaaaatgcatttgaattttcccaccttctggtccagcttcctaaaatacaggaagatgatcaaaacagattcttttggtaggtcagactcaattagttaagccttgagattcgtagaaagccatttcaaaccaagaaaacactggtccacatgggtgcacttaacatgagacggccaaggattcaactcaccttcagtacagcgattgtcatatcgtagttatttatgagaaacacaatttgctgctttggccttgggaacaactttgcaagcttgagaatcaacccatctacagccattcttaaccgctccagatttatatcaagctgcagcggttcatatatagtgtcaagcgatttgagtgatgagaacaggtaatacatatcactagagacagaagcaatcttataacgaacctgcccatctccatattcaacgtttaggtgaataaacgaagccgtgaattcagcataacgcctcatgacatagtgaggatgaacatcatcttcccataatgtcttaatgtttgcatctctcagactgctaaggtgtgagtcaaacaccatcttgaaacgaggccacaaagaaatattaacctgctcaatttccaaaataaaagattcattgagagaggactatgaaacctaaggaaatcaaaccatagccgcatctataagcttatatctaagatctatacaagaccttcaaagttataccaaaaagaaaacatttagcgaccaagtgaaaacagctgaagatgagcacaataataatgaactctttttattgcaccatacatatttaaatgttgatcaaacataataaaagagatagagaggtatgaaccttgtccagatatgagtccaggcatggaattctccggcgagacatgataagctgtaaaaaaggtgggaaagtattgcttaactattagtggacatataataccatcatgacccttgcaaaaggctggatcatgaaaataagtaatataagctacactagattatcatactgttgagaaaaaatatagactggttgtaatacgcctatgtggaccagttgaaggtatatctacatcgttagtttgcaagatattaagagaactctttccaatgccaagttgataaatatctaaccatacttcaatgcattctcacatatgtgggagactagaaaagttcaaaagggaagaagctaaataaattacctaattccaagatattcaccaaaacgcagataaactagtagttaggtcatcgttaatacctggtggtggtgtattatgcgaatcataagcatcaggccaatagcatcaaaacagtttgaaagaacgggattgaagtgctcatcgatgacagaaaatggacctgtatcatttaaattttagaatttatccaaaaaactgctacaattatcatatccattgtaaagtacaagaggttcagctttctatccggaagaagagaagataatttcttacacgctgctcaacaccatatcaaatttggtataccagtattacaggaaaaacagatgttcttctacacagctaacaaaatccacaaagtttggtacagcaaaaggaagggagacagattagaaattacccgcaaaaatttcatagaatatggactcttcaccaaagaaatcatcacaaaacatatacctgttaaaatgaaaacaaatgacgttaaccagggggttgagcgatgagcgacaataacacaaatataaaaggggaaaaatcaacagaactcagaagtagctgtatccataagtagcttgtgcaggctcctgaagagcacttcataaggatatttgagagagctggcttcggctatgtgcgggatcaaagcaggttgatcaatatcctacagcggtcatactgaaacttaagtcttttaacgaatattgttaaaccaaacaaactttggatttacttcttctatagcaaaaaaaaacaaattgataccacactaatccaaattgaaaatgagaaaaacaaatcgaaacttccatctatttgaggagcctttaaaattaaggatacatatcgtaaaaaccaaaactgaaatgaaccaaaatatttgattcctataatttataacctaagactaaaatatctgaaccaaaaccaaagtgggcactcctcaataaaacttatggtgtacaatacattaatataacttatactttatttgtaaagacgcagacctagtaccatcttttgtattaaagagtcagaagagcaactcattttatataacaaattcgccagagcatgtagaatggtcgaaaaaatcaatcaaaaaatgataactgctgaatgatgcatacctttataatttttatcctgtcacccaaagcaaaaacggcagagcggttctttagtggctccctagctcttgagaagaggccggtggttctggtctctaccccaattaagtcatatgctgtggctatatctaactgtagtttctcaagtgcttgaatataagcacgaaaatgtgcacttaacacctgaaacaagatcatacaatacataaggtgtaataacatttaaaagcctaagctagcaaacagcatttttatctaaccaactagctttgtccaattatagttagaaaacaagaatagaagaattacttgcatgtaacgtacaattggatgttgtatccactaccttgcatatgcggagaataaccttagtcaaatctatctgtgtattcttcctcattcaactaagactatataaaggagttgcagcatagtgtaagaaatcaaacaagataaagaatatcaccttgttcatggtatcaatgtatgcagcacgaacatccataaacacttcttttccatgttccttgaggaaggagataatatacctatcattaaattgtaattggtgaatgaagtatgtatccacataagtcttgtagaagcaatataatatcaagttggatatcagtaacatgtaaaataaaacaactccgtcaacatcacaaagggaaaatccaaaccaagataactaaccaaaacgtttgtaaggtgatgaccacatacacatgcagaaaaagttaacagaaacatacatgcaagacaggagacgttgtacaatttgtagtttcactacgtcaaaaccaattaaaggggcttggagagcataactcacttgtactttaataacacactctgttgaagaatctgaatgtttgttttgggtttcctcagggctataagcttctggacaataaaatcatacacctgcaaaacgaatttaaatctattgcatgagaacaaatttagaatgctccatcgacgtgcagtcgtgcatgccctttcagcattggacgagaacaaacacaaatgacttaatacagaactaaaagttgaatttatcgcagatggcaactttttcctggccataaattctttcagagggaaggaacaatgattcatctcattgaggtagaataagttgagttatatcaggaacttaacttttctgtagttttttatcaaacaattaacaactttaagaaatatgcatgtatcagtgtgttttgagagtcaataggtacagttatgtttggacctatcacactcccttcagcgaaatatataagtttttggtatcaagtaacagagaaagtagatcaataaccttggaaatagctttctgccgaagcttttcgagctcaggctctacatcttttaacgctttggaacttttaactgcctgatctgcttctacaaattttagcttcttactcagaatttcaagcgttttcatatactcttcattcacctgaataaggaaaataatacgactatcagattagcaataaaaataccctcagcaatccaacctaggcttaaatgcaccactatggttttacaaaaaaaacacgtactcaggggacataaagataggactaaatggtgtaagaaaacaaaatgaagaaaatttaataaattttagtattgcacataggggaagcatataccaagcttaaccagaaaatgttgtttttctatttttcctccatgtttcagattacaacatatgcaccaaatcagtaattcttatagcaccagaaacaaaaagaaaaattagacatgtatacaacatgacgagatcctacaaaattcctacaaatctccaaccctaccaaagctacataaaaagtgaatttgaaaaatacctctccgtcaacaattacatctatcatctttggtggcactataatgtcttcgacaaattttgctagctttgattcagccacctattcaaatagaagagttcatttggatgagtcacgagtgaaagcagcaagagataataccaatagtggtttctgattagctataccctgcggtttttcaatctcaaacccatgtccattgacttttcttgaagaatctttatgtctgaacttatagaaccaatctcttcctgaaagaaaagaagcaaagtgcacatttagattaccaggaaaaaatatatgtatttcaaagtaaaaaaattcctcccattaagcaaaagtcagaataaggagaaagaagcacatacatacacacaaattatataaatgtctaattttcaaatacctgaaatccactgagaagagtttccatttgtgacaggatgctgtcacagtcacgaatctgatcgtgaagtgagactaggttgtcactttcctttatgtaatcctgagtattcatggaatgtaaagcatttaagttagttacttacgatatcaaagaaattcccgaacttatagacggaagtacataaaaagtagaaaacaacaagtgccacaatgtagcacaggtagagaataacaacctcgattgaatccaattcaaccttgcgtagattgttttcaaccccttttgcatattctctaagtttgtcaccactagacagtatattggcaacaacctgacatttcacacaaacaagatagaaaggacatcatatccatggatctaacattctatgatcaatccatgtactccaaagtaactcaaatgagagtagaaacaatacttcgaaaaagaagaaccgaggtgctagctttataagtttgatctcagttaagtgaataacttacctcatcactttcacattcttcaagttcttgttgaagcccttccaatgaaatatcctcactgccaaacaaatcaaaggagagcattctaatcagaagaacaaagagaagcagaaacatatgttatagtcgaattaagatacaaaacatgagaacgttacctgcctgaatcttcttcaaaagccaagtctccaacaaatgctcctaaatcaaatccaagtttctcatgattactaaagtcccccatagtttggccctatgaatttcagatagaagagcaaagcgaattagacaagagatcataaaggatccatgattaaggctagaagatcacgaatgcaaaaaaaatgaagtaccaatgcgtcaatggaaatgtcggacatcttcctaatgagattaagagttgaaagatcttcaactagaaaacgaaatcagaatcctcgaaatcagtttgagtccgccattagagagtcttcttcttcttcttcttcttcttcttcttcttcttcttcttcttcagcttcacctttctcagattcgttcgtcttctctaatctgatttttaatttcccaatcaacaataaaggcccattgggccgttaaaagacttatatataaaacaaacgggttaaaatatgggtcgcccgataaaacccgttttgataaatcataaaacctcagaagtcggaagacctcaagtgatgctttttactcgagacagaagaagatgatgaagcaagcccgctctttgctctccaggttacttcagttcctctcaaaattcagattttagatttcattactcttaaaatggcttctctgggttggtttgtttttgttaaagcaggagcctttgtgaccaaagtaagtcacttttcgaagcttcgacgttgcgtggttttgcaagctggtcaaattcttcaacccctggacgtggattccctggtaaaggtaagaacttggtttgtttccgtttcgtcagtttaagtgtacttgccctaattttgtttgcttgatttgagaagatgccgcaaagcctagtggtcgattgttcgcaccttattctatcttcaaaggaaaagctgctctctctgttgaacctgttcttcccagtttcactgaaatcgatgtaagcccaaaatccatttctttttagttttgtgtgttctctttaaaggcttcttttagattctcattacttactgtgagtacaattgtttagtcgggaaatcttcggatagatcgtcgtggatccttaatgatgacttttatgcctgctattggtgagcgtaagtacgactgggaaaagaaacaggtattgatctttttcacactctctatcttcttcacttgtctcttctttctcctctgataaatttggtttgtttcctacattattgcagaaatttgctttgtcacctactgaagttggatccttaattagcatgggttccaaagacagctccgagtttttccatgacccttccatgaaatcaaggtttgtctttttttgcttcaatacattatatttttatcgcagcattttcatgttctgacatagacttgtctttgactcctcagtaatgctggtcaagtcaggaagtcactgtcagttaagccccacgcagatggtagcggctacttcatctcattgagtaaggcttctatcaaattaacatggataatcagtactgaaatacttagttatgggagctttctgtttagtaaatttagaagcttgcacttgtattagttttgtaatatggcgataacagttttcgcacagaatagctgtcttataacaataggaatgctgaattcttaatgctgtataaacacttaccttctgcggttttgttgcaggcgttaacaatagcatcctcaaaaccaatgactattttgtggttcctgtcacaaaagctgaatttgcagtgatgaagacagcttttagtgtaagataagatttttattctgcgttctctatattctgttactattatatcagttcgagaaccaaaaacattgactagaaaaaccaagggcattgcttctctgtcagttttagcacatgaatctggatcaagtatatattcttcaagggatattggtgattgttttttaaccagattttgtattttgtgcagtttgctcttccacacatcatgggttggaatcggttaactggtcacgttaatactgaagctctgccgtcgaggaatgtttctcatctaaagactgaaccacagttagagctggagtgggataaatgaaatgatgagagtagtaggaacggagtaaattgaaaatgcatgtgttcttttttctggcatttggtgcacacgaaactcggcatgctctgttttgaaactaatatgtcctctctaagacttctaaatcatgggtcttcttgttttcattagcacatatgttatttagtacaagcattttggtttcaacttgatactcgatactcatagatagataggttcaatcattataacatacaacttcaaagaaacacgaaaaccaaaatatactagtgaaggagtgtcatctgttggacattgacaggatatgcgtcggaaggtggaccatagaaagctcgtctagccagaatggagttagcagtctgagtaggatggaatgcatcccaaaagacatactgatttctgttgggacaaggagtctgcaacggcagacatgtaatttgtccttggttcctcccaatcccgcaacaagccctgtctactacgctaaatcctgtaccatataaaccatgtttgatcagagtagaaatcatagaagaaactcctttgacaaccatgttatccgagaataagtgtaccgtaagcagctgggttgtttaagatgtcaccaattgcgctataggtgttgccgtatacatagatggctccaggtgatcgctggttcagctgatcaacaagtgactttagcccttggttaaatgtgcctagaatctgattcacgctgtcaacacatctatcaggtggcgagatacctctggctcgttggtttggtatgcagcctagtggtgctactccaggtataaatatttttcttagacctaggctgtaaagagtctacacatagattcaaaagattatcagaagattgattaataaaataataccatatgaagatttgatgtaaaacattaccagaagctggcgagcgtattgactgagaagtagattggcaaagtcaggtggtctgaatcttatgctggaatcgtagagattaggcataaggtagttgttgatatagtcattgcttccaaaaacgagaaccacaagcgaccttgctaagtaatccgtaaagttttggggactcatcatcgttcgcagttggcttagtgtcgtctctagattcaccatttgctggttcaggctgaatcttccaccctgcacaccacattatcattcctctatccatttaacactaacatatctttgaacaaaaacatacatagttgtagcctgatacatcgaggatgccagcagctgcagacgcgtagttaactccttggaggattctattgcctgatgtggttggatccgcgaagggagggggtgatggaatttctaacaaccgagctgttttttacagaagaaattgtgttttttagtaagataagagaatactaagacaaactgatgaatcttgacgaaatgaacttcgttcaagtgtctgaaattttacctagcagatcaatgaaagtcaggccgttgctaaatctgccagtaggctggtagttcatgtcgatgccataagggaggaaattggctcgagctacagtttgtagaaagttgttgttaccagcatcgaccaatgagtctccaagtacaaacatagcaggaactctagcttgtccagtgaccaactcaggctgctgtaatataacagaaaccgtcaaggcaagtatcaacacatatcctccaatatggactttcatcttctttctgtttgtgttcattttacttaacttgtgaatatggaaagattgttatataaaaggctctaagcaaaacatgctgcatgtgacacaaaggagttatcttccggaatttctgattcactttgtaactgcttactctctcacgtttcgactgcttgcatgtaagcgagtcaaaaagcttgcatcatgcttgaaatttccataataagagactaaaactgcatacgcaaggagacatgaccatgacgaaattttttctaaacctcttcagataaagatcaaaagaaataaatgagcacaggattatctgagactaacggatagagttgccacgagcggatcataatgaatttcttaaggctgacaggttttggaaatagatttttaagaagatgagcaataagcataaacaactaacatctatactacttttcatatacatttaatgaatcattgtcaactacaatttgatatttgttccttcttgagcttctagttaaaacatgcacacgccactagattatacaaatttggcactttttatcaatcacctctcggtgttggttttctgagctgcttgttttcctgagttgctggtgtagactcttcattaacaaacggtaaaacaatgacaggagctgctggtaccatctcccaacgttcccgtaagaaagcattaaatttcttgaccatttctttccggaactcgagctcccgagtaaattgatcgtagagaacaaaagccagaacatacttgaaagggacaatgactagaaccgttgcaatagatagcatagccagtgctacttcagtagttatctgagaaaagtttcaaatcgcgtcaccaggtaagagaaggaatgcaataaaaagctctgaaacctgatccagtgattagaacatacctgaggatgaccagataatacaattgtccgtagttttagaagcactacattcaccttttggagatagctctccagattttgcatggcgtctttgacagcaattattttttgaatagtatttgaagatggctgatctcgaatgctaattattccaaacaatcttcctagacggccttgtcgtctgagtcccttcaacgtaagcatcccagttgccaaaaatatcaaagacacgggaagaacgtactgcaaaaggttcctgaggcgcagaaaagtatcctcagtggtatcagatcattactaagtctaacttgaagcaatgataataatatctaacttgaagcagcaatgataatatgatttctctgcatgcgattacaagtcttaaacctaagaatcattaatgtgcacgagatatcacatttatcacatgtctaagtgtcaaccaacctgaaaattatcgttgatgcaaatgctagaaaagagaccgtcatgtaaggctcctcccagcacctgagtttctcaaactctgtggcagttatactcagtggtagaatgagttcctgggattaaaaaataagagtagcaggacaacattgagtcactacggtctctacttatttaattttatgtaatagtttgcaaggtaatgaaaaatactacaaataccgagtccattgacacaagagatgaaagttgtctaaacatgacgaattaggaaaccgtccaaaacaatgtttgtagcaaaactatcaatggagaaaaagtgttaccttaaagaggtcaatgttactaggtatccctttgatagttgcagcatcaatagtggcttgagttttttcgaccaccttgtatttttgtctacatgtttctgttgccctctctacaagtgtaagatcagcaaccgcaaggtgtttgctcagaactaagccttgtcttagagaagagtttttccagaagttcatggatgcagttgaaccccaggaaggagatctcatccaccttttcaagtaaacacttccatctagatcagacacgttatcaaaagtttcataggactctctggaagccctggcaatatcacctcgtttgtctgaaactttggtcaatagtggtccaccccaaaaatttacggctaaagtttgacacacgatgtcaccataggctacttgttgaagaaaagagaactgaactagtttgataggatcatcaggcaaattccgcatatattgaagagcttgaagtcttgcaatacagttagatgcacttgcaattgctttttccttacccttctttgcaccaaacacttgatacagcgacttatcaccctctcctggcccaaattctcgtagaaatgtgtgcaatgctataacttcactaataattgcatgccaaacatctcgtctaagttctcctccaaggtcaacgaactccagaacccaagtggccaacctaaatgaatatttacaggttagcatataggtaaacgaccacccagacaaatggcaccgtcagagacatatcagaacgacatcagtgatcagctacatgaacatatgaactcacccggggccggatgaaacagaaactgcagaatcaaagagagaaaagcccagaggccccactttcgctttctccactgttgacttgtctccagcgagatcaagtctcaagacccctttacttccttttatgtcaactggctgaaaccaaaagagcatttccatgagaagggtttagggttctcatttctacaccaaaagaacattctaataagacatgggttcgcaaagtttaaaattaaacaacttagaattccagctaacgttgcatatcaatgcagtaaatatgtaaaactgaagtgttcttcatctataaaagcaaacagaaaagagtgttcactcgctcgctccttcccaagggacttagaaaaaaaagaactaattacctcgaaatagagggctttatcagttaaagtaagttttccaggccatgcaacgttattctcccactttaaaacaggtcctttcctgttggcggccatgcataaaagtctctccgatgacaactgcggaaagtctgtagtctggtgtgacttccgtccctcgtgtattctgttctgacaatggaaagatactcagctaggtaaacaacgttgggtcatatttacttatgcaaaatctacgttaatgcggttcacatacatttcaactctactagtacgaaaagacaatattcagcttgaaaagctatattgagtccatattaaacagaaagcaaagtttatagggacatcatacacttaaactcccaagtgtttacaaactaaagatatcattgaatgcacaaagattttagatgcatgctatccaaaaagtttactacagttcacactatctgaaaatgaaacaagtaatggaaagcaacccaaatgtcatactcacttgacaagttcctggatgtaagcaagccaaatctccaaagaaatgcctttttgatcagtggcagtagctagagccttgaaaaggttatgtacagtagccctatcagccaagcctgaaatagctggagcaatacgaataaatgcctcttccccaataaatcgtcccttcaacatcaataaccttcatcagtattgatctgctacccaaagagcagaatacaatctgatatcacaaactttgtttgtttatactattaccactatcaaccttcagagcaacaataagattcaattcgagaataaagaacttttgtcttcatataagctagacagacgaaatgaacggtctaagaaatacctgaaaagaaggttttcctgaggcatcattgcgtgcatttctttctttacaatatggattcgcccacgcgagcattgtgatgaatataagcctctggaatgcaggttcctatgaagagataattttcaatgcttcagaaaccaataaacaatactctccatttctgaaacaataagtgtaaagcatcccagtttccagataccttgagacacggatgaaactccgagctatccctcgataaaaacctgaaacagcaatactccaccaagtaccgggcatcagtagataaagctggagaaacaattgtttcaaatatatcctgcattttcttcccagtgattccattcatcctgcttataaagggtcaaagaaaaatgaatactttaacaacaaccacaaagtgaagatgattcaatgatcctgtggtttagattagctcacctactaaactgttcaatggagataatagcatcaaaagaaagaaacccttttggtgtatcacttcgaacagtttgttcaactgtaagaagttcctccaagtcttcaaaatcttgttgatcctcaagatcaatctttttgagactctgactctttttcttcaatggagatgttacatcactcagaattttctgtgatttcgacacccactgactaaatcgttcttgtacaacatctgtcatataagaacaccaacataactcagcagctgttacagagaacttcaagaaccagaattcgaagaggaagaagggtcttacttgtgtcgatatcgttcaatttccatttcttctgagcaacaattcggagtcttggctttcgattagaagcacaatttctggagaaagagcagcgtcgatgaacacgaactccatcacaacggaaaccaataggaaaatctggagttgcagaagaaagtttcaatcttttcaatgctccgactctctgcgccatttctgtagctgaaaaaaaaaaagctttggagagaaagaggcgtacaatagcaaaacaccaccctttttttttgttggtcttactaaattattgctttctagtttcatcttttgtgtctttattctcaaataaatatcaaaccatgtcgacgattccttaacacaattttttctgtattattccaatttaattcattcccatttgcctacaaatttgtgtcacacaacagaaaataaaaggtaaacatcaaattaaggtccataatcttatttagaggaatactcggaaacatgtccatatgaagatcttttgtcagttctcttgctctcagaacaaggtggagttttcctcttattcgaatgcgaatcatcatcaacatcatcatcaaaaaggctgagatcctccaccccaagaagcaagggtttgcgatattccatagtgaaaaaggctacagagtcacttttcactgtaaacctatatagctcccatgttgaaccattgttcatagcaaaacgtggtataaatttatcacgtacatagttccttcgatgccgttctttaaccagtttccaaaccccttggtcgggcacgaacagcgcgagaaacagccatatgctatgtttctcgctacatgtcaaatttgtaggaaacatatccgtgcggagctatagacaataactgactgttttcttgaaggtttggtatccccggacttccacgaagctccggataactaaggctttctaagattctccgcaatactacgtcttcaagtgtataagtttgccatgttgtgtgaagtgcgttcttgataagcttgttgaagatggtcaggttggcagtacatagctccttgtgggcgtcgtcgtcgacagtcccataaggaacacttttcatcaacaaacaaagacagagaaagatgattgccattgttagccatgttttagtaccacctattcacggacaacgtgagtgcagagaaggaaagagagaggggatagagttggaaaagatcactaggtttctgatttccataaatacaatttttgtttaagggcttaagattattcctttaaccccgacgaatcgaatgggcttaaaaacatttctttaaccaaaatcttcttctgtattattctcattagcattataattctttacacaacagaaaataaatgaaaggacaacaaatgatgggtcaatccaaaactagaaaccaaaagaagagcaacttcaatatgtaatcatagggtctggatccgacgagtcagtgggagatttgttgttggactgacgcattgagttgaataattcatcttttatgacctacaagtacaacaatgatggattttgagtctgtgaaatacacgaaccttaagggagatatgtcaccatttcgtttcaatattattactcacctgcgacattagtccatggacctgttccacagttatctttgcgctatcccgagttatcttagttagttgagactcatcctgaaagtgatttagaacacacgtcaaatgagatctttaacaagcaacacccattaacattctcgaaagttatatatctgtacaaccttcaacaacactttcatttcaactaaacagaacacctccaggtcccaataaccaaaacatttgaagatatatcctcttagtagctagatgtttacagaggcacttaactagccaccgtaatcgcaattaaaatttgatgaaccactaggacatacctcttttttcttatgaagggatgatggcacaactcctccaaagcgagactgaaccagatgactctcggcttgctcaagcttctcagcttcattggtaaaattacgaaaacgattatataacacattacttgactgtgacttgagaaaaaaaagtaagagtgaatgatttaggccatatccaagagtttacctaagtctgatatttgtccagcaacatagtctccattacccagcagtggagaagaagaaagagtgttcacccagtacttgttccatagtagatccagaaggtgagaatcaagagatgacttgaaataagtgacatctaatgaatagtactgccaaaaccaaaagccaaacataagaatcatgttgggaccttgcaccgagaaaaatcaagaaaatgtacctgtttgcagtgaacaccaaagtcctcaatcttatttaaaggaatagtttgatactcagaaacaggttcatctggaggcttatatcctttagagtatgttctgaaagcaccaatctcaaccttaccagctgaaacagtccttgtgggatcaataacaacagctaaaaatggctcctgatgctgttggttaagcctctgcgtagaaacatcaataccggagagccagcatccatatccagggtgagagtgataccatccaacaacattctccagccgccccgccttataaaggtcaagttattataaccataatcaatcaaactgttctgacttatatacaaactttctaaagaaaaaaatcaaaactttgaagtttcttgaatctcacttacgagcttgttggtctgtgaatactcaaccatgtactcataagcatcatcctgagcattaacccttgtctcagtaccttccactggtaaagcaaaagcatccataacaatgatagtatcaccatcggtcttaccttgcataagacccattatttcaattgtaccaccagagcgagcgtgaaccaccatcttaagaagagcgagcgctgagatcttgactcgtttaaagtagtgaggatcattctcccacggtttctcttgctggaacctagtctgtgaagtatcgtcgtagtagaagatgttgtcggaggttgaatcaggtgagtctactgttagaatgctgttctctagttcccatgtcttccttgctatcgtcgacgacgaaccctccattctttttcgaattaggaattcagttgcagaaatctagggtttcatacggaatcgatggagtgtgatcgatctgtctgctgaagaattgaaaactgtgtcaaaaatgttacttcggggattgacttatatataagaagagaaaagtggtgaaaattaattcctctggattcttctctaatttagaaataaaatttaaaatccttttagtttgtttttttttttttttttttgacggtattaaaatcttttaattgaataacacaaaattttaaaatctattaaacatgatttacaaagatataaactccaataacactaaattttaaaattgaatttaaaatcattaattaaataacagtgtattagtgttggatttctttctattaaaatccattaataaataacgtccccttgtaaaaccgtagatttcttccctcttctaaaataatttattgaattacttcagcttttctatcagagtgtcagaccctttgctaaaagaacacgtattgctttttatacagacactgacacgtcagttttccggttcggtttttttactggtttgtcggtttggtttgatttgagattttggacggacgagtttacaaatacgttatgagtgactatgtttgtaattgattcaaaatcatattatactgatattcttattctcctgcaatctgttgactttatcttctgtctaatttatgtgagagatgtctaagaaactgtagctacaaaactagaaaccttatctagcaaatgcaaaatagccatgattgtctaatttatcttctcctcttttgaaacttcaggagcattgaatttacagttctgctttagattccaagtcttgttctgtatcttcagagatgtcatttgatggaagaggattaggcttgtctgtagcaggagcagctactggctcgttgagttccacatcttcacccaagatttttgctgtgaattttcgtgcttcgagatcaagatcgggccattcggttacgattcttcgggcaccctgcagaagaacaccgcattataacaaacaacgctttgtgagtgttgtagatatgaggaaagccatcattttacctgaagctttggttcctttgtcatgggattattgcaaagatcgattgttctggccttggcttttgtggcgtttccacaccaggattcacaccacaaccactcttggggaagtgaaaatataggaacagtatgctgagcataattaggaagatcctgaaacaaaataatgacatgccatcaatatgtttgaacctggaactctaaagattcagagcatggtgtatggtaagagtcaaatgcaaaagcctttcaaataaagtaaaacgatagtgtgaccaccaaagaaaggttacagccctaagtatagagaaccatattatacaacttgcctgatctaggttggacaaactgtttggatccttgctaagcgtctcatagaatactcttagattatctcctgccgctgtctctcggaacttaaccaagtcaacaacgtatagagcactacagatagaacaaggcacattaagaatgggaaaagcaacaacttactgaggttcaagtaggtttttttacctgatatggtatggcctaccacgtaaatgttctttccagaaaccctgttcaaagcaattgagaatgtaagagtatggaaaccaaaactacctctacaagcaaaacaaaaagattaatgtttacctgtttccaaaatttatagccatccatttccctgttgttgtcacaaaaaggagtatacgcgagaggtcttcctttaatatccatatcatacagttctcccatgtctgtccttataatttgatctgcgtcgacaaatataacctacagaacacatgtcgaataccttatagtgacatcttccaagcatcaaaatcgcaagaaagaaatgaaaatatgatcatctgtaccttttccaatgagagaggaaatatgacatcaaggaaaagaattttgtaggcccaaataattcgttgcttttctttctgtttatgcaaccaggacggccatttgtatgtaatcagctcatactcaaagttgtattcttgtgccatatgtggaatcacatcctgcaagattagaatgcgatacacattaagttaatgtggctacaagataagttcacatctagagataagaagacatatatagatacaaacacaaaaggcatatgtggaagcaaagaaacaaggagccaaccttaaattgaggagagagataattcttaataaaccagaattttacaggacgattggtgttcttcaggacactgagaatcataatcttaaggaaacgctcgtatctgtcataagcagtgcctcagcgtcagaaatgaattgataccagcaaatcatatattaaactttttttgttcacataatacacttaaaactcttatgcacacgaatatccaatctacatatagacgtagaaataccaaatatgattttcttttcatatgattgatgcacttaaagtaattcagattttctaaaatggttcaacgcacgtaattatattaagtcaatgtgtgcggtcaagcaggttagaaaaatgatagcgcttacaaatgccctgaagcaatggagaatatatttatcgttttcccttgtcgcccacccttctcatgctcctgaaaagatgataaatagaaataacttgattaaaattgttgcaaaggtagcccacatgttagaatcatgcagaattgagatgcaacaggtttacaacaatcataaaagttagtccatattacaaaagctactcactttgtcaggacctcccttcattgattgttgacgaccaccaacaaaaccagacgcccatttcaagaaatttgagttccagcttccctgctaaaacaaaagagcgtcattagagaatatataaccaacacttttaaggaccaatagttttattgtaaatcttctattcgagtaaagtagcactcacttccttgttttgttgcacagcatcatcaccgtctgaaggaactagcaacttttcatgctccttaccctttctcttaactacttctagatgaacaactttaccacgcagatcatcgatagttatacgtttcagcgaggattgatcttgactcccatcatttcctcctttcaaagcgtatagctccgaacttctacccggagcaagttgcaaataccaaacccctggggatactttcatctgccaataacccaaattggccattacaagggtatcaaccaaatgcggtctatttttggttcccagaatcagctgaaggccacgaggagcctcatgatctttttccgcgcaatgacctgtgcaagggttatgttaataataacatgaacaaatccatccacccttgaagaataagtttagaaaagctaacctgtaagaacaagagattcaacctcaaaaactgcctgcagtgtagtggtatctcctagattctcaagcaatatattatcaagatcatgactggacaaagacatccagcagagaggaaacaaaaaagcagaaggtcaggcataagcaaaaataagtgaactaaacaagcaaatgccatgacaaatttgagccaaaaagaacagcataatcccattttctttttcaggggaaaatacatacatggcaattactggttcaaccagccatggctctggaacgtcaagattcatggtaagtgtcttagacaatggcatatttgcgaaaaatgccttaggcccatctacgtcaaagcctgtactgctgtaatcgtcctaaaaaaagatacatggcagaatcaatatttgatcagaggatatggacaataccagaccgtcatatattttattaagatcttttaaaataacataccgtattaggtaagacatatctgtagtaatttttcagaggaatgtccacaagggaactctgccaataagaagaataaagaactctaggtcagacgcatgaacaatatgtattttccttttctccaataagaaacaattaccctttttttttgtctaaaataagaaacaattacccttgaaacagaatacacatgaaaaaatacccataattaaacacatcagtaaggcagctgtaacatcataaaaatatcgatctcagcaagagtaccagtaaccacaataaaggccagaagaataagtcctttgaacatctaggtggctcagaacattaagtttgacattctagtgatttccaaataataaggttagctgtatatattttactcaccatgggattcagaacaatcctcatgctcgtctgaacatgtttctgtagaacttgaagaagtgatgctagtttttgaccagtagggcttaaaggatcgataacagcatcaatgtgtatcgttgcattttcatttcccagcaaaaccgcactacacaacgtatggacatcttagttgcatagcattaaattcccaagaaattgaaaagaaaagcaaccaccagtatacatacctgtattctgaattcaacacctcaaaccgcgcactttcagaactacgatcccgtgttgccattgcagatgacacaaacatgaagacatcgctaaaatatttactgcaagtgtgacaaaaaataacaatattctatcagctatttttcaaaccatgcaagtaagggattattcctagaagaagtgaagaaccatatcctatcagctattttcagaacatacatgggatcatccctcatagaagaagaaaatataaggagaaccatcagtctagagagtgaataaagcctataaacaattagcagcaagagccaaatctagaagaaaaaaaataatgcagctaaagaagctttgctcgccaagaactaggaggaaaaatgttgacaagaaaaagcataagaccaaaaaaattctgtttgaagttttggtttggcaaacaagaagaaacagttaaagcatgaatcaagagaccttgtcagcagatcgggatccacatcttgccattcaatgccttcaataatttcttgaacaggctttactctttgattgaactccattgactcaagaagatgtaaatcttggcccaaaaatgtcctctcatccacaggaaatatcacctagtcaaatatatactttaatgtgatgaaggttcataaatatacaattgaaactaacactaaggatatgtaaatagtattaaacgatctatataattacagaaaaggataaaagatggtttacacacccttccatttgaaattattgcatttgcatcagattcaagtccaagttcccaagacaagaattgggcgacctgcatgacaattataaacaaaaccattgttaatactattgcttttgcagaggaaaactgaagattcttgtatcgatgttctttcaggtatgatagaaatttatttaaagcagtatacctttgtcaaacgcttaagtaattcttcatccactgattcaacgagacaagatcggtatgccttagaagatagcccatactcatcagcaagctcaaggactttatcaataaacatttgagagctagctgattccactgatgtttttaacagatattcacgctcgtaaaacaagcatagtttatccaagaagtatagcaccttttccttatgactgcaaacaattagataacaaacataacacgcagagatgaatgtaaggaaatgacacaaataaaggtatcttcaaaaacactttacctatcacaagtaaaacaaaaactcacgtacctaaacgatgaagcagttttttcgaaaaactttataaatagaaggctatgtgggtcagcattctggctgctactaaataagactccaagacgagcacttttggaacctccaatctaaatgaatatacaagagcatcaataacatgtgtggatccaactgagggtcgaggaaaagggtgtgtaaagaacgagatagaaagctattaattcatcaactaaccaggtaacggactccttcatgtaacaatttcattcctttcttcgttgcaacatcagcagcaaggagatgagtcacatacttcacatcctctgaagctggaattgtcataagagaagatatatatcaagtgattttgcataagaagataacacatttgggatgtgggaaagacgctgttgactatataaatgcatggttacttactttcaggagaatgcaagtagttaacatcattcaacatagattcccctttcctggtagatgaagctagcgacacaaaccttggtttgttctttcctccactaataatctacaaacaatgcaattacgagaggcagacacttcttggaattagtaataaacaaacacataagcaaattacaaaatatgctgccagtaaaactccctacctgtggattataacggctaagaccactttccgaaagcaacttgtccaaaaccttagtatgggattctatctggccgtaataaacttgttcttgtatcttgggaagctcttcattcatggcatttaaaagagtttcttcctggagagacaagggctagcttcatgaaccaatttataatagacttaagaaaatcaaatctgtagaatattaaaagctctactatgcgaacgtgaacgtcgatgcagatcaaagtaataaaatggtttgcatgtacataatattgaattagacgcatgcctgcagtaagctaccaacatctgagaacgtcagcatatttaaaagatgcacaaaagtacctcaacagaatcaaagacaaggccattcatcaaaaaggaacacttcaatttcgccagacccaacttaaatacaaacatggagcttgcttcagatgcttccttcaaagtgtgctcttgtcgcagtttcagcaatatatcctgagggagtgttttaacctttggtctggaacagaaaagacccaacttaaggagggctaaggaatacaatccatatcttctatgtagatagaaaataatagagatctactattgtaaataataatgattctaaatatccatgttacttacaaaattgtctcaacaaatgcaccatcaacgtgctcctgttcaatgtctgcttcggaagaatcagcagattcagtccttagtgtgtttaactgttaaccaacctgaagatcttagcaactaatgttttggatacttgaaattacagcagaaaatgacatataatcaagccacttctaattacgagttaagtgttaatgtctattacattgcccaagaactgaaaagctgtttgaatcccatggtgctccttgatgtacagaaaaagacgtatgacctgcaaggagagtttttcatcaaaaaatagatccatacttagtttaatccctcagcaaataataaaaatgaacataataagaaagagcttcttattgcaggcaaaaaagttcaaaactgggaaaatgataacagtaaatatagagtctaaaacggtcaataccatagtcgataagtcctctttaacttgggcattagtcactgcatcagaagatgggatttgaccaccattattctcgattgtcttgattagttgagttgaatataatatcaccccaaatctcacagggagttgattttcatataaagatctgagagtttcaatagactgtaaagatccaacaatagtcagctcaaaagatctgtactaatgaataagggacgaagagtcagcaatgccaggaaagtgcaggtataagacttacctcaagaccacaggcagtcgctggatcaatgacgtaaactgcatggaataggttctttcggatgtaacgtagttgtccagggaaggcaggcatcaaaatcttattacaaggtgagaggaacacaggccattagatattttattttccagatggcaccttgcctacaaataaatcatatgtatcctcacaaataaatcatatgtatcctgcactagttacctcgttaatattactccgccaacgcttgtacatatcatcctcttccagattgttgagataggtaacatgcacggatcggaaatcaacccgatatgaatccggttcagggagaggggtagttagtagaagtttccttatggctccatcaggtatctgatagttgcataaacatgttagcacatccatatggtcaagactaatcacagttagtttcctgaatagacaggaaaaaaaaatcatcaatttgtatagttccagtttttcctccatgttatataaactacaactttactttttatttcacaagaaataggatgtatgtccaagatctccagcaaaacagaaaaaaaaagaaacactaaattataaaatttaggaccattattataagtgtaccttaagcttcgaaaaatggttggccagggacaattcctgatgagccaaatccatcaacctgcaaacagaaggatcagatgatcatgcaaacggactgtaaccaacaatttaggcatgttagctttggaaaggagtaaaataatataaataaaaagcaataccacgcaaactgatatcaaatgtaagtgaatagaaagatgggaaactaggtctggccatgctcaaactaaaatgggcttggggaaaagtaccaaacgaagaaaaaaatatcaaaatttcaccctggattgcagtaagatatgtctagaccaaggtaaagtaacacaatgtgcaaaaaggtattacatgtatagatcaatatcttcgatgttcaacagggcaccattcagagccaacaaagccttgccagggggaaccattctctggtttgaaagtatctcgtctttgattgattcattgagctgcacgataaaccagacacatctaaaaccacaaggaaacaattcaaccagcatgtaaacacaacatcaaaaaaacaatgacataccttcatgcgagataatgaagaaactacactaggaaagttttgattaatttcttgcatagactgcagaggatcagaggcatggactattctctgcgctgtttggtgtcctaaatctgttggaacaaaggtaaattaggaaacactataccaatttctattaaaccacgcgaaacatgcagtagtacctttcagctcccaaacatcaagcgtgtctgatactgttgatgataggagataatccctaaaagccatgacttctgatcttagctcgggtttcctgtcctgcaaaagaggagcattgaccttaacgatcactctaaagaaaatgaaaaagctgctacaaaaaaattctctgtcattcctctcttatcttcgtccatctcacatccactaacaaacacattttcattttgcgagcattcatgcattcttgcagatcaaatgaagtgattttttttttgaaagaaatggttctatatatatttatatattatatactggttatgtttcgagttaaacataccaagatttttgagaatataaagcccctaacatcttgactaagatcttcagtcctaggatcttcaagagtgatacctgaaactcatagcagaaacaattaaagagtagcaaattcatagctaacagaatgaagataaggaataaaaaccaataaaaaaatattcaactttcaatatttgggtggcaaaatgaataaatgaatgcttaactctaacctttctttatagcactatcatccatagccttgtactccatgttcttcaaagcaagctccacaccataaccagctaagctaacattatcccttgctccaatggcaccgcagggtctagttttcccttcacaacccaaaggtaatactggtctaacaacatatgtaacttttccctggaggaaaccaaggcttcattagaatgcacacaacaaaagcagaaagacactaagaaatggaaatcctggacaatagaacatgcacttgctttatcaagacagtgaaagaaaaacaattgagccccatacaagaggatttctcaaactcatgcttcgtgctcgaggtaaagccttccatttctaccctaatagcaaaatacgttttttcaacaatgaaggacaaatttctcaggtaaaaagagatacctccttggctgctttagcaagcgacaggtgaaacttcctaaagcaatcagtcccaacagccccatagagaacagcaactgggcttccagctcttgaatcaaaatgaacatgatcgaagtcgaatagctcaggcccctgaacagcatctccaacactgacatccaacgaaatgcatcttagaaataaaaacaaattgtgatcttaaccaaaacaaaacaaaaagaagagacagtgtcagtgcatacgcaggagcagaggcaagccaggattgaagatctgcaacatcgtaaaacagagaggagccagtatcaacccaacagcagccagtcgcagagggatcatcaccatgagggaaagaagatagagactcatcagccaattgacggtaaagcacaagcctaggcgaagcagatctcagagtaagtgagaaatggaagagagaagccactggttgagctaacagagtcgaagcctgtttagatatcttaagaagacaatctctagctgatttacaatcggaatcatctccatcggaaccaagccaagcatcagtaaactcccagaacaactgcttcgattctttggaaatcaactcactatcacaacaacaaaaatcactcagattcagcttaagatcagtaacaatggtgctcgacaaaaaagtaagaagaagcattacccagcctcaaggagaagaggagtaccctgccacttagccttaacagccacctgaacattcttaggtctccgattctgagcgttgacgccgacgacgacgatgaagagaagaatgagatacagccaagatctcagattggtggtggtccccatcttttccgcgacggagaagaagaaaaaaaccagtaacgaacgagccgggaatcgaaatatccttactaacactaaaaggacattttcgtaaataacgtacaaaagccacgacatcgagtatgacgtgggcgccactgattggttgaaaaatgctagggtttttcgagtttttggatgcttcggtgttggtcagtcaccgtcgagagatcatgcgaaggaatgctcctcaggcggaggatactatcgctctctgcgtcgtcgttcagaaactttacttccggtaacaacggcgacgctattccgttctctaccttcacgaaaccttcttcttcaatcgctcccggagatttcctcgtccgtgaatggaaagactggtttaagcatcgagatgtgaaacagagccaccaattaatcgatcgaatctttgacatccttcgagctccttctaacgatggagacgatagagctttttatctccacctctccaatctccgacttcgtctcactgagaaattcgtcctcgacgtgctttcacacactcgttacgatatcctctgttgtctcaaattcttcgattgggctgctcgtcagcctgggtttcatcacacgcgtgctacttttcatgctatcttcaagatccttcgtggtgcgaagcttgtgactcttatgattgactttttggatcgaagtgttggttttgaaagttgccgtcattctcttcgtctctgtgatgctcttgttgttggttatgctgtagctggtcgtactgatatagctcttcagcattttggtaatatgagatttcgaggtttggatttggattcttttgggtatcatgtgcttttgaatgcacttgttgaggagaagtgttttgatagttttgatgtcatcttcgaccagatctccgtgcgtggcttcgtatgtgctgttacgcattcgattttggtgaagaagttttgcaagcaagggaagcttgatgaggctgaagattatcttcgagccttgctgcctaatgatcctgctggatgtggttctggcttaggtatattggttgatgctctatgttccaaacgaaagtttcaggaagctactaagttgttagacgagatcaaactggtgggaacagtgaatatggaccgtgcttataacatttggattagggcgcttattaaagctggattcttgaataaccctgcggatttcttgcagaagattagtcctttggaaggttgtgaactcgaagttttcaggtataactctatggtctttcaacttttgaaggagaacaatcttgatggtgtgtatgatattcttacggagatgatggtacgtggagtttcgccgaataagaaaacgatgaatgctgctttatgcttcttttgcaaagctggatttgtagatgaagccctcgagttataccggtcgaggtcagaaattgggtttgctcctaccgccatgtcttacaactatctgattcataccctttgtgccaatgaaagtgttgaacaagcttatgatgtcttgaaaggggcaattgaccgagggcattttcttggtggaaagacatttagtacactaaccaatgccttgtgctggaaggggaagcctgacatggcaagggagctggttattgctgccgctgaacgggacttattgcctaaacgtatagctggttgcaagattatatcagctctttgcgatgttgggaaagtggaggacgctcttatgattaatgagctattcaataaaagtggtgtagacacctcctttaaaatgttcaccagtttgatatatggctcaatcacactaatgaggggagacatagctgctaaacttatcatcaggatgcaggaaaagggctacaccccgacccgtagtctctatcgaaatgttattcaatgtgtttgtgagatggaaagtggtgaaaaaaacttctttactactttgctaaagtttcagttgtctctttgggaacacaaggttcaggcctacaacttattcattgaaggagctgggtttgcaggaaaaccaaaacttgcaagactagtgtatgatatgatggatagagatggtatcacgcccacagtagcttcaaacattctcatgcttcagagttatctaaaaaatgagaaaatcgccgatgctcttcactttttccatgacctgcgtgaacaaggtaagaccaaaaaaagactgtaccaagttatgattgttggtctctgtaaagcaaataaattggatgatgctatgcatttcttggaagaaatgaagggagaaggactacagcctagtatcgaatgttacgaagtaaacatacaaaaattgtgcaacgaagaaaagtatgatgaggcagttggattagtcaatgaatttaggaaaagtgggcgtcgtattacagctttcataggtaatgtccttttgcataacgcaatgaagagcaaaggggtgtatgaagcatggacacggatgagaaatatagaagataagatccctgagatgaagtcacttggtgagttgataggattattctcaggacgaatagatatggaagtagaactgaagcggttagatgaagttatagagaaatgctatcctcttgatatgtacacgtacaatatgctgttgagaatgattgtaatgaaccaggcggaagatgcatatgagatggttgaaagaatagctcggagaggatatgtgcctaatgaacggactgacatgatccttgaacgggctaaccgcatactagaggaacggaattcaaggtcaaacttagggaggaatggttggaatagtagacagaggcaacttgaatgatgaaaagtatgtcacagagaggtcagaattgttgaatagagagaacaagggagttgatttggattcagtatctgttttgggatttggatcatggacaacagatgaatgagaaaagccagattcttcttcttgaggctttatatgtcctggacgttgtaacttgcaggagcttttttatctctggattgcaaaagatcgatggtattttcccagaagctttttgtttttttttaagtaaagatcgatgtgtcactaaagacacttacagaattgggtagtatccattatgtacacaattgtttgtagtctttcctagaaacacacaagaattgggtagtatccattatgtacacaattgtttgtagtctttcctagaaacacacaagttttgttgtgcgacacaactactcagagagagatttcaacaattttttgtcatattctttatgtgttgcctgttggtaaggaaaatcaatggtggtcgcccaccttgtttcgaaaattggtgtttgtaattacatttgtttactagttctagtaatgatgaatcttcttattttgttaataattagaaacattaagtacttttagtatttcatctaattcgtcttcataatcatattatttcatataaaattcgataacatgactcgttttgactaatagttacaaagaagaagaacttgtgagagaggatttacagaggcttcttacctgattcatctcctcatgacacacacaaaaagaaattagtagcaaaaacacaaaagtaattgaaaaatgaaccaataagtaggagattaaaaacagcaagtgttacgaggatacaataatctgttgataaaatattttaaaggacttaaagaagagagagaggagagattacgggttacatataatcagttaatcacaaatattaaagaaatgtgtgtactgtgtactacagtttagcgccatttgtactgcataaagaccccccacgtacatacatacaccaaaccagagagacttacattagaagaaaaaactatggcaacctctgcattcttacaaagaagtagaacatcggaggagatgaatcaggtaagaaagcctctgtaaatcctgtctcacaagttttcctcttctctaaaacaaataaaactgtttttgctcttctctggctcgctcgctctaggtcttatcatttacaaattcttatgtactgcagatatacgaccatttctcttctaataacttgctgtgacctgtgattccctgaacctctttattttttaatcttcaagcattttaatattcaatattaatgtttaattctgcagcttcattgcattgtgccattcttaatttgttatatattactgcgtcaggggttgactttaggctaaggctaccttttcctatatatatcattgtcatgatcatcttgttaacttaattagggttttagacattaattgcagttctaagtttaacttaggaccatcggtggtaggaaagagcacaagcctcttttttgttcctcttgccgtcgtatatatatgtcttctcaaccgaatcatcagacttcaatatcaagtttactccatgatcgcttgcatatccctcctgcagaaacaatcgttgagaaagagtctgcagagaaggacacttgtcaatcacaaagaaaaaggaaagaaccagttttgcatgaggttgatggctcaagtagtggtgcagcaaagaaacaagaccataacgctaaggagcgtttaaggaggatgagacttcatgcctcttacctcactcttggcactcttcttcctgaccattcttcttcttcttcaaaggttttgttttcactgttattattacaagttaggtatgttctgcttgttgttgagctatatataacttttcttgctgattggcagaagaaatggtctgcaccatctataatcgataatgtaatcacttacattcccaagctacagaatgaagttggagagctaactctaagaaagcagaagcttgtggagttagagagacgaggtccttctattcgagcaatctcggttcttgaattgggggaatcaggttatgaggctgttgtacagatatgcttgaagaaagaaaacgaagatgagttctccaacttgcttcatgtaatggaggtgcaaggtttgagtgttttaagtgcttctacttctcaagtttgccgagagcaaagggtggtttgctacaacttccatgtcaaggtactgtgtctcatcttatcttcttcatttctctttagtttatgttttgatagaatggagacaatgtgctagtcttcatggatatgaacaatgatgtaacttttcttctccaaacaatacatgtttagggtccaagtcatgggaggattgtgttttaactttagctaagcattgagattatgttaagattatataacgtttagaaaagatataggactaatggtttatcattaagttcataaaccaatggtttttgttcttaagatatattgattctattggtgggagagagactgtttcgacctcaatgaacctggatttgagtgtagcattatgtataaagagggatgatttacatatatttgcatgtattatcaatggctgatcctagatctatggaccaaaaacactaaactaaattcaaaattagtttttagcaattcgatagtatggcactaaaaagtcattggatagtatttacatatatacattggatgttcttttttgagagaactaacaattgcaaaatgtatatgggaaagtgtagatggatgagaagccatgtgaaggtgatgactacatcacagtgttaaagaacaacatcatttcttcgcttcgtgacaacacaaagtgcaaatgatatatagtgaggtatagaatcaacagaatatctttgatgatgcatatcgcaacttataatattcctcttcttgcttagatcatgtttggtttcgtgttgggaatctcataaatcatatatagatgtagaagttatgtttatctccctatggtaaacctcttcttagtatgcctcaagatcacgatttacatgctctagtacccgatccgagaggattatctaccaaaggcccataacttgtaatccaaatagaaatttctttgcgaagctaaaactcaagttttccaaaacaagttgttagaatgccgactaaagtttctttatataggtttaacaagaaatgtataacctaaagatttgatcccatggcataaaaaaaataataattaaaaacatggaagcaaaatatatacaacagatagactatgatcttgcagtctaaaggtgagaccactctttgatggaccacaacctcaactttccgaatcagccggcttttgtttcaggagccaagagaaagacacaacaaccaaatcaaaaatgacaacacggctccaaaagaatatggagtttggcaaggcttacctttgctataaataagttgagcattggacttgaaataactttgtctaatgaattcttacttgtattttataagacgaaaacgtaaatcttgcattaagaattc

SEQ ID NO: 1239 - DNA, 89653 bp, Arabidopsis thaliana
gaattcagaaacattaagagcacagtacattaacaacaaagaaataaggtacaattttgtatttgtatattttatatatagcagtactatatagtaaaagattcggatgttatcatagtctttttcaacatgtaagttttttttttggttgggtaaaaggagacctaacatgtcggaattatgtatattgtagagtttgtgttggtacgtggaacgttggaggaatctcaccaccatctgatcttgacattgacgactggattgaaattaaccaaccagctgatatctacgttcttgggtaaaacttgacttttctttgtcagcgacatggacaaaactaactctgttcagatatgttctttgttagagatttttatttatgttttgtttttgttttgttgggtgtgaaggttacaagagattgttcctttaaatgctggaaacattcttggagctgaagatgatcgtcctgttgctaaatgggaagaagtgattagagaagcattgaacagagttagaccaaaactctccggggttaagagttatagtgatccaccatctccgggtaggtttaaaccttttgaggaaacacatgatattatagaggaagaagtagcttttgagagtgatagtgatgctggtgttgagattcatccgattgacgaggaggaagaagaggaaaccgatagactttgggcgttaaaacatgacggtggagttatcggcgaagttaagactcttgttgacccgaataccggtttgccggttgttgagatcaagagacagttttcgattcctaagaagctagacagacaactttgtttacgtgctgatagctttaaggggataagcgacgatgattctactcaaaccggtatgaaaacgataaaccggatgttaagcgggaaagaacggatcggtttgagttggcctgagccaccattgaacatgttaggaccttgtgttctcgatagacagccgtcgataaagacagtgaagtctttaaaaacagccaagtctttcaaggcttatagttcgtttaagtctgtagccggaaacaacaacgggattccccctgaggttttagctctagcggaaatggacctgaagttgctaatggagaggaaacgaagaccggcttatgtgaggctagtgagtaaacaaatggttgggattcttttgaccatttgggttaaacgaagcttgcggaaacatattcaaaacgtacgagtctctactgttggtgttggcgttatgggatatattggtaacaaggtatatatataaagagtagatgtttccatcaaatttatgttacaatatgtttcaggattgtgaagtgattttgtggtctctgcagggagctgtgtctgtgagcatgtcgataaaccagacgttcttttgtttcataaacacgcatttaacggcaggagaaagagaggttgatcagataaagaggaatgctgatgtacacgagatacataaaagaacagtctttcactctgtctcagctcttggacttcccaagcttatctatgatcacgagtcagtctttttttctctcttccaaataaatctttaactcaaaaaacccgttacggtttcgatttgtctaactttacttgtgtgttttcaccacttctcagaagaataatctggctaggtgatctcaactatcggcttagttcatcgtatgagaaaaccagagacctcatttccaagagagaatggtctaaattacttgaatatgaccaggtaattatttggattacctttgttactgttaggatttggatctcaaatataactttagaagacgtctaatgcaaataaaaatacacacacactgtctcaaatccgaccatagctctgaagtttattcaacttatgttgtgacacattttgttacttatgattattatataatgcagctggtaaaggaatacagaaaaggtagagcatttgatggatggtcagaaggaactctacattttccaccaacttataagtaccaagcgaattccgatgagtacaccgcaaacgatggaaaggcgccgaaaagaacaccagcttggtgtgacagagtactatcctacgggaaaggaatgaggttggttcattacaggagaaccgaacagaaattctcagatcatcgtccggttacagcgatatacatggctgaagtcgaagtgttttctgcgaggaaacttcagcgagcgttgacatttacggatgcagagattgaagacgagggacttgtagccgttctcgtttaaaagaagagatttggtgcttgtttgtttgtttgatcttgcatatgaagtattggcgaaagagacattctctttctacggataggtttttgaatctcatgtcgttatactgatgcatcacactgagaaaacgttcatattcttatagtttttatcttcttgttttgtgtgttggtttactcttgtaaatttagttgatatatataatgaaatcaagaacattttacatccatcaatattgttatcataattattaaaaataaacaaaaagaagagaaaaggcctttttctttatttgattttactgtgaaggcaaaaataattgtaaaaaagataaattgcaccagccgggaattgaacccgggtctgtaccgtggcagggtactatcatgccactagaccactggtgcttcttctattatcatataatactttgtttagaacaagttttactcaatttaactgttttgagagttaacaaacctctatatagaagggaagaaacacacaaactgatgagagtaacaatagcaacatatagtctactaaattttctttttttcttttgacctaattgcagaaacttttagttgtatatcggcttttcaatgcgaatctgcttcatccttcaagaagcaaaggctttctaagccagtactgttcaaatctctgccttgcatattccatgtaatcgaactcaatcttgttcacatgtccctgctttgcattaacagacactagagattactaccagtttcaacatcagagtcttaaggagttttttggacaaagaagggaaagaaagagagagaaagctaaccgagatgattccccatagtccccagaagatatggtttgctaaagtgtagctctctgcatctttcaataacctctctacttctttatcacttgttgcattccctgagattcacaaaaacatgatttagagacgagtttttcttgaggtgtggagaagtacctaatgcttcataggacacaaacctgtagagccaagatatgtgctaatgaaccttctcctttctccttctcctgtttgtttatcattccacacatatacacacaatcagactctaaactacccttgagtaacataagagatatatacacttgcatttacagatatggacctggatatagagtgtagtccagaacatgaggagtgtctgaatggtaattagcagccatctcacaaaagtggtttgcaatgtcataagcaattgggttgaaactcgaatactcatagtcctgcaatcaaaaacttattaaaaacagaacactttcttgatgaaaagggtataagcttttgattcaaaaagcttactatgatggtaatggcattggttacttcatcaatcatgacatttccatactgaagatcgttgtgacagaaaccaatctcttgatcatcccgagtaagtctctcttccaacaaattgatttcattttccaaaccttccaaccgatacttatccatctctataggtgaagccaagttcttagcctccttaagccaagtcctaaaaaatcaacaaagactttatcaagaaacgttgttatgcttatacataaagaaatgaaatttcttttctcttttacctaagtctttcccagagaagaacgttctttggaccaggcatatcaagcttatgaaactctcttagcttcgcagcgatgaaatcagatgtttctgctacacgaagatcatctgcagaaagagtctggtaaacggaccaaaccaatcatacacaatcaatctctctctatcacgagatttcttgaaacgcaaacaattcttatctctaatctcactaactaaacctatcttcctctgttcttcctaaaaaaatcaaaactttaaagaaaagaaagaagaaaacgtactctggcgtgtatgaattcttcaagacgaccatcagagaaacgaccaagaagcttaggaccataaccatgatgagacatacactcaaacgttttgatttcatcacctctgttaaagaaaaggtcaacgccgtcaccgtagatccgaacaagaactttccgatgaacatcttcaccgtttaaagtaggccaattaatctgataaacctcgttagtcatagctccttttaacggaacaacctcaagacgctccagatcttcaactacatctccccagctcgaacctagcgtttgcaaaacgcgttttagatcctcaggtgatgaacaacttggaattagactagtctttgtcttgatcgccatttttttttttttgtttctggagattgacaagatcgggtttatgtaaaacgattttgagaatctttttgtagggaaaatattaaaaacgcagaaaaaggttgaagaagaagattcgacgggtatgagattcttttaagaaagaagttaatccacaacaatctttttatggaaagaaattattctttgaattgaatttttgaactcgacgaaattacgtttctgggtatttttatttatatagagtaatataattaagaaatacccagaaagataagaacgcgtaattgcgttgttcgtcgtttgtctcgtgaagcgattggctttttcaaatgacggtgttttaaaaaacggttattgtgaccgacggttttgtcggaaccaatgaggaaaaaacacgtggtatatttaaggcgcggagaagtcaacggcgtaacgaaacggtcattgttataggtcaaagtcaacaaatccaaatagtcgtctttgtttttttactatgagacagcagtgagatttcttatacagtttttgtgataggttctttaaccgttgtctcgcagtgaatatcccgatattattatactcagaaactcagatgtagaaaattatgtagtaaacactattttctatatatagtggtcctattactgtcatagattcgatgtagtaatcactattatggaaatgattaaacttttaaaagaaagatcttctatgataaaacagattactactttctaaataaagtacacacagataagatagaaaaaaatctcatgtctataaaagtctttaagaaatctaaatgaaagctgtggataacagcataaatagatttctgctttatattgtttgtttttcctaattggtgttttgactttcacatttcatttgtgaacgcattcttcaaatacttaataagcatgactttttcttccggttacattttttaatgtcccttggtgacataagtttggcgacaatgttgcactcttgacgtagtacaagacttgtaagatgataagatccaccaaacacataaagtacaacgatacaaagaaatgttcaatggtataaaataatgtaacaactacttgaataattggactcaattgtttggattttggttgttcttattagagtatatagagttgtgttattatacctataaatcatactgttattgatcttctagaggattgtctttgcttccataggttgaatctcacccttctttgcaacaaaaaacaaaggaacactacaaccacgaatagggtaagcgtgattccattatttgtctctgtgaaaaattgcgttagaagcggctgaccgcagcttttacagctacagtcgcagctgcttctcagttgattgcctcgggaacttgtttctgggatgagaatgaaatcagcggtaacagcgttttcacctaaccaaacagttgttgttttcgatttgtatcctggggatgatgctgtgactgcgaatcagtaaaggaaactcaaaatgaggcaagtaatcaacaataacaaggagatgaaatgcagatatcgtatcgttagcgtcagcttataacagaaggcattggtctgcacaagttatgaaggatatatcatagtgcatttgtacgccccacggttcttaaggatgaatcactaaaatcagctcgtatcataatcttataacagtggacaactctaataacatactgataagaacttaatcacacgtattttaagctgaatatgaggaaaaaacatcagaccttcatatttctgtccaggtacaagcaaccgatgatagtctgcatatgtttgatgagctttaacctgtagagcataaggattacaatgagcaatgaagaactaacaagatttttcagattttggaataaggaaatactagaaggcagggttaatatgtgtctaccgtataattaattcccttgaccacaacaagcccaggcagtggctttcccttgtctaatgaaaagatccgcccatgaactcctgtctaaggtataaaagataaaggcgtacttaaaaaaacaaaacagaaaatattttatataacaatggaagcaaaggtgcaaacttccattaatgtaaccaatctctggaggcttaatctaaaatgatacaacaagattaaaatgttggggttctaaaaacaaaggttaaataataccttcactaagcttgcaacaagattcagcatgctctttctattataatcccaaatggtggaaagctgtgtaacatgtgtgaactctattagtatcagctaactaccttgcgaaggagaaacagttatcacataggaatataagatttgacctctgaggctttaggccacttgttgtcgcttatttccagagtcaattcaaagcatcccccatatatgtaattccagtcttgcatgccaccataaattgggtacctgtagagcgttttgcttaaagcattaaccaagaaactcatttgttgaataagacagagtaaggggacttgatgtgataccaggatgctccattggtgattccttcctcaaattctttgctcaaagacatattacggtgagatttgctatatatacgtgccaagaaccggaatgtctcatcgtcaggacatgcataatagtatttcctgcaagaagagtgcaaaacaactacatgacgtttgcatttcctcaaggaccgagcaaagatattagcctcaaaaccatttgaatagaagtaaataccttttatcctctgtaccatcccatggaaaatttgcgaccagcgcaccctaaaacaaaagctggtttagcaaatatttttttcacattgaatcaagattttccttgacattacattgaaaaccccctcccataatcttgaaagtaaactttcaaattggacatacttaagacgttatagtatgcacaagtctgctacaggaaaattaccccgtgcagagtagccgacgctgtgaatcgtatatctctcagccaagtcataattgccttagtttcaggttgcctcaaattcaagtcgtcattgaaaggaaagaactgcattatcaggtatgagttaagtaagtcaaacgtgactatgaataaaaccaaccgaatctagctaccatcatgaaaatcacagcatcggtgaaaataaaatttatgatcgtcaaaagcgtcatcagacaatcacctgatcagggaagtcgcgatttagatccacattatttgcattattacgtttcctgattgaaaagccatcaggattcaatgatggcattatatgaaggtgaacattttctacaatcatctgggcctgcataccagcataaaaaaatcagtatctgcacataacctttttcttaggcaagtttattgaagatgagtgaacaactttcatggccatggcatggtgcaattacaaaaagcaaaaatcacttaccaatggatccttcttatagttatcacaaatccagtttgcaaggcgtaataagagctcacgccctacaggttcatctccatgtacattcccaatgtactgcatgaccaaatattcaactatttagattcatctaggctatcaccacaatctaatatctcaaagattgcatgtataggcacaaataattgagcagttttaaccttgaatgcaggttcagcctctatctctccaggcctgtctgaaatctctatgacccactaaaaaggcaaagcatgaaacaaacagaagaaggcatcatcgacagtgatcttaagagtcacacattattaaacataaagattcatttctgataaataagagtgtattaccaaaggaaatccattgacactctttccgatgctgaaagcacgttccagaaaaccctcaaagagagaaataaagaacaaaatcaacaacaccataagaccctaatatagaaaccaagaatactgaatctaggatgaatacaactactgattgatccaacgatgatggtgattacctgtataatctcgaaatcttactacatctcttggtgaaatccttcattgctttctcaagatcatcattagtcatatatcctcgagttaattccaaactttgaacaatgcaaacacatttatcattacacagacaacagtaatcacatcccaataacagcttggaaacctaataacgacattacctcggtgtaggctcttcttgagcaaataagtgcctcacaataccatgaaaactataattcccatcacctaataattaacacataaaaccagattaacaaaatcactaaattaatgcatacacctcaattagtatgtgctcttcaaaaagataattgttaaacttattaccaaattaagagcaattaatgacgtaagtaattaaatctgcaaatagttttcattaagcgctatgaacaaaaattagatagtgaagactaaaatggcgacggacctgggtggatatggtcggagtggccgcctctagcgttgatcgacgggaggaaaaagcagatcacagtcgaaattaggagactttggaagaatctgagcttgctcatctctaatgaaacacagatctctccttctcgttctcacttccttgctgattgattcgttaaagcaataccgggatttctgatttccaccattgttgggataggtgaaaggtacaatggggagggaaggaagaagggacattagagagtcagagatcgttgaccaaaacttgggctttagacagttacaaatattgggtcatagcctcgtgagttattgtaactagtgggcctaatttaaattctcttttagcccgttaaattttagtaactcgattggcacataaataatgaaggagtgcatggtattggatgaagttaattaagatgaagcgacgttcttatttatcagatagttttacgcattcgacaacccaaccacaagtgcatgaactaaataaaaacagagttgacaaaggaaaggtcgagatttatggttatttagatcatggaaatagcttcctctatgccttcttccaaaacggacatgaaactttgggtgtttctggctgaacaattggaacgaatctctccttgtgttccagttaagacactcatctgacccatcttgatcatcgccacagtaaaataatcaaaaaacagctgctggtcgatcgcaaagctttccacaatgccacgtgtcctcttatccacgaagagatcctggtcagaagtgaatagcccttgtcggttcatgagatcaacgtagtacttgttgtcgaacacgtcaggactccttatgtcattcacttgcgtgttgctcgagtttgcggtgggacaagtgcgtttgaggctgttggcgaagaactggttcatggttgggtcttggttcgggtagagtcggtctgtgaaagacggacaatgcgcgattccgatggtgtgaccaccggaaagtgctactaagtcggtgatgttgaggtttctgttggcgaagtcggcgatgagctgactcgcgttgaagaacggtggtggtaagttatttaacgtcgtttcctggctcgcgaacgctagagagtcacgtcggccaagtgggacagcatagtctggccctcctgactacattgacacacaaaaataattatcatgttagagaattagtgtgacttgtagactaatggtttgtattattgcatgtaaccgcaagtcataatccaaggttagttgaaactaaatgtgattgagttatagacgaaaaagtgatagatgtggttactaggacgacggaatcgcgagcggcgagagcgaggatatctgagcaagagacgacttgaccgcacttcttttggacgagggcacgaaggttattaatgacgacaaaggcttgttgtcgtagtgtcagatttgggattgatgattgttctcctggtccactggctgatccagctagcagcactgatgcttcacatccctgtttattttagtttataaaatttctcataacatacaaaaaaaaaagaagatatttctcataacaaaaagattaaaaatgaaaaatacattttgaagtttcttccgaaattgtatatctaatcaaattatgccacaattcatcattattgataatatttacttttaagtatataaaggtgttgcaacttacaagttctaagaatctgataatcataattaaagtattgctgcaaacaaaattaggtttagtatttggcttgagaaatatcaaatattttattcagaaaattggatgcattaaatgttgatataaataattcacatatgctatcatatccggatatgtattatttttattattggttggatattgaattatttaagatatgtttacgttccataactgagatccaactaacatacggaaagccggtgtatagtattaatgcgacatgtcctattgcatgtatttttttaattttattttatagcttgcatgtatattaagtgtagtaattttgtaataaacaatactattccaataatacatgtcatttagttatgtttacactaagaaaccctttgttttgaaaaaaaaacaaaagtgaagtaagaatcggacaacccttaaatcttgttcatgagacttttgaggcgactttgtgttttcctttaaggttattttggtcggattttaataagaaaactcacaagtttattgatatttatgaatatttcattttcatttcggacatgcctagagaatcttttttgtgtgtgggtataacgagtgatgagtggataactggatatggtttcttatattaaaaaatgatatttttattaatgaaataatatgtaatttacatgcgtagaactgtttagactaggctttaagaatcaaattaagttttcttaggttttaatacaagaaacaaaacaaaaggaagaaaaagatcgaacctgaacgaagcaatcatggaaatgtatacgaaggatggcagcggctaaaccaatatctcgcttgaagactttcttgagctcttttctgatgatgttttcgactttcggacatgctttctggtaaaagttccatgagagacctttcactataggagcatctctactccgcttctttgcctctaccgtgggaaaaaggttcagtgtcaccgccattagcgagatcaatatcagaaacgtgaggacacgtgttgaataagcctttgtcatttttttttgtttttttttttatcagagcctctctcttctctgccttttcttgttcttgtggaatagatggactttgcttttataggcaattttggtccttcagtccttgtgtgtcttatttctatcttttaagtatatatatttttcttatgttaaaaggcaaaggaatactgaagtcttttccttctatatatttattgtgattaaaggagagtatatttctttgcttttcaaaaaggaaaaaaaatatccaagtggaagctttgcgtctggtctcgttcggtcgttcctgtgaccctgtgttcaacgtaccaattactattgtcaatagaaaaaggcttctttttttcttaccaaagagattctttttcggatcaaacattaaagcaaataaatacgtgcgatcgagtatatttttttttcccgctggcattcaagttcgtgacagtggtccacctattatatcagttagactatattgacaatggttatatatatagtactactactaattagagtaacacgaaactttttagttatttttgtgtgcactatttcaaatacttaaccggttaaaaagagtattgttttagtgcttctgaacccgaattcgaattgcatatgttccatgcttagagaggattctttatgacctttcataaatagtatcatggactagtgattatgtttacgtaatatatacaatatggttttattggtctaagatgcaaaaacaatttgatccatttaaaaaaaaaggtaagtgcgtcgatcgatgaggaatttttgaagaaactcgcatagcagtggaagaatctcaagacaatcacgcgcccttgtgttggcatattcgctgagtcagtagaggatcgtaaatggtttatgaagattgtgactttgcagaaatggtggggacatttgaaataaccaaaaaggataaaagacttttgaagtttgaaaaaaactaaactaatgcaaagcgagcacgtgagagtagccaccaccaatgaccaaacaagtgtgtttcatagaggctagcatctgtatgtgtagatagacacttttagtttgtttcagccacgttcatatgcttactctttcctaagatatacgttacatccagaaaaatcgacataaattttgcttatagtcggaaaaactagtacatgcccataaatgtgtatgaactgctgtgaaaaaataattttggacgaaaataagtttgttttctatataacaagacatttcacaaattatatatatatatatatatatatacatatacatactaaaaatacgtatatatatatatatatatatatattaaaaatacgtatatttataacatatattgtagtcaaaacatgtatagattaccatggacttccgaaacagttattgttcgcattctatccgattttagaaacattttgtgttatctcatttttaaacaaaaaaaaacttaagttattttctttcaattcatttaatgtttgtgcataatttctaatacttcggacaacattaataatttgattaaaaaaattatattgatgcatatgatgtggatacacgctggaaaaatagtatatgtaactctctatttttttgggttaaaacaattaatatatggttataaatcatttacctccacatgattactctaggaacagatgactaagtaacactataaacttatttaggtttgcagaaattaggggtgtgggcagacatttaatgggactagtttcataaaactcgcatcacgtccttttttctctatgtttatgatgaacgtattttgaacgatttataaaaacaaggagttaagctaagagtttcgtggaaagtggaaaagaaattaccattttttgtatcgttttaaatctatgggatgtctccgaatgttttggtacgtaatgatcaaggataatggctccaggcatgcaaaatgtacaatgatcgaactatcatggtctttgattacatctataaattcttttcttttttaacagcaactttgattacgttatatataacatgcacattaaactatattgtaaagctgtcataaaaaaattagaaacgtatgagacattgattcccttactctatcaaccaacgaaaaagagccgaaagcaaattctataaatatatatgcaaaaaaagaccgatcatcatttttttcctaaaaaaatgcaaattgtaaaaattagcagcccacgagccaagtttttataaattagagtcatacgacttaagaactaaagaccaattaaaagttgataaaaggtgttgataacaaaagtcaaaagactattgataaagagaaaaaaataaaaataaagataaagatgaagtagaaaaggatatagaaagactatgtgaaaaaaaaaaaaaaaaagaaagaaagattatgtgtaaactcatttaagagagttgtgagggaaaaagaaaatataagaactcctaaaaaaaaaaaaaatagtaaacaccagaaagaaaactaattacgaactccatcccgggccaggcaccacttgagcccaatcaagtgaactggactctagcttaaaagccttttcttaaaagggttatacagatatcccttgaattagtgtttgcatattgatcgtggtcgcttagaatgttggtcctcatcatcagacgagctccaattagtatttgcctattgatttctcaataatatgttttcatgttttaactgtaaaatgtggaacagactaagaatgagcatacaaaaaatgtctctatgatatcatattaagggatgagatcttctaaaaacacgaagtctcaaaacccacctacatgaaactgaggctgtaatttttcggtggcactaaaacactaaaaaaaattcttttgtgaattctctcttatcaaaatgtgatagaaacgcactaacttatttgtataagatattaaatatgtatgtatattaagttttttttttgtaaaagatattaagttacgtactaactcatttgtattaaaaaaaaaaataataatctgtgttttgcataatagtagccgatatcaattgttaacaagtttttttaaaaaaacttttataataaaaactgctgacagaagttagatttgggtatcatatcctcttacaaattatttcataattcgtattatatgttgtaatcaagacaactagacaagaagtatctcacaacaaatctatggtaacttatttttgggatacgaatcaattttcttaagtatcttccacttttgatcaaaaaaaaaagtatcttccacttataattataattttctctcatgtctgtcactaattaaatcaatcagatttatggagaaaccatcaaatagttataattttccttcatcacatattcacatctagacgcattgtggaaaccatccaaaatcagtcatctcaatacgactcatataggtgatgatgttcaatattctaacgcactgtgtttagtttatcttccaccaactccctcactctcgatgctgaaaatatattgtaaaacacacccaaaatcttgatctcgttctcgctttctatatatataaccatattttttctctttttaaaaaaaaaaatctttttttcttaatataaaacttcagttctacaagagtacttaagctgctctctcatcaaacttgcatttagttactatcaacgttgagttggacagactagtggtttaaatgcaggggttagacccatatgtttactagttcgatttctgatagaaaatataaggtattaacaataattgatcctgaaccgtggaggaattaaagcttaggtccgaactccttttaattaacaaagaaaaatatatgttttattgttgtcaacatattaaatatgatttaacgatgtcttacatgacatattataggtagaccaatactatatgttgtttgtattaattttacattacaaaaaattattggactccaacatcttttagttagactaattttgtctacagttggaaacttgtaatagattttaattgatcacatgcatactaggacattagccggggagaatcacaggattgattggctataagcctttgggatatcatcttattgaatcgactgaaagatgacacgtggtagtttatactctattcgaatatgtctttgtaagaaaattctgaaattgagattttaaatttaataaaatcaagagtatactatgttcctttttgtaggaccgttccctgttaacagatcactcatcaaaacctgatgtttttatattaaaaaaaaaaaaaattgtcggctgtaaaacaaaaagtttatacaataagattaaatatagatatttaataaaaataatagttgtatagatcaaattagctacacaatttatttacagtcgattggaaatgagaaactatgataaaacgaatacactggagactggagttgttatgagttcatcttcataactttgtagttttagaattttataaaaataatattaaataacataacagataatcagaaattatggttattgcagctgacattaatggttcataatagaattacttcgttatatagtatggaagagcattgatttcaaaatatagctgcataaagtaaatatcaatatgtcatgatttttgggagaaaaggaaaataatatatttttgtttgaattatagttttgcccaaatacggcatatgtcccaaaatattagtgttggaatcataaaacattgttccataaaatagaacgaaagaaaaaaagcaaaagcgtacgtaaatttcaattaactaaatcaacttggagtttattatataccaacttggtgtacggattattcattctataagctgttaaaccatattgtggacggctagatgctccactgcatccaatttcgcatcattaccgataattacaattaacatctaaattatatacaaatcgtcttagagcttttgaatcatgcatatgtctggtctgatcgtgttagaacgtttaatttagagatattttttttctctcacatcataagaacttaggaataaatgatttataactactttttaatatataactgaacatgtacctattacaccaacttcttaatatatatatacacaccagttttaagcaaaatttgaatcagtggaaaactgatttctgtttggatgtgtttcggggtaatgattaccaatcatatttgttataatcgttatatcacttaatattttcatcctaaaagaaaaacgtctcatcctttcttttaaaattttaacgcagttgacattgctcttagcctacaagctaaactaaaccatacatttatttttaagacccttcaatattataaagaaaacacaaaaattaaagagaattgaattctcattttttatatataaataaaacactattaacattacacgaaactccaatggctgagcaagatcgctatgttgtggtcaaaattctcttatcaagaataaactttggctattatctataaactttatgtgtacacttttgacctctacatgtttattggagatataaaagtttttgtgaaagactgggctatgttcgttaatttgtatatttcggtcagttgttgattatcatttttaatgatccaactaatttcttttaataaatctaaattttcaattagaaaatatgaatcaatttttttatgataattatattattatgtgtttccccaattacataaagatattttgcagttttggtgtggtaatatgcagttttgtacgtcatagctttctccttggtcttagctatattttcttaatgcctgtacaaaactacaaactataattttttcaatttaatcattcctgaatcttgtctactcatgtcacttataccaataactcaatatcatgtatgtattttaatttgacctaacaaggataaaatcatgttttgatatagcagttaaaatttgcacataaaaaggtatagcagttaaattgcaataatagcattgtagtaatctaataataaatcaattctaaaataattgccccaaaataaatatatgtcaagaaatagtgcataattaactaaggattgatagagtttaaagggcaaccttaattatcataaggcatcttgtcctttcttttaaagattcaatttggatgggaccataattttagtgctccatgtcgattagatattaataatatctttttcttcttcttttttttggttcaaagattttaactaatatctaagttgtatttcttttaatcctttcttacacacacccatcatatatattaaatacatatgtattgtgttttctttaagtgaaatagatatgctaactaatttacccaaaaaaaacagtgtatataactaatttttacgaaaattgaccattaaaagagctaaaaaaaaaagtaaatgaactttaaacttgaggctgattttttttccgttgagttttgggaaataagaattaatagttgaaagtttggaattactttggattaaaatatgaaagtttagttggtttcttattgtaagatccatatattcgaagaaataattggttagaatgtctaacaatactagttagatttttctagcatatatcaattaattcatatattaatgttatctaaagaaacccactttctcagatcgcaatgcacataagctcatagttaaattaaaagcatgcattaggataaataatatacaaagaaataaataaattttagggagtggagaatcaaaagaaactttatgcccctaaaagacatgaaaatcaaacaagtgtcaatcatagatacgatcttgatcgagccaatgagcgcaaagatgcgaggaaaaagaagcaacagatcgatcacacactttttgcgttttgcatgtttgatgcattttgatttgacaaagattctttatttacttccttcttccttacttaagctgaccctctttcttaaagtttaaactgtttttagaacgatcaatcatttcaattttggaagcatcgaaatcaaaatgtccaaaatacatattttgacagcgaaatattttgactagatttcaatagtttagaactttggttccacaccagtttatgttgtaatggcaaatgtaaattatttatagaggaatcccattctaatactattttgaatactaaccttggccttttcaacaaaaaaaataaatcgaaatgtgtacaatcaccacgaaattatcatattttttagttatggattctgtaaagatggattaaattagttaaagggaatatactcttacattagctatattaaaaaaaaaaaaaattagctgctaaggggatttagtccatggaaaatgttatttaattctagtttgattaaaccttactttcttcatggtgaaatttaaatttgatgatataatccacgctaaaaaataccatcgtaaaaaacgttgctaaaagctgtgtctttttttttttttttggtaaaagaagctgtgagtcttttgttatatgatgagttaaaccgctcacagaataccagttagtgaccttaaccaaaaaagttccatcgttacagagtatcaatctatgtttcaatgtattatgtatttctttgaaatattgatgtcgaatataaggtggattttctactcagaaataagagaaaaatcccatattccaagaaaaaagtgagttgaaaaaccccgtaatgttgaagaagaataagattcaggagtttgttatgtagaccaaaggcaaagcaagatggtcaaaaaaatatttagaaaggagaaaaacgacctacttaatcaattaacaagcaaaaaggtgaaattcaataaattaatacacctaacaaaaaaaaaaggctacattggcacctaacatgggcaggtcattggttctccaccacgatgagatgcacatgatacccgctttaatatgggctaagtatgcttaatgaccatcacttaattgttctttttagttgttaaaatgggttaagaattccacgtcgttaaatgtgagaaatgtataattcaatacagaataaaaagctcggacgaaaaaaaaaaaaaaaatacagaataaaaagctcaccatggatttttaacatgacataataatgatgagcagttctatatataccacaatgaaaattctttgtaaacttctttctattagtctgctttatattttctagtaatcgaatttcatatttagacactaaatagagatcatgtgagtttcaactctagatcaaatatggttcgttttaataataacaaaaatatatacatataatatattttgttattattcggacggtaattcgatagtgtaaatacattaaacttttgcttaatcaatagagcaaaaacctcccacttttttttttttttttgataacttcttgtttattattagttgattttaagatgaaattttatgtatttttaatgatttacatcaagtcatcaacccaaaataaatatattcgatctttggatccagttaaagtaaataagatatgagaggtacgtgcagagatatattcagaactatacattagtaaatataagaggcaaaataaatgatgctatgaataaagatgctatgaatgtttaactaggaacagaactagtttttgtttcattgttgaactcttatttactctaaatccttcacataataacgctttgtttataaaaaataaaacaaagaattctttttttaagaaagtgaatcgcatgccatttgggaactcaatctttttttatatatatagtcttgcacatatcaaatccagcctccatctcttggtgtagaatgtaaattgtaccaaattagattgttaaatatatttggatattgtaacaatagtgcatgtcaggtcatatgtcacatcagatgtaacatcaatcaatcaaaaagaaacctaggaaattatactacaagctagaggaggaagggatagtacaatacaaaccccttataataacaaagaaagacggagctttcgcatgtaaagctatatactattgtatgaatgcatacttaacatataacgtatatgagcgcatacatatataagggaaaatgaggctgatgtggaaaaggtgctttaagaagcagtgaagttagtgggagaatatgataatggagattatatataaagacaagaaggtggcatgagattggtaataacttcacagttgtctccgaagaaacagagaaaccaaagagttaagtggggaacctcgaagctagttcaaactagtgggaggttgtttcacgtttcaactttcaagtcataaaaccaaatccaactctaaacgtaaacccaaacgtcaaatcatcagatagaaggaaatattctgattgagagatggctcgtggaaagattcagcttaagaggattgagaacccggttcacagacaagtgactttttgcaagaggagaactggtcttctcaagaaggctaaggagctctctgtgctctgtgatgccgagatcggtgttgtgatcttctctcctcagggcaagctctttgagctcgctactaaagggtacgtattatatcatatatatatcttagtgttcatatatatacatgtgactaaagagtaacatatattatatatgtaaatctgattataaattcagaacaatggagggaatgattgataagtacatgaagtgtactggtggtggtcgtggttcttcttctgctacttttactgctcaagaacaacttcaaccaccaaatcttgtacgtctactttctctttcattctcattaattagtatctactttcatcgagtttttctttatttttgggattgattatcgtatgtgtttgtttttttaaatagaatttttgggttgatattaaaactagtgcctcgtcgtcagtagtttcacttctttccatttcattcttttaaggggtagtttagtctttttgttccataaacattattttagtgtgcaacatgctaacacgtgttgacatgcagagggaaaatctgttggacgttgttaattgatttgaaattaaaatactcagggaagttaggtagggcacctgattctgattctatacatgaaaatagttagtgaagtacaacattcattgcacctagctctccaattctccgaatttttaatttgttgactactgagaggaactgacattgttgtggaacgttgtactatcataaaatagttacgaaacaagtcaaagtaattactgttaaagtaaaagatgcttagagacaatgtattacactttaattaatattttatatctctggttattcaatcgcattgtgtttcggaatgaagtagtattattggtttataatcagcacaatcttttaataaaagttgatctgaccactttataaaggttgccctaaggcctaaactatagttattgacacgctttgaactattattttatatattgatgcatatacgtatttcatgtttgtgtgtgtgtgtaccaacatgggtcactatttgtaattcgacatcttcaaaaaaattcacccgcttttagatatgtttacaaataatgtatagaaacattgaaataaaagtttataattctctaggatccgaaagatgagatcaacgtgcttaagcaagagattgagatgcttcagaaagggataaggtatactgattatttgcatgctatctccttacttatgggttataaatttatacatatatgagtaaatgcatttaaaatggatttcagctatatgtttggaggaggagatggggctatgaatcttgaagaacttcttttgcttgagaagcatcttgagtattggatttctcagattcgctctgctaaggtatgtatacatgttttcatgcatatatttagtgcaaatgttagggagagtgaatataaaatgattgactagaaaagcttttatgtaaaatttgcagatggatgttatgcttcaagaaattcagtcattgaggaacaaggtaagcaaaaaaaacaaatgtttttcaaaaaaaaaaaacacattgtatattcagctttatagcaattatattaaattaatgtaaatttttaacagtttttttttttttttttttgtatttaaaggaaggagtcctcaaaaacaccaacaagtatctcctcgaaaaggtaacaaaatcagttgtatgatctcatcatagcacaacttatgaaacttctatcagcagaattatctagtcgcactattcagatgatctttagagtgttttgcttagctattgtctaatgatttattttgttggtgaattaaatgcagatagaggaaaacaacaatagcatattagatgctaacttcgcagtcatggagacaaactattcctatccgctaacaatgccaagtgaaatatttcagttctagaccatagggtatttgaagactatgtctcacgaatttaaataaccttggtaagtataatatagtgttgttaaatcacacataattaaaataaagcctgtggaacttcgctaggcagttgaaaatctatccgtatgttttatcctcttgttttacatttgttggtgtgaagatgaaatgactgcaagtgtggtgtgtacttataactctttctactttctatctatgttttgaatttatggattatttggttttgggtttaactgaagatacctagcctctttttgcagtgtatatttacaatgtttttttaaattaataattttacattgttatccatgatgaaaattataatgtcgacaactcatactttatggaaaatagaaattcgacacaactaaagcttctctgattcgattccataacgtaactgatcatgtcatgaaatttgaaacaaatctagaaatgtgaaaactttttgtatcttaagttcttaacatacgatgggactatacattttattggtttaaaaagactaccatattattgggtcccgcgtatatgatgaagtcaaaacattaaagtcaaccctaaatttaatgacatgctaaaatctacaaccatcatttgtaatagaagaggcttatttgttgctttttctgccctcgtcttcgacataactggtcttcacgatttgaccgtgacagcttattaaacgtctttgagaataacgacgatttaaatgcaatgtttttatttggtaagaaatgttttttaataaatcgcttctccctggtttactttcctctttcgatcaaatagttcatcatgtacaggaattttatatgtgaaaaaaaaaatacaggaattttatataatgagcttaatgaaatcgattgtttaagtaaatgatattttttttagttgtgctggcttgcatttcaccaaatcaataattatgtcatcctgatcatatatttcaacttaaatacttttgttaaactaatattaattatagaataaaaaaagaaaaaagaatgaatgattgttttggtgatacggcctaaacagtaaacacatcataaattggcacacacattttgttttgcatctcaattctaaatatgtaattttcaaaatacactaattgctaaattttccgatagctacaatttaaacgtttctcaaaaaatctggctatggaaaatgacatgtttacaataatgttaagtaatattgtagacaactcacctaccactgattgtgttattacggtgtggtagaagacggataaatacatttattactcttcaccaaacccttctcatctatctataaatctgtccaaatctatttgtctcttcaccccaaaatcaacctacaaaagttaaaagttacaccttactaaacacaaacaacttcataatggctttccacttccggcgactttgcttcttctcagctcttcttgccgtggttctccaactccttcatggcgtctctggccaactagttgtggttgaggaacctatttctgctcctccgcctccgctggtcgacctaaacaccggtgatggcattgtgccggcgctgtttgtcttcggtgactctctaatagacaatgggaataacaataacattccttcctttgccaaagccaattattttccttatggcattgatttcaatggcggtccgaccggtcgattctgcaatggcttaacgatggtcgatgggattggtaagttttcactctatgcattataataagttttccttcctcctaaaactggaacgaggctgatataagtattatatatgatgcatgcatgcattgatcgtatagctcaactattggggctgccactgattccggcctactcggaagctaccggagatcaagtacttcgtggtgtcaactatgcttccgcagccgcggggattcttcctgacaccggaggaaactttgtaagtagcttttatgcaaaaaagtaaatcaattcgtaagttgcatgttatatccttaacaagaaaaggttgcatatatgttacatacttacatagttacatatacactctctttttactatttgttgtaagaaatgtaagttatccgaagagcattgatatactttttttttttttaagcatagatatacttgtatctactaatcagccgaccaatattttagtttgtattaaataattctaaatggattctaataaatgtactataaataacttacataattctgaagtgtatctattttctgttatgagcttgtgaataaacaagagtaaacatcaaaaaattaattaatattttaaaatcttaatgaaatcgtttctaatttgattttaaaaaaattagtgatcataaagaaaaattgtgacaaatcttttttattcaaaatcaatcaaaatactttcaattttttcgttttttcttgagaaagaaaatatattttcaatggtggtcacatcacatgagctatgttcaagagcaacattgtggtttcatattgtaccaagaaaaatggttgtgggtgctcctgctaaatgcgataattaataatgtaacgtggagtttatgttctggtggtcaggtgggacgcatacctttcgaccagcagattcataacttcgagacaacactagatcaggtggcgagcaagtccggtggtgcagtggccattgcggattcggtgactcgaagcttgttcttcatcggaatgggaagcaacgactatctcaacaattacttgatgcccaatttccctacccgtaaccaatacaactcccaacagttcggtgatctcttggttcaacattacaccgatcagctcaccgtaatacaacaaaaacaaaagaatgatctctaattttaattgatagtactaatcgagtaagaagcgaaaatataatcaaaatgtgttgttgtttttttggtaatgcagagactatataatcttggtggtcggaaatttgtagtggccggacttggaagaatggggtgcattcccagcattctagctcaaggaaacgacggtaaatgctcggaagaagtgaaccaacttgttcttcctttcaacacaaacgttaaaacaatgatctctaatctcaaccagaatctcccggatgctaaatttatttacctcgacatcgctcatatgttcgaagacatcgttgctaaccaagcagcttatggtacgtaattaacaaacgttaagctagctaaataacctctaactaatatctatagctattaatgttgtgttgttctataggtcttactactatggacaaaggatgttgtggaataggaaaaaacagaggacagatcacttgtcttccctttgaaacgccttgtcctaacagagatcagtatgtgttttgggatgctttccatcctacagagaaagttaatctcataatggcaaagaaagcgtttgctggtgaccgcactgtcgcgtacccgatcaacattcagcaattggctagtctcaattaacgattatgaagactatcaacaagacataaaaacttggtgttgtctttgtagtttcttttttgtaaggttttgagtcaaatctgttttccttttaagacgttttgaaaacgtctactgtgtcacacttaacggtccaaatcaatgtactcatcgttgcttcctttgttttcttaaatatcatcaattataaaattacaaaaaacacacaatctttttctttttttttaataaatcacactaatcctgaagcctatggagcttcggagattcagttcttgatatgtatttaagcatcatccaaccagaaattgtttataccggcggatagggttaaggacagaatttaacgccggagacaccatagttacggtgactaggcaccgtgaaatgacggagtcttccctcttgcttcgtcatgtaatctctacacaaaaactccattgagaactcatcctccactttcctatccacatcatgcacaaacacagccgttgtctcttcctcatccttccgtctcctcgcgatcatccccgccgtgtaaatcgccgacatccgtcccggagcttcttcatgaaaccccgtcggagcatccaccatgattagatcccactctgtctcgtaaaccacctccggtaagcccttcaacgcaagctcgcaagtggaaaccctaagatcagttgacacgcggcggcattcttctctgtctttcgtagcagccatgagagcttccgcgtctcttaccttggtcttgtaccggacgtggtacgattcaagagacgggaatttctcagcgatttggtgaatccatgactcgtcctcgtctaagaagatggttcttcctccgtgatttaacgtcgcccacatcaagctatcgtgaccaagaccaaataccaagaagttgcacggagatttcttctctaattcctgatccaatttaatttgtatcatctataattcacatttacacttatcttatacaatacgacaacaatttactagtaaaaaagtaaaataaaatttaactacggtcatttgctcattttttgtgacgtctaaaagactaaaaattcacatcattaccggactactaaacttatgttacggtagcaacattagtacaaaagattagactagattcatttaatttgctaatcatatttgatttttccagaatttagatgacgaattgagttcttcatttagatatcaattaacaatctacagtttacaatttaatttgcatgtcaaaagtctttttttttgtgataattaaatagtatactttaatttgttaccttcttggtgacggagatttcggagagagtttgctggggagtgacattggaggaggcatagtggacgagagcatcggcgagggaaggagggatcttattacaacttcttggactctgtaatttactgccggtggaggaagtggagatccggagagtgttgttcagaggctgatgaaatgaagatgacggtgagaaaccggttctggtgatgaagaagagagtgagtacgacgagagagacgaagctagagagtatgagtctcgtggtcatcggaaatgggagataagtcgtcattgagagatgcagagagattgtgcttaagtgagagacgttactaaagctttttactgcagagaaagggttttttatggtcttcaggggacaaagagacaaaagattttgatttttcttgtgtagctttgtccatgttttgtggtttgattattggtgtgactcgcattgattcgtcgatactaacaatagtaatttttctaattaattaaggttgtggtgtcatatcagcttaggtcccaattaaggttaaagagtaaatatagcagttacaaattacaacactatatttttactctaataaaaacaaaagtatagtcaataatttatattttgattgtaaaatgtttctctaggaaacttcattagattttgtttttgataatttttatgaagctccttcaccaaaacccactcaatgtttctgaagtgatttcatcagtgaagcttcatatttgggcaagtttggctcaagccatgtgggaaaagttggttcttttaccatgccaaaatcacatctttcaggttctctgttttacatctctgttttgcatgtacatctctgtttttctccttttcatcggtttcgttgatatgcatttaaaaacaaattcaacagcggtaaaacggtaaagccaatctctttattcagatgttttattacaatccaaaacaaaaagttctgatacagccgtttaggcttttttttttttttaacctgcagtagaaaatctaaagacttaagaaaaagaggaaagaaaaaaaaagctaaaaaccaaaaaacctgaaagttcagagcctgaggttgaccacatattgtatggtattcctttttttttgtcatgaagtttttgagagaacatcatccgtcacagcctcaagccaagcgcgtaaagccttaacaacaattccgaaggcagttcttgatgaaagggttataaaaagaaaggagaatccaaataatcaaataactaactttatatattccccaactagaaggctaacttaagttaaaaaaggtaaaaaacttttataagtttgttgtgatgtttggttgcaaggctttttatttgaagcctatgagaagagcttgtaggttcttgctgaaagaataatgtgtctcattcctccaatgggcgcaagaatcgctatcgagataccagtgactattgctacctgttagttaaagaaacggatttaagtgttattgggtcaattagattgtgtgactaagcctcgtttaattaagaaagaaagactaacccaagaacaccaccaatgggcgctaaatctttttggtcgcttcattatcaaccatataatgcaaggcaactgcaaatattaaagaggtatcattacccatacagtgtttgcaaagagttatatgttcattcttttttttgtagtgtataacttacgaagtacgaggttgatgagaagacaagaccgccgaagaaccctaaaagacctccgaaaaaggggatacaaactgctacaagacaaatcaatgctgcacaaaccaagaattatcttagttttccatttctccatgaaaaaaatgagtaaaaaagaagttaaatgagaactaaccaacatatgtactacgtgcgactagacgcagtgttgttgaaggagtgaatttcagtgttttcacaagataagactcgatcgtgtcaaacacaatcatcgcaaaaacctgtcaagatgatcattttaataaaagttggagagtttttctaagggaccaaaaagataaggaaaaaactagacctgataacttcctatgacatggataaaaaccatgaagttagcagccgctataagccaagctggtctctctaaggaaatgagaacatcatcctcaacatgagccccaaacgcccaatagccggagatagccacaaaaaggtaacaaatgatgacgattatgtaagctacaacaactcctttccacattggtttcttggaaggcacttcaggtgttgaaggaatagttgcttggatctcaagaaccacactgtgtcctgcaaacgcaaacgctatggttccaatgccgttaaatgcatcaaagaccattgaggccaccgtgtctcccctgactccgtaagttgaaggacggtgttccgttccttttgctattgacgccaccgaagctatcattgagtaactgcaacaagtttaagtttccttataaataattagaaaacaaaaaaaagaagaattttttgtttgttaaggtttagggtttggtgacaatacaggaaagacatgagggcggcgaggagagagacgatcttgatggagttgaaatcaggagattgagagaggacaagctgaagcgcggcgaatccaaggatgtaataagtctgacggatatgttcgagattcggaaatagaagctcgacaaatttcttgagagattttcctcctgtcacgttgtagactatgtcggaagcgatttggacaagaagctgttgcggcatgacgatccagtaacctagttttggtccaaaagcttcttgccctagctcggggtaacggtccaaccgtttccctggaacggcttcgtgcaactgtaccatttgccataacgagtagaacgttatagcccatgacattattatagcaacaagtccaggtcccctgttagcaacaaatttatcgttaaattacgactttattttgtgaagttaagatcagacaaatttaaacatttcttaaaaaattaccagccaagttgtgacatggcgaaagggagaccaagaactccggcgccaaccatggccgtgacattgtggaaggcggagtaataccatttggcttctctagacgctgtgactggtaaccaatcgttgtaatccatttgacggtgattgttattgtccgttgatcttcctttgttctcctcgtcattctgatcaaggtattttggcatgcttaatataatgaattaagagaactaacagcgcgtaacgttacaaaaaatgtaataaagtgaggcaatgatatgatataatgttaagagtctcattgatgaaactacattacaagtcgggccaaaactcgacactctttgccataagatgaaaagatatttattaggcagagagagagcatagttaccgctgtgtatgtcattcttgtcttgtgttttctttaatactcacaaaaaaaataaaatacaggaaaatgtatttattttttgatacaatatgtatagagaaagaaaacaaaaaataagaagaaaaaaaaaaagtgaagatggtgttgttttgtttttttaactttgttaatgaggattgaaaaagtggtgttgttgtttaaatagagaggtgatttgagtgaaagtgaattttgattacttggatcttaggaaagtgaggatggtcttttgaaccagtctgcggttaatctcgtaagttagaagtcactcgtaaaatctaacgactctggtctctttctattttcagtgtcgtgctaaggctaaatatagcttagggcgaataaacaaatgtggcttttattattaaaaaaataatccaaataacgaaaaacatattcgatagtgataagatgaaagaaaataaaatattcaaaccactatttatctatctttcctttaaaaaaattattcaacaaactcacgtagttatcaaaccaattttctctctatagatatgatagccaaatactcttataaaattgaagcaaaaaaagaagtttatgatttagaagaagacacggttacaaagattaaccttactactaattttgtttataattttttttttttaagtggcccattgataacacaaaatcaatttctctttttctttttaattttcattttcttttaatatgttgattattccaaaagagattttcgttattttagttatgtacttatgttattaaaattatcttccattagcatgtgcataaatttctaatacatagcgtgtggacttcccaaacaaatactcactatgcactatacaatttaaatacataaggctaaaaatgaaaaaattatggcctacgaaattcagtttttttttgtgtggcattgggttaatgccctttcctcttcacggtaagcaagacattgcctattttattttgttttcagatattttcttctttactaacatttctagccttactcatcccgactttttcgcacttcaataagcctacaaatcattaacaatttaaactaagaaaatttcatataattacacagtttattaccaatttataaaaaatacataaattataagattttcaaaccagacaaattacttttcttttgtgggtaaggatatcatcaatagtaaaatatgcaagtatgaccaaatatgttttatttttgacatcctgttaaatattacattttttttaacgactttccttaagtacgcattgaaaatttacaattttattatactttacgtttttttaaaagtataataaagtcttgtacttataaaatggaaaataaataaaaacatcataagagatttggattcaatccttgcaaaaaaaaaaggaaaaaattatcagctcatctagtaacatcacaaattcacaatttacgagtttcaactttgaccatacatagtatattactgtaatctctttgtttctaattaatccttaaaaacatatatatacccgaattattcatatgtaacccgaataccgtacgttgtcgggtctttgaacccatacccgtctattttttaattaaaatatttttattaatatcttcccaaatgggctttgggcttttctggatttgggccaaacagaaaacagaggttacaaaaaagcaagatatcgccggccacttcgccgggaaatagaaaacagagggtttaggtttattagtctttcgattgaaaacatatgatttggttttgggaatatcggtgaagtttttctggtttgaagaattcattatctgattctaatttaagcttttcaagtttatgcaaaaagttttcgaatttctcaagaattaaggttttttttttctcgtggaatgtttgctcagtactcactactcagtagctaggtcagagcgaacttgtttatgcaaaaaagtttgctaatttctcaagaattcagccttttttttcctcgtgagttttttgctcagtagctttagcttgatatgtggaattgttgcagaggttatgtggtatgagattttcagctaatggtaggttttaattacttgagctgagctagaatcatagaatgtagcaaatttggaattttttgctttcccttgcagatacatctttgtttgtttgactcaactcaatagagagaccttgtgtatatacaaaaggtagcttgacattatagtgtagtcaatcttgttggcctaagaaacaaattcgactatacattgtatcaatccctggcttcaagcacagaagaggcacaacaacaaaaacgcttatgagttctatggcttcttgttccctttttcagctaccgagcatttcttcctgtgtaacgttgctgctgttgttgtcctgttaaagcttggttttttcttgatgcagacttttctacacgtgctttgcggacagcttgttggatctgcttctcatgctctttaagcaaatcttcaagatttccaccaggaggcatcaatggtcctgagtaattgattctgtttttccttggtgcattgccctgatgacacagcccaaagcaacttaataattacataccaaaaggtttaaggtacacgatataacaagaggagagacttacggttgagtaatctctgttgggatctctcctataagattcaccagacaagtctcctgtttgagatgtcctagacttcatctctgcattagtttgtcttttgatgcttccacctccgttccattctgtatcagccactgttgggtgaaccattgaagaagcatgagctttaccattctgctggatccctcttcttggtggttctatcctaaacccggtgccaccttcctcgtctgttttgaatttgtggcttatgcatgtgactttggactgtcctgcagccataaactctggtgtctgggctgttttaagatcctttggccgtcctcttgtcacagtttctccccctcttctcttgttaccttctgcccttagtctgcaaacaaaactttcatcagaaaacccccaagagaaagactagtgaatgaagatgtatgtagctttactttcttgcttcttcgttgcgaagcttggcatcaagttccttgcttggtggatatctaggtaagtttgatggattcgcagggagtggctccgtggtgaagaactgaagagaagaaagattgaaactcatcatgagaaatgtatctaataacttgtttaagaaacatggatttctggttagtatcgatctattacttcgctcctcaaggtagaagcagccgatccccgtttttcaggttctattgccagtagcttattgatgagcatcagagctgatgaagggaaatggttaaaggtttcagcaagaacaggcttgtaaggatgactgggtttaaagcttgttgctagtggcagtgttgctcttctccagtaatcttccgagggtgaaccacagagcttaaagatcttgtgcatctgctccacctgataaacaaaaaaggataattatctcatcagctgtctataagaagtaagactctgagtctcagaatttgaatgaatgctgcgtcgaattataaagcctgagctcaaaaactgttcttaacaaactaaagaggtgttagagagttcattacttctgtgcgtcctggcataataggttttccggcgaagagctcagtgagaatgcagccggcgctccacaggtcaatggctggtccatactcagtggcaccgagcaacagctcaggtgctctgtaccataaggtcacaacacgactggtcagctgcagatctccatcacctcggtaaaaattcgccaatccgaaatcaccaatcttcaagacaccttcattattgattaagagatttgagcctttaatatcacggtgaagaattcctcgtctgtggcaatgttcaagcccacggaacaattgctgcatatagcacttgatctgaaaacgaagtaggactctttataaaacttgaattctccaatctttcaagtgcataggaaaacagaatatgtaatacctgaggttcagagaatttgattccaggagttgcagctagacctgcgagatcgtgttccatgtactcaaagacaaggtagaggctacctgagagtctagaggtaactagaccttctagcttcataacattggggtgatcaagcttacgaagaatgagaatctccctggccataaaccgaacactctctggatccatgttcacaaaccgaactttcttcatcgccacaatcttccccgtttcaaggtctctagctttgtacacgctgctgtaagtcccctgtccaatctttaacaatacacacaacataaattgttatttcaagatttttggaggatcacagatcatgactgtttagttgagagaaaacagagaagatgaactaactttgtctaacttctcaaaggactctgcgcagcgaggaacccatcctttaatggcctccccagcaacagaagccagccaagacggccattctgcagcagggagttccgttttattgctgatcacacgtgctggctgctgctgtgccggctgtgcaaccggtatagcggtgactcttcttgttggatttctggtcggagctcccacaacaacgaccggtttggtgctgtttcgatcagatgaagtggaaggacggcgtgccacaggataaccattagccacaatggtgatagaagctgaagaagtcgtacgtgtgaaagatccttccttcttggatgaagacgaagacgacgggggatgatgagggagaagttgaaggatggatttgctggaatctaatagatctttatcggtaacggcggcgcttggtgaacgggcggtggcacaaatacaacccattacaaaacaaaccaccgctcaaaactcctacttaatggaaaaaactttagtttttgccgatttgcttttatctatctatctctcattctctctactatgtcttaggtgatatggtcggcgaccaaaaactttcattttttgttgtctctctcacgtttttgtgagtttgttgtcatagaaaagtggaacgtgcgtaccactcaatggtctctttttcttctagaatcaagatttaaaattaaaacgatgaggatgatgaaggaatcggtcaacgacctttcactttcactaactgatttgtttttcttcccttcttaattgggtctcattggtttcacaaaatgggcttcattttatttgtaaagcccgacaatcttttatctggtgtcaactgtcaacataagtacgatgaagtctttgtaatgtccgtccataatcatgatttggtcgtgatttgttcccctatgtgtatgtacttgtggactttggatagtttttaaccgcattagctttttatgatatctctacaaaatgtgtaaatcatccttgagctatatgggtaagaatagttttttttttcctaatgagaaaagaagcctgagaaatgagagctcacgtgggggaaaaataaatgagaagtgtaaccaaaaaaaaaaaaaaagtaaacagatcctaaccctttgcacatcctatattaactgctaaaaacgtactcgtatagatcaaacgagatcgtcttcaagataatcatacacggagatactaagtttgtcctcctcctccatattcgccatggaagatctctcttcacaaccaccactcccagacacagcaccatggaatccggcgtccacggccatgccggcgtcggaagcagctttttggatggacttaggagatatattggaggcgagggaggttgtaagtaagtgagggaagttaaaagattcgtcgtcgagggaagatggtcggtgcaagcagtaaaaagcgacgtcgtgggctacggcagcgccttctgcggtggagaaagagcctaaccagagacgttgacgagttcccgggacacgaatctctgatacccattttccccatttccgacgacggatacctttgtacttgctctggtcagtttctccggtgtctcttgaatccatgtttttgggtggatgaagatgagattataagatcatgagggaaaatgttgcatataaatacgttgaagcggaataaagtcgtgtagatcaagtccgaataaattgaatgtatataaattgtacttttaaaattgggttatgagatgaataaacaaataatatatggtcaaagtatgaccgggggggttatgagatatggacatgtggctcgcactggttgacgttttctattttagttttagcttttgggttctttggaatattcgagtcgtgtttcaagtttcaacttgttgaggtttacatcaactaaatacccatttggataaacaaatgaattttccaacgtaatgagagtcatcatatcacctgatgatccatatcatcaatacgacttgattcaaaaagtctgatagaaaagaaaattaaaaaacacacaagtacacaacagtccatcacgacatcacgtgctgaaacttgaaaagaaaacatgagacttgcctctctctcttattttgtttggttaatttcatcaggcatgacgtcttcaaatagtcttaaacgggtgctcttcttgggcttataagtttgactaaagggcagaaaagttattttttgtcttgtctcgttttgcaatttgcacactgaaaacgaaaagggatatgagatttgtggtctcttctttgattggtggtactcaaatttaacacaaactaagattccgcacacggaatcactcacttttgagcaaccaaatttgaatgcaatgtactctctagtctctacaatgacctccctttcttcttttaataaaaaaattatggttaagaggtttatattatatgttatttttacatttaacatacattatctcataaacttaataatattttccaaattcttagagttaatttatttattaaaaaaaagattatgtatgcctatattgctaattgaacaaaaatcataaaatgaatagaaatgaatagaaatgaagactatatagtccaagtggcctagcatggttattgaaattttctctcgtttttgtttcacccaatcaaatatgaggtgttgtatgtcaaatacaaaagatagtgggaaagcttgaagattataatttgaactcaaggagaagaaagaatatctcgtataaggggtaaacacaaagaaagacagagcaaagccatctctatatactattacatggttttttttttttttgtttctcggcaaactgcacaaaggaggcaagcaaaaccagaccaacaaagatattacctctacttgaaagcatctgaagcagagtaaaggaagtccaagaaccctgttcctttcaatagacctttacctgtcaatagctcgaaatctaacagcagcaagaatcctatcactgccgccttcccgtttatcacttcgttcttcttcgtgaaaccaaatccttcagaaccctcgtccacaatcattctcacctgtgattcacaaaatttatcatcactcttttgtttttatcttcccagatgaaacaaattcacatgtataggtgttttacctcgtctacattgacgtttgttgctgtgagcccaggctgagcttttccactgaagacgatctcagcagctgcctctgttttcccgctgtctctaatgctgatatagatgttttcctcatcatatttgacagggtatacaaatagtttcctcagtgcaggtgtcaagactctgagaaccgggtttttcgggtaccattcccggatctctccagttctaagatcaaacgtactatccgtcgatggacacacaatgcaaccatcctgatataattgccaaaaagagatcactcaccatgagagaaaccaagagtacttcgagcaaaaactactattaaaaccaagaccctaatacattatagcaacagtttaaaaccataaccaatgtgatgaagcaactcaagctatgtgttgattaaggagctaaagatgtcttatgttataagcttggtttcctaaagctatcacactactcggtcaggcattttcacaaatacctttcatgctcgaaatttttccaaacgacgaaaaaagctcaaattataaaaagtacaaagacgaagaaaacctgagtgagcctagcgttgagaagtccttcgctataagctccttcagctggtgaacgattctcaattgcaaaaacatcgttcttataccaaagcaacaatatcgtctcatcgtcttgaataaccactcgccgttcacctttcggaagcgccgataacggcaccaccggcacccaattccttccaggtgtggatacagaagaagaagaagatacctccgtcgcctcgcatcttacgtttccaccacttctctgcttcgaattctggtccaatcggtaagtgagagctactcgacggttacggcggagatagagaggcagcgttctagctaatggcggtcctcggatgaatgatgaaggtcgcggagttgtgaaggagtaattacgggggagagatgaagatgcggtggtcgccattgacgagagtgagagaaagcgtaagagaatggagggaaatgcatttgaccacacaaaggagagagaagtggataacgaagaagaagaagaataatggtagccacactttttttatatgggcctctatttagccaacacgcctcacttcttcagatattttgtttggaaactagccccaatgggccttgtaaacagttgggccaatgtgggccttaggagaaaggctcataaattcagtaaccgacaagcaaatttggcatggagttgtcttcactcttcatcttcagagtctcgtactcttgttgcgttttttcgcgcgcattcttccgctttgctttgttgttccaatatctctctcttacctctgtttcgttattctcaatcatataggttctgctatgtatatactctcagctcttagggttcaaatgtgtatatagtatggttcagcaatcagcacaccacgtgttcgatgatatgcttcaatgaagttttctcaacttgtagtcttattctgctttgatctcaagtagagaagcatattttttgttgtggagctcgaatatggcgcgttgggcatggtgttgttagacagagtatatgccgtatattcttggaggtctcaccatagccgacattgtcaagtttattcccagattatggaaaaagtcgcagtcttgttccaagaactttccaaacccacattgaaccaatgctgagtgagagtcttttcaaatctcttggacatttggccagccacggtcatttgcacgacgctttcaaaacgttttctcttcttcgtcttcaatcttcttctgcagtttcagatgacctcgttttgcattccgcggcttcccttttatccgcttgcgttgatgttcgtgcatttttagcaggggtgcaagttcacgctcactgtatttcgtcgggtgtcgaatatcactctgtgttagtcccaaagctggttaccttttactctgctttcaatctccacaatgaagctcaatcgattattgagaactctgacattttgcatcccttaccttggaatgtgctcattgcttcgtatgccaagaacgagctttttgaggaggttattgctgcttacaagagaatggtgagcaagggaatccgacccgatgccttcacttatccgtctgttcttaaggcttgtggtgaaacacttgacgttgcctttggaagggtggttcatggttccatcgaggttagctcttacaagtccagcttgtatgtttgtaatgcattgatctctatgtataaaaggtttagaaatatgggtattgctcggaggttgtttgatcgaatgtttgaaagggatgctgtctcatggaatgcagtgataaactgttatgcttcggaaggcatgtggagtgaagcgtttgagcttttcgataaaatgtggttttcaggtgttgaggtcagtgtcataacttggaatattatttctggaggttgtttgcaaacaggaaattatgtaggagctttgggtttgatctctaggatgagaaattttcctacgagcttagatcctgtggctatgattattggtttgaaggcttgctctctcataggagcaatacgattgggaaaagagattcacggtcttgctattcacagttcttatgatgggattgacaatgttcgaaacacgttgatcacaatgtactcaaaatgcaaagaccttaggcacgccttaatagtgtttcgacagactgaagaaaatagtttgtgtacttggaactctatcatttccggttatgcgcagctgaacaaatcagaagaagcctctcacctgctgagggagatgttggttgctggctttcagccaaattccattacactagcaagcattctccctctttgtgctcggattgcaaacctgcaacatggaaaagagtttcattgctacatcctgaggcgcaagtgcttcaaggactatacaatgctgtggaactcccttgttgatgtttatgcaaaatcgggaaagattgtagctgcaaagcaagtatctgatttgatgagcaaaagagacgaagtaacatacacttccttgatagatggatacggaaatcaaggtgaagggggagtagccttggccctgttcaaggagatgaccagatctggtattaaacctgaccatgtaaccgtggttgcagttctatcagcctgcagtcattccaagttagtccatgaaggtgaaaggctgtttatgaagatgcagtgtgagtatggtatacgtccttgtcttcaacatttttcttgtatggttgatctctatggcagagcaggtttcctagcaaaagccaaagacataattcacaatatgccatataagccatccggtgccacgtgggctaccctactgaacgcgtgtcacatccatgggaacacacagattggtaaatgggcagcagaaaagctcctggagatgaagccagagaacccgggatactacgtgttaattgcaaatatgtatgcagctgctggttcttggagcaagcttgctgaagtgaggactataatgagggacttgggtgtgaaaaaggatcctggctgtgcttggatcgacacagattctggattttcactgttttcggtgggggacacatcaagccctgaagcatgtaatacttatcctctattagatggactgaatcagctgatgaaagacaatgctggttatgccatcaataaggtgcaaagttcagatgaagaacttcttcaagaaatgggatgaaggtgaagagctgaggatgatcaactggagctttatttagttaatagcacatagtctatatacgcctgcatatcaccagactgagaacaagttggatacacatgacaagttctagtatatacattaactaaaattggacaatggtggggattgctgcggaagtatttttcctatataacacaaagaaaacttatattgtgagctgattcacttcatcgagcaagagctttgtaatgccatcagaattggtcggccagttgaggaaatttctgcagcagccaggtaactccctttatagcagcctgaatacacaaaatgcaaaagctgttaaatcttcattacctctgcaatttcaaacacatccacacaatcaaaattgatagtagctcatgttaccagaactgtttctccaggtttgattgcaggctcaacgcagtctcttccatatctgcaaacaaaacagagaagaaatgtttatcccagcaagacaaaaattggcatctctgtcagtctacacgatctgtcgagaaaagtgtgcttacacgatctgtctcttcccatcaatcacctctaaccggtaaaagctgcaacctttgctaaatgggaagttctttcctttccattctgtcaaaaatctccaatttacgacttatcattagagaaacatagacgactaaatcataaagagtctgttaaaaactaacctaaatgccatgaaactccaacagctgaagagtcttctgttgagatatcatctatcacgaattggagatccgtacttgttgattcaatgaattttccgaagaaatcaagaattgcctgtcatggctttatcaaaattaggctctgagacacaacaaagtctgaaaagaagagactttggtttattagaataataatcgtttcacctttcggccaacaaagggagatgagaagacgagatcctcgtagacgcagtcctgagcgatgaggtctgtgacagaggataaatcatggacgttaacggcggcgtagaagctggagacgacctccgacgctgatgtcggagctgtttctggaacaacgtcgttggctgtagcagcttttgcagctggaccataggatgcggacaatctcggaggctgtgaatgagtgaggcttgttggcttgacaagtttggttgggaggaagaaggaaggaggaagatggttgagcgagacgagtgagggagacgtcaaataagagacgagagaagcagtgaagctcatcgtcgtttcttgatatgatgtcttcgtttttgtggctcatttgtgtttgtgattaagagagcaaagagttgaattttgaatttcaattggaatttgtggacagaaattcttattagtagtccctatgattatcgatgccatgtggatactgtaacaatcaatagaagtatactccaatcctctttcctattaattgatgatttttctatcatcatttcatcttatttgtttgtgaaatgatacttttaatttagttgtgaaatgagattttataatttttcgaaatataagactaggtaatgcgtagcagaacagaaaagtaaagaaaaatatgtgttggtggataaaaagttgaattgtttttcataatttttagatcaatgatatattttcagtaaattcttgttcatcggttctcaaatctacataaagagagaagctaagcaaacatttaaccctattttttagattttgttttttcactcctgaacatataatgaataaagagatggttatgaaagacgtttataataatctttaaaaaaagagaaaaaaatcgaatccttcataaatcttttacattcatagatggaacacaataattataacataaataaaaacgagaaaatcaaactcaagccatgcacgtcactatcgaaaagttctcacaaaaacaacaactccaaaacatcagccatgaagcgatatttgttgatgagatgctctatctccttgataaacaaaacctcacatttttcattcaattctttggccttattatctccaataagcttacctttctccaaaatatactcttcagaaataaattctttgaccatctccttacttaaaaacatcttcaaagatggataccgagcccaaaactcatctttaataccattagcctcagtttctgtaacaactattgacataagatttttttttaagaaagtattaaagatacgatacaaaaactatcttaatcacttttaagatttttatatcaacgtaataatcttgaaacctcacagtcaaacagaacatgaacatgcaaagtatttcttaacaaacgctccaacttctttacagtggaaacatgtgaaatggtgaagtgaaaaatctgaaataaaatagagagtgatgcatgcatgtacctccattgttgttttcagagtctgatggttcgtcttccattgagtcgtcgtcttccgatgagttggaaacttgggagtcgctgagttcttcttcggatgattcaggtttaggtggagagttgatcgtaaccggcaccatcgtcgttaagattaagttcgaagagactagataaagtttctaaagagagagatagaatcggacaaacaaagagtcgatatgtgaacaagtagaaacatgatgtttatttatacagtatcgtcgggaaaacgaagagtcaattactttatttaactgaatatttttagtgacaaaaatatgaaacgttttttttgtaacttgtccaagttgacatgaattgtttttaaacgaggaagattgaagcaaccaccaaaataaaagccaataaattctaaatacatgctttttttaaaaacgaaaccgtgtgtgaactgatgggctacaattgttttgggggccctaagcccatatttcaattttctggcccaaatattagctttcaatttcaattgcatactttataaaaatagtttaaagctacatataaatactaacgacctttagcttaatcaagtggttagtggtcacaatggaagtagtgtcgtctctcggaatccgagacctcccggcgtccctctccgtgacgacgagtctcaaccaccgtcctcatcgttccgataaagatggcgctccggcgaaatctccgattagaccaagcagaactagacgaccttccacttctcccgccaaaaagccgaaaccttttagggaaagagatgctttcccttcttctcttcctctccactccaagaacccctacattatccacagagatattcaaatttttgcgaggcagaacaatctcgaagtcgctctcacgattcttgattatctcgaacagagagggattcctgtaaatgcgacaactttctctgctcttttagaggcgtgtgttcgccggaagtcgttgcttcacggtaaacaagtccatgttcatatacgtattaatgggttggagagtaatgagtttctaaggaccaagcttgttcatatgtatactgcttgtggttcggttaaagatgcacagaaggtgttcgatgaaagtactagctcaaatgtttactcttggaatgcgttgcttagagggactgttatatcagggaagaagcggtatcaagatgttctttctacgtttacagaaatgagagagcttggtgttgatttgaatgtttatagtttatctaatgtgtttaagagttttgctggtgcatctgctttgagacagggattgaagacgcatgcacttgcgattaagaatggtttgtttaatagtgtctttcttaagacttctcttgttgatatgtattttaagtgtggtaaagtagggcttgcacgtcgagtttttgatgagattgtagagagagatatagttgtttggggggcgatgattgctggattggctcacaataaaaggcagtgggaagcgttgggactgtttaggacgatgattagtgaagaaaagatatatccaaactcagttatacttacaacgattcttcccgtacttggggatgttaaggcactgaaactggggaaggaggtccatgcccatgtattgaaatcgaagaattacgtggaacagccgtttgttcactctggtttgattgatttatactgcaagtgtggggatatggcttctgggagacgtgtgttctatggatccaaacagaggaatgccatatcttggactgcattgatgtctggatacgcagccaacggtagatttgatcaagctttgaggtcgattgtttggatgcagcaggaaggttttaggccagatgttgttacaattgctactgttcttcctgtttgcgcagagctgagggctataaagcaaggaaaggagattcattgttatgctttaaagaatctcttcttgccgaatgtatccctggtcacttccttgatggtgatgtactcaaagtgcggtgttccagagtatcctatcagactgtttgacaggttggaacaaaggaatgtgaaagcatggaccgctatgattgactgctatgtggaaaattgtgatttaagagcagggattgaggtattcagattgatgctgttatcaaaacacaggccagattctgttacgatgggtagggttttgactgtttgcagtgatctcaaagcattaaagttggggaaagagcttcatgggcacattctgaaaaaggaatttgagtcgatcccatttgtttctgcaagaatcatcaagatgtatggaaaatgtggagatctcagaagtgctaatttctctttcgatgctgttgctgtcaagggctctctgacatggaccgccattatagaggcttatggatgcaatgaactcttcagggatgcaataaactgttttgagcaaatggtatcaagagggtttactcccaacaccttcacatttacagcagttttatctatttgcagtcaagccggatttgttgatgaagcttatcgcttcttcaacttgatgctccggatgtacaatttgcagccatcagaagagcattattcactggtcattgaacttctcaatcggtgtggtcgtgttgaagaggcacaaagacttgcggtcatgagttcctcgtcatccctacagacctgactgcagattcagacatcttctttgctttttctcaaagccaccaagtaagttgctcgaagagttatgagaagtatattctgttctcttgtttccaagaacttgcattaatagtgctgtatatactgaatttggttccagaatgattgaattttgttcaacttgtaaaaatcttgcagtatcaaatgtagagttttcttaagattagttaagggaagaaagtcaagagagaacacaagtctagtaagaataaaatatcttatagctttcaggaaaccattcaatattatatcaaatcaaatacatcaatgaggtaacaaacaattgtaaaaaataataataagtcacacctcataatctatgtttctactagtaacaaaaaaatttaaaaatatttgtgaagaggtcctttcagggacccatcaagctcatagagtctttccctccaaaatctgatgagctttattctttgctataacgtcagaatcaacaacccttgtggtagactctgaaaactaaacttcaataaatttaagtattctaagccagtaacttatgctggtattgtaagattgagctgtagaagctctccatgagttaggttttggggttaagggtcccaaagaaagtcactctggtatgtttcccaagcattcatctccacatcattagcaaactccatagggtcgtatgttgaatgcatcattgtagtaggagatcccaaagttgactcgttgatcgcttgaatttccctgggcgagagtctgaccattgttggagctacattggaggagcttgagctgtccacttgcatggctgactctgttccttcggtggtgcggcagagtgttgcctcatgaactgccatgcgaatgctgtctgagctagagtctgcaggacgtggaaggctgctggcgagctcagggaagttgagacgagcttctctccctctgaaatgaaatgctgccacgtcgtatgcggttgcagccatttcaggagtctcgaaactgcctagccagatacggttcttggtccccggttcacggatttcagacacccatttcccccattttctcttccggactcctctgtaggcagatggtacacctttgccatcgttttgcgctttgtcgctgttaccggaattcctaagaccagccatgaacacacacacacacgcacacaaagtttttgctcaagagtgtttgttgtttttgtattttgtattttgtctgtttggattttgatgttggaatgtttgtaactgtcagcacttatttataggtgtggattagtatcttaacagcagataaactcctgtgtactcgttttaaaatctcaaagcctccaaagttagcttcgaggaaacttcaaaattgttatgggcctttgtgggtgtaacaagtgttatctatttagtatcaatgcactgtagattccctcaaatagtaatatgagtaaactaatgagaggttttaggaaagaggcagaatattaaggttttgttttaagagattggatttgctatagtagacgcggttttcttgcatcatctatgggacccttttgtgatccattccataactttgtgatgctaagagttggtgcaaaagtgggatttatcctaaaacaaatgtcaaagctcattgggtcataataatcttccttttcttgagtcaattgatcaattaaaacattggtcgtaatataaaaaaacattggtaataatttattttactaatcaagcttactaattctaagacattttggttgcttcaaggatgaaattttgatccctagcatctatctacaagatatgcccttaatcattaggctaccacatttgattgattaccacatttgaattttattgatagttcttttgtgtgatcaatatatatgagttaaaaaaaaaaatctaactatgtgtagctttatttagtctgattttattttttagattttagattccattatatagtcatagattgtggcaaatatctctctctctttttttttaataaagaagtaaacaaaatatctcttaagctttggaattatgcatttttgttatcaatgaagtttttttttagtcggacattatcactgaagttagacaactagatgctcttagactgctttagttgactcaacacatacgataataaatgatcatttaatgttcaatctttttttttaattgattgtgcgcctcgataaattatttttaaatttcgttcctactaaaacatgacattcttaattctttgaatataatgttttgtctaattctcatatatgatattttttaaaatattatggtttgctatttgattatatatatatatatatatatgtctatatatatacaaatattatcagtgataatattttagatagtttcccatgtatctaaatatctaatatatattgtttcatcttaacacgtttagaaaatgagttatatacgttgggtagttgcttgcgtagtgttttattttttaaaacagttgttgcaaccatttgagatatatcggcctatgctttaaaacaaatattacatttctttgcatcacggtcttttaagtaagacggtttagacaattttttgttttgttttgagtaatagaacgaacgtgtataaaatcacatctctgtctgctttgcatgagtgtcggagggaagagtcttggtttgaaaaggatagctttttgttttctctggcggaaaagacagaagatataaagttaacttgaaatgagacagaaatagaggaatttgaataacaaaaaaacaaacaaacagaaactaatgctgtgtaaacatgtgtcattgattatatatgagtttagaaagttagaagctagaagaaaacaaaagtttctttagaccaccgacttcatttttcttatatttctgatttgataaaagctctttagtatatagttcgtacttgtaaataactcaacgtaacaatgggacgaaaaaataattcaaatttgattggttcttcttcttctttcccttttgttgtttgttttctactcagcgtaagcactaaacatgggtcttacgcgttgaggaaaacaatgaaacgagctccaaaatttctcctccttagaaaagatccaatgatgtatgctttgatatattaacatatacctttatattttcatatatttggttgtatcaagaactaaagctaattaacaaaaaaaaggaactaaacccttttttatttaaatttagaaggaccaaatatatgaaaagattatgtcatactcaaattcaggttttggagaattaaattctatttgaaagattttatttagttaaaatactaaattaaacaaaagaagtgtggttctcacttctcaacaatggaagatgtccattgggcttcgtaaagatgaacattgagagaaagagatatgtgtgcgtgcgtgaattcgaattggtggtgaattgcaagctggattcctaattagagaggattttttgtactaatggtgtgttgcagctggattcctattttgaggacttaagtgtctattatcatcaaaaaaaaaaaaaaaagtcttaattattagtttaatccaaaacttaagtacactcctttcgtccgaacatagccaaaacaaaagttgccactttaagttcctttgaccactgtcggcacgagaatcgtttgacttctttctcatatgggctttaaattagcccatctctataattttacttttgttgagggttttataagcccattaagtttcggcccactcttgacgttaatctgacgtcagcttgatttttccggcggatttctcaaatcgacaaattcgttttcatcggttgtttcagacgtaatttccaaaaatgaaggctgagtctagcaacgagtctttcataatcgggcagcgagtccactctctcaacgattcgcgtcgtgtgggcaccgtgaaatacgtcggagatgtggagggatactccggaacttggatcggcgttgattgggatcaagacggtgatggaaaacataacggttccgtcaatggcgttttctactttaacggtcgttctcagagctcagcttcatttgttcgttcccagaatcttagtcgcggtatcacattgcttcaagctttggagcttagatacagaacaatttcaactaaggacgaagaaggtcttgaaagagaatgttatattttagtttcagtgagtttttggaatttgaaataatgaatcttcttctttgtttttgttagatgaaatgtatgttctctctgctgggaatagacgtgtttcgattcagcttttaggaggggataagatccaggataagttaagtcggttcgaggagcttacgagtgcttctctttcgtatcttggtgttagttctcttggagtttcatctgatttgggttcaattctaccaagtaagtttgatctagtttcagctctgccattgtcaaagataatcgtgtgactctttctttctcacgacctttagatgagcgtgttgtgatgttatttggttcctctgttacagatttgaagctgctggacttaactggaaacttgatttctgactgggaggtatgagtcgttactgttttatctatcatcaactaatgtgttagagtttatgattgatcttttgttcttttggctttcaggagattggtgctctttgtgaacagttaccagcacttacaacccttaatttgtcttgcaattctttgtcaagtgatatcaagtctctgccacagttaaaaaatatccgtgttttggttctgaataatagtggtctgagctggactcaggtgatatgtgactcttttactatttttttttttgcttatgaactagttgagcattattgcagtttttgacttttatggttcttaccgtcctggagcaggttgaaattcttaggcgctcgttacctggaattgaggagttgcatctgatggggaacatgatatctaccataacagtaatgttttattttgtagcttcaatggttactctgttgctccaagtaggatatagtctgaaaacgcttggaaatcggtttggtctctttgaagacgatacttgaattacgctcattctaacacttcttttgctttaaaaacttgggtatttagcttgcaaattgtgaactccctttttccccctggttggttcttgcagtccacgtcctcatcagatgatcaagcatttaactctctgcggctactgaacttggatgataattgtatttccgattggagtgaagtattaaagctatctcaacttccatggtcagtaatacttttttttttcctttctactcatagttgatggacctgtaaatatacattgcaccgttaattctttctaaaaattgataatctaaacgttgtttctcagcttggagcagctttacctgaataagaataagctttcacgcatctttcagtctgtaaatggcactgaatcatcagagaaaggcagcgacccatttcctagtctgagttgtcttcttctaggtaatctcctcaagtgtagtgtcctcctctcttgaaatttggccatttattctgtccattgtatttctcaggagccaacaacattggcgatttggcctcagtagacgcactgaatgggtttcctcagttagtggtactgatcttttgttctgtaatactctaatagatcagtcatgatacttgttatagaggcataagcattaattatttaatagccaggtagacttttaaatatgtactttaattgaccttccctcgtcaagtaataggacatcaggctttcggaaaacccaatatctgatcctgtaagaggtggtgtcccaagatttgttctcgttgcaaggttgacaaaagtacaagtgctgaatgggagtgaggtagaacaagtgccttaaaaaatgtttaacatactgttacctttcattcatctgactctactgggttattcttttcaggtaagagctcgtgagaagaaggattctgagatccggtaaatcgtcaatgcctcatcttggtcaatcttgttgtttggttcagcgtcagtactatgcttagtttctttggatggtcgcaggtatgtccgaatggtgatgtcaaagttaaatgacaagtctggggagattgagctgctccaccctaggtacattttgcaaaactatattttcttcaatcaattcttcccaaacaaaacagtaaagggttctattttggttttcaaaccctattttcttctttcaatgaaagtatctaccagatgaaagtgatataagaaaaagttagccgtgcttgtgatatttcagattttatgaactcaagaaacttcatggaattgaggacgaaagagcatcagctgagaacagcggccctaagaatatagcatctggacttatctgtatgactcgttaagcgtatcttacttaaggttcattgattgtatagaacctgcttttaaatcacaatgacatgtgcagccattactctcaaatgcgttggtccatcaatgggtgaaaaacctcacttgacaaagaagttaccgggcagtatcacggttgtcactacttttttcttttgtattgagaatccgaagtctaaaactcggaaaatatgtaccgttttattgaaagttttcgattggtgtttgtaacaggttggaaagctgaagatcttatctgagaactttttcaagctcaagtccatcaagccaagattatttctgcaggaagaggtatcttttcctaataatcattaacttgaaagaaaacgtttcgagtttcgactatatatgtatgttgtatcgcttatcttcatcatatcaacgaaacaatcttatatttccgtggcagggctcaccttttccgacagcactcgatgacgagactgcaacattacttgacgttggaatctgcgacggctccacacttcttgttgacgaagagagttaagttaaggtcatcacatactacacactcttcagaatttaaactcgatttattttatggattgtcactgtgaacattaatagtttatccatcttttgcaagtaacttgaacccacgtaaaaacattaatagttccagaaccatcatcatcattgcaaaagtttcatacaaagttaaaaaaaaattgaaattgagaagagacaacatgttttattttatgagagctcaatgatcttggatcgttttctgctacattctgcactcttactctcctctccttcactttcgctatcactctcatcatcgctgctcgaatctccactttcagcggccggaccaatgccggcaatagcagcttcagccgcactgactgcttcaggcgtgttgagatcagcgacaccgagcatcaagtccatctcgataagttcagattcgttacccgttagtgcttcgatattataagcttctgggtttgcctcagactttttgttagcctccgccataacccccaagaagcctttaagtttaccaagaagttggcttttaggaactggagcaatcgttggcttcgatggaggaggagcctccatcttcttcttcttcttattcttatccgtacacatcaaaagtgctgaatccatagcagaggaagaagatggattcttgagctccaatttcaggagatctttgcagttttctttcccttccatgatttttctttggtgaaatcagtgagaattatggagaagaagacgaactatgagcttgacctagaaaaagagtttgcgtcggtggagcttgaagtcgccgctatcgctttagggtttcggttctgacattcaatttataattcccaaattatgaatttattaagtatcgaaaatattttacataacgtatatggaaattgtactaactacaaaatagtaacttccgctctttaaccgcttgttaaaccgacagctttgatttaccctacccggttggttcctcaaccgaatcgcagaagatctatcttgatcaagcagcaatacccggtttactttacctcttaacttttttatcttaccatctcttaaggaaaaacagaggatttagggacaataaagtagacacaattccgattagtttagttacaaaaggcgtttctgtcagacgaaacagttggttacttaatttgtcttcataaacaaggtaatgaatttcgagcgtcgatgattacaagcttatctcaaatctcttttgggacattgaggcgctttggctcttctgttttaccttctgcactgaaacgcgaatttgttgaaggattgcgtacgttagtaaggtctggtgatatccgtcgagctgtttccttattctattctgcgccggtcgagcttcagtctcaacaggcttacgcagctctgttccaagcatgtgcagagcaacgcaatctcctcgatggaatcaacttgcaccaccacatgctctcacatccctattgttattcacagaacgttatacttgctaatttcctcattaatatgtatgccaaatgtgggaatatcttatacgcacgacaggtgtttgatacaatgcctgagaggaatgttgtttcatggactgcattgatcacaggctatgtacaggctgggaatgagcaagagggattctgtcttttctcgtctatgttatcccattgtttccctaacgagtttacgctgtcaagcgtgttaacttcatgtcgatatgagcctggaaagcaggtacatggacttgctctgaaacttggtttacattgttcgatctatgtggcgaatgcagttatctctatgtacggtaggtgtcatgatggtgccgcagcatatgaagcttggactgtgtttgaagccataaagtttaagaatttggttacttggaactcaatgattgctgcttttcagtgctgcaatcttgggaaaaaggccattggcgtttttatgcggatgcatagtgatggagtgggatttgatcgtgccacgttgcttaatatatgttcttccttgtacaaaagctctgacttagttcctaatgaggtttcaaagtgttgtcttcaactgcattctctgactgtaaaatccgggttggtgactcagactgaagtggctactgcattgattaaagtttattcagaaatgttagaagactatactgactgctacaagctttttatggaaatgagtcactgcagggacattgttgcttggaatgggattataacagcgtttgcagtgtatgatccggagagagctattcatctctttggtcagttacgtcaggagaagctaagccctgactggtatactttctcaagtgtactaaaagcttgtgcaggacttgtcactgctcgccatgctttgtctatacacgctcaagtgatcaagggtggttttttggctgacacggtgctgaacaactcattaatccatgcgtatgccaagtgtggctctcttgacttgtgtatgcgtgtatttgacgatatggattcgcgggatgttgtttcctggaactcaatgctcaaggcttactcattacatggccaagtagactcaattctaccagtctttcagaaaatggacatcaaccccgattcagcgactttcatagcccttctctcggcttgcagccacgcaggacgagtagaagaaggattgagaatattcagatccatgtttgagaaacctgaaactcttcctcagctaaatcactacgcttgtgtgatcgatatgctaagccgagctgagcgttttgctgaggcagaagaggttatcaagcagatgccaatggacccagatgctgtagtttggattgcattattgggatcatgtagaaagcacggtaacacccggttgggtaagttagcggcagataaacttaaagagctagtcgaacccacaaactcaatgagttacatccagatgtcaaacatatacaacgcagaaggtagctttaacgaagccaatcttagcataaaggagatggaaacatggagagtacggaaagaaccagacttaagctggacagagataggaaacaaggttcacgaattcgcatcgggaggaagacaccgtccggacaaggaagccgtatacagagaattgaagagactgattagttggttaaaggagatgggttacgttccagaaatgaggtcagcttcacaagatatagaagacgaagaacaggaggaagataatttattacatcacagcgagaaacttgcgttagcgtttgcggttatggagggaagaaaatcgagtgattgtggtgtgaatttgatacagattatgaagaacacaaggatctgtattgattgccataacttcatgaaattagcttctaagcttttgggaaaagagattcttatgagagactcgaatcggtttcaccatttcaaagattcttcttgctcctgtaatgactactggtaattttctatgttactttcatcacaagacaaagacaaggactgatttggcaaataaataaaagtataagaaaatgtgttaattaagggaaaaaaagaaaaaaaggaaaaaaaacaagttgcagaaagagagagaggtgggggaagaagacgatcttcgatccagagttgagcttctcttctgccatcgtcttcttcctcgatctcggtcaattacgcattctctgatctgatttgtgagatctctcgtcggatcaccgttttttacatcgtcgccgacaacacttaggagtaattggatccagcagaaatgtcgataaacatgaaaacatttactcaagctctagctagaacggctgctgtgattgagaagacggttcataccacagtacaggaagttacgggaccaaaggctcttcaggattacgagctacttgatcagatcggttccgctggtcctggtctagcttggaagctatacgcagctaaggcgcgtgattccacgaggccacagcagtacccgacggtctgtgtatggatgcttgataagcgtgctttgtcggaggctcgtgtacgagcgaatttgtctaaggcagctgaagatgcgtttcttgatctgattcgagctgatgcggggaagctggtgaggttgaggcatcctggtgtggttcatgtggtgcaagcgcttgatgagaataagaatgctatggctttagttacggagccgctttttgcttctgtggctaatgcgcttggtaatgttgagaatgtgggtaatgtgccgaaagatctgaaatcaatggtaacatatataatgttgttgctgtgattaaaactcaatttaaggttgaccttggattttattaaattgattgtttaaaatttgatcaggagatgagcttgttggaggtgaagcatggtctgctccagatttctgagacactgaacttcttacacaataacgcaaatctcatccatcgagccatttctccagaggtttctttagtcttacttctcttcttagaggttgtgtttatatgttttattaacatgtggagttgtgatttccctgcagaatgttcttattacttcagctggttcttggaagcttgccgggtttggttttgctatttcagcagcacaggctgggaatttggataacatgcaatcgttccactattctgtgcgtttattaaacttgaaatattatttgactgttgtatatctgatgtattcaactctacaagcgagatgatttcttgggtatgactatgcaggaatacgacgtcgaggattcaatactgccagtccagccatctctaaattacactgcacctgaactgatgcgcagcaaaagtccttcagctggagcttcgtcggacatttttagttttggatgccttgcctatcatttagttgctcggaaaccgttgtttgactgcaataataatgtcaagatggtaaactctaaaatccgagcttgttagttttgatattcagatagatgctgtcagatacgttttctctcaggcttgatgtcattggagtagttttaattattcagagtatcctttggatttcccatggttggtaatgtttaacttgaatttttttgcagtacatgaacacgttgaactatataacaaatgaatctttctcatctataccctcggaattggtatctgatttgcaaaggatgctatcaacgaacgagtcctttagaccaacagcattagatttcacaggtaagtggagataactttgacgaggtttccttctttcttgtggcaaattttctctttttcttgttagttacatctttaacttgaactctgactctgtaggatcgaattttttccgaagtgacgctaggttacgtgctctccgcttccttgatcatttgcttgtacgtgtatatgcttccaataattgtttcagacagactgttcttagaagtcttagatgatggaaaatgtatctccacatttgataaccttttcggaacaattttctctttatccaggaaagagataacatgcaaaagtccgagttcttaaaagcattatcagatatgtggaaagattttgattcccgtgtattacggtataaggtagtcactttactgacttatcttgtgtcttgataaaaaaaaagatttgatgctcaaatgatatgtctagcaacaactaagcaaaccatgttttatcatgcaggtgcttccacctctttgtgcggaacttaggaatttagttttgcaaccaataatcttgccaatggttctaactatagcacagtctcaggtaatcttaagtgataacgaaaactaattttatcttgaaaccactgactgaatgaatgcttgaaagttgaaacctaaaattacctttgcaggatagaactgactttgagctgataacacttccggctcttgttcctgttctgagtactgcttcaggagatacattactgctgcttgtgaaacatgcagatcttattactaacaaggtaaagttgatcaattctatacaatactggcttatgtttttcttaccctgcacttgtttgtttctgcttaagttcttctgattggacatagtatgatggaatgaaggatgtatgtgtacaatatggttcactttaacaacacatcaactcgatattatagtcttttgtgctgtcataacctgatacatgcagatatagtcagatacatatttggttgtaaggttccacgttgaagatacacagactgttatttgtttctggatccagttgtacattgaaatcaatatcttttttctaatgcatatagggtgagatccttactcggcttacgtttatgtcaaacttttcagactgatagtgagcatcttgtatcgcacgtcctccctttgcttctgcgagcctacaatgataacgatgtccgcattcaggaggaagttcttaaaagatccacatctgtggctaagcaactcgatggtcaggtgatgctcaatgctttgttttaatgttttattggaataatatgtttttctccgagaagagtagaatcaatttttgatgtatggctctgtggtattgcagagtagtgtcggttaattatgctggatgagttcttctaattatcattttttccccgtctttctttatttaggttgtgaggcaagcaattttgcctcgtgttcatggcttggctctcaaaactacagttgctgcggtatgttatgctttgttagattatctcagctcgagttgcttctaataccagtgtctttaatagcttgagaaagaaagagaaaatgaacataactgatcccagcttcttataaataattgactggaatgtacttgttgcgcaggtcagagtaaatgctttgctctgcttagctgagttggtgcaaacgcttgataagcctgccgctatcgaaattctggaaacaattcaacggtgtactgccgtagatcgttctgcaccaaccctaatgtgtacccttgctgtggcaaacgcaatcctcaaacaggtaggattcaggtcaaattttctccttaatgtttgaaatttgaatgtcttgacttcccctcgttttgatatgtggtatcgttgtatctcattatctgcatttttcatcattgttttctagtatggagttgaattcacagcagaacatgtgcttaccctgatgatgccgcttctcactgcccaacaactgaacgtccaacagtttgccaaatatatgctatttgtcaaggatattctcaggtgtgcatcttgttatcagtcagtacttttgaatagtgttttcacgtccgtaccacaacagtgttgttgtctttattgtgatttgtattcatctattgtaacaggaaaatagaggaaaaaagaggagtaacagtgaacgattccggagtcccagaggtgaaaccgcattctgctgccaatggactccagtttcagtcatcaacccaaatacctgagaaggttgcttctgcagccaagagcagtcctgcatgggatgaagattggggctccccgagcaaagattctgctgtgggaaatcctgcttcttctcgtcataacacaaacgatcagtttaacaaatccacagatcagtcacagccatcgatcatgtctactctgcccaacaagacaacagcgccaacaacatgccctgcagtggacatcgagtggcctccaaggcaatcttcaagcctcactgctccagcaactgataatcagacacaactaaacacaggaacatcatttgcttcgggtttcgatgagttagatccgtttgctaattggcctccacgtcccaacaatggtgcttctgttgcttctactggtctcaagaatggcgctgcatccaattttagcaacaatttaccaggcggcacccattttcagacagctaacaatgacaactgggcattcagcagtgcctccttgtcttcgctaaaaccaccccagcaagggaatcaaggtatctctgcaaataatcaagatccactcaactctttcggtgtaccaaaacagagccaaggaatgccatctttcaccagtggttcatacaacaaccagaagccagcagacatcagttccatattcggttcaagcaaaaccgaaccgtccgcaatgaaactcgcaccaccaccttcaatagcaatgggaagaggaaggggtagaggtagaggtggtactggcacatctacctcaaagcccagtggttcacaaccatctctattggatctattatgaccacagttcttggtgttgaacctcttggtgtggtgttggtgttttgtcgtgtgattaagagaagcatatacacatggagattgcgctccgtgctttgtgatgcagagaaaactgttcagaaaaatggagatgttatgtaaacatcttctgggattagcttcttccactatataaactttactacagcttcaggttgttttatgtctttctcaaattgtacaaattttgttatgttttctcaccattgcttcatttgtcacacataatattattttacggcggctacgctattttcatgtatactttttcttcttttggcagttcctggatcattttctgttggtaagttggccgtaccaccgagtgactgttctagtgttccaaccacgtccgacattacatgtggacctctgatactaaaatatgccatgaatggattctcagtttctcactatttgtacagtcatgatcgtaagtaaagtccactacatctatatatgactaccaccaaagacgtttattacataaatagaaaatacaaacgagtcttttggagtacacagttgacaaattcagtataaacacgaacaagacgttacacaacatttgcttcacaaacgcttaaagagaacacttcacacttgtaagggctttgtgttgttttctaccaaacttttctgtgaaccactcatgattgtgtgaagtgtagaaatgtccgatcaccaatccacataacacgccaggtccataggctattgcagctgctacccagttgaacatgttttcctcagcctctgacaagtcctcgggtagctgcgatgtaggattcaaggcaccagtatccctacaaatatcttcgagaccgtagagtccagggttgtccaagaatgaagaacatttctgcctttgaaactgtgtgcctcgtggcactggaccttggagaaggttatgggagaagttcatgtatgacagaaaagagagtgcagcaagatcttgagggatttgacctgacagcttattacgggatatgtctaatgtctccagctttgtcaaattcgccaagaatcgtgggatgacgcttgtgaatgcgttacctgacaagttgagaacccgcagttctttcaaatagccaagggattcagggatattaccattgattttgtttccagaaaaatcaatggctctgaagtctcttcggatccgctcaaagctcatatcaactcctttattcaccatttccatctcatggtaatagctatcagcatatctccaaaactctgtcatgtactggtccatttcttctgttaatgtggtcatgtctttccagttggaaaaatagtaaggtgggagagttccactgaagttattgtgtgatatatcgatgatccttaaactctgaaacccaatagatgcatgtcgatgatacaacggcccatagaacttgtttgatctgaggttgagaacatgtaatgacggtagagattccaaccatgatggaaatatatccttgattttgttgctttccacattcacaagttccaaagctttgcaattgatcaaagactttggaaactttccctccagctggttgtgactaacgtctaatgataccaactcggtagctttggaaaatatatctggaagagttccactgaagttgttgtcccccaaatttagctctttaatagaaccactgaagttccttatacatgaaggaatcgagccgctgaagagattgttggacaaatctagaaagcctaacgaactaagcttgcagatcatataaggaattggtccttggaatgaatttgaattcaaatccaactcttcgatcagtgcttcctcttgtgaagtgttttcaaaactgctgaaagaattgtgagaaagcaccattgtattcaatctccataagcaagctggtacttcaccttccaaattgttcttggaaagatcaagatgaaggaggttgactagctttgatatagttggagggattgccccagtaaagttgttgtggctgatatctagctcttcaaggttgagaagtctagatatagattccgggattgggccatggagtctgttacgaccaaggattaggtcctgaagcttagttgatgaagatgtatttgcaaactctataggtcccgtaaattggttttcttgcagataaatagattctaaggaaggaatcaataacagagatttaggaaaaggcccgctaaatgagttataagaaacatcaaagtactccaagttgtggaatatactcatgtcaaatggaaacgtggatgtgaagttattagagctgaggacaaatatagaaagctttgttaaattggcgaaggaaataggaatgttgccacttaagctattgttttcaaatgacataactcttagttcgattagatttcctatggaggcaggaacttcacctaccaattgattatgcgtaagaacaagatgtacgagattagaaaggtttcctaaggaagaaggaatctcgcctatgagattgttagacgcaaggctaaggtttcttagctgctttagatctcctattgaatctggaatcttaccaaccaatctattagaaaaaagctcaaggtttacgagacgagaaaggtttcctagtgaagaaggaatctctcctgtaaggacgttattagcaaggataaggtgtctaagctggtttagattgccgattgaagccggaatttctccaacaaacttattaaagtaaaggttaacaagtgtgagatgagaaaggtttcctagtgaagaaggaatctctccgtagagattgcaattcgtaaggtctaggtgacgaagatattggagtttaaaaaggctactgttggttttcaaatagttgttgagaaaggtgttaggaatgtcgagtgatattacctgaccagatttatcattgcaagtgactccattccaaagacaacaatcagtgctcttattccacggacctctccattgattcataatatgccatgacgcatttatcggaaactcgcctctgaattccaaaagagcatctctctggtcatcacggcaaaagtggggcgaagaagaagctagagagtgaacaaggagggagagaaagatgataatacgactagaaaaaacccaatgacgatggcttcggatcatcatatctttctgttttgagattgtgtagtgagtactgaattgtgtgattcagtggttctctctttaagaagaaattcctaacttagcaaatcttgcgtcaactcgttttgagattaatagattcaacttgtggcttttgattagaatataaataaactaaacttttttttttcccacttgttttaaagaatcacgtacaccattgttgactctgactcatttagtcctctcttaatttttctaaaggattattaaagttctactgaatttaaggtctactataaatctccaactttgtatagcttagccaatttttctactcacatatgaaatatccatatatagactgtctctgtgcatctgtaaaactggtttgagaaatcaaaagacttagaaattagctatactttttaatgacccaagtgctataagagaacagatttgtcgtatcgtaatcgtatggtttgacttccaaattgatagcctatgaactgaggatgctcgtcgttaatttgttaattttaaatttacatgattttatgaagttaaattttcattctaaggatccatgcatctatctatacacatacatttactttggtttagaaaagatgttgatccatatatcatatataatcgaatggttacctattacataacgtacagatcacattttcaagtcaagaaacatatatcaataccactaatgacgtttacataggttggtggtaccattgaccatcccaacccctgtctcgcaattacatatagatctgtgacctaatatatgtcatgaatcatgactgtcactatatttgtatagtcatggttgtaaagtcctctaagaataagagatctatattatataacacactagagtgagaattgcaaaacacaacgtacacattttaaagccaatatatattaaataacaccaaatacacgcagtacgtttattacaaaaccataaaatagaaaattacaaatagaaacgagtcttttggaggagacacctgaaaaattcaatacaacatgaacaagacagtacacaataatgcttcacaaatcacaaatgcttagagagattgcaacagatgggcttaacgagcacttgtggttactctgatttttttccgaccaaacttttccgtaaaccactcatgatggtgtgaagtgaagatgtatccgatcaccagaccacaaaatacaccaggtccatatgctattgcagctgctacccagttgaacattttttcctcctcgtctaacaaatcctcggatggttgtgatgtaggattcgggacatgagtctcctcacagatatcttcgagaccgtagagtctatggttgtccaaaaatgaagaacatctctgcctttgaaactgtgtgcctcgtggcactggaccttggagacggttatgggagaagttcatgtacgacagaaaggagagtttaccaagatcttgtgggatttgaccagacaacttgttacgtgataggtctaacgtctcgagctttgtgagattttcccagacccgtgggatatcgcttgtgaaagcgttacctgacaagttgagaagacgcagttcctccaaacaaccaatggattcaggtatttcgccataaattctgttttcagaaaaatcaatggctctaaagtcttgtcggatcctctcaaaactcatctctactcctttattcaccatttccatggagcgatagataagagaataattctgaatatcttcaatgtattcataacttccatggactaatgtaatcatttcacgccaactagaaaaaaagttaggtgggagtactccagagaagccattgtgtgatatatcgatgattcttaaaccttgaaacccaatggacatgctgggatgatacaacggaccatagaagtcgtttgatcttaggatgagaacttgtaaagatggtagagatcccaaccaagatggaaacgtatccttgattttgttgctttcaacattcacaaaatgcaaacctttgcaatttatcaaagactttggaaacttcccctctaactggttgccacttacgtccaatgattgtaagttggtattattggcaaatatgtccggaagagttccactgaacttgttgtttccaagaattagccccgtaagattgaagttccttaaacataaaggaatcgaaccgttgaagagattgttggacaaatctaagaagtgtaaccctttcagcttgcagatccaaacgggaaacgtccctcggaaggaattgaaacttagatccaacacttggatcattgtttcttttgaatatattttttcaaaactgctgaaagaattgtgagaaagcattgttgaagacaatctccacaaccaacttggtacttcaccttccaacttgttgttggaaaaaccaaagatacggaggctaactaactttgacatagacctagggactggtccactgatattattgtgggcaacatctaacagtacgaggttgagaaacttagatatggattcagggattgagccatctaatttgttacgagtgaggattagattctgaagcttagatgatgaagatatattagcaaactctataggtcctgagaattggtttctatccatagaaacccatgctaacgaaggaatcgagaacaaaaatttagggaaatgcccggaaaatgagtttgcactaatatcaaacgtcaccaagttgtggaagccactcaggtcagaaggaagggatgtgaagttgttaaagaagattctaaactcggaaagtttggttaagttagtaaatgaaataggtatactgccacttaagctgttacggtcaagtgacatgactcttagttcgtttaggtttccgatggaagctggaacttcacctaccaaagaattattccaaaggtcaagatctaagagaagagaaaggtttcctagggaagaaggaatttctcctatgagatcgttatccccaaggctaaggtttcttagttgctttaggttccctattgaatacggaatctcaccgaccaatctattagaagaaagctcaagattttcgagacgggaaaggtttcctagtgaagaaggaatctctccatggagattgcaaccagaaaggtctaggtgacgaagatattggagtctaaaaagactactgttggttttcaaagagctgttgagaagggtgctacgaaggtcgagtgatattacctggccagatttatcatcgcacgtgacaccgtcccaagaacagcaatcggtggtcttattccacggacttgatttagactcaaagatcggaaactcgtctctgaatttcaaaagaccatccctctggtcgtggcggcaaaagtgaagcgaaggagaagctagagagtgtataaggaaggagaaatatatggtaataatacaataaaaccaataacaatggcttcgagtcattattatatctatcatttgatgagtttgtattgtaagtaatgagttatatgtgcttcactgattctatttaaatagaaaaagaggaattagaaaaccctaagatgggatatgacttattagctagtcttgcgtcaagttgtcgattcggttgatttgtctaagtctttgtcaatcaattgttccatttgtctcaaaatttccacgtaaaatcatgcacgactaattcttcctaaaatatttcttacgcgtttactgtctcatgttttattttaagttcttctgtatcctttttttaagaatatcgttggctataaggataattattactatacatataaaatatatatatatatatatatatatatatatatatatatatattatgattgactctattagtagaactcctctgatgggtgcaatagaatatgatcaacttcagttttctttcagatatttagacaaatgtaatcatgcaatgcaaccgttgaacagtaaaaaaaaaaaaaaactcaaaatatgcaccatcaaagatttaaataaccaaagaatcacaaacttttagatgttgcatcaaacctcaacttttaccacaagcttaaccaacttataatccaaaacgaaatatatcattgttcgtcacaaaaccctatactgttctgtgtccatctgaaaatttggtttgagataaaaccagaagcaagaagggaacaactccgatatatgtaacaggaaatcctcactatcctttactctaaaccatctcaataattaattccggtttgttacccagtttagtaattacttttggtactttaatttgtggtcacatgttggaccattgcagagaatcatgatttacgtacgagcagttcccatagaacacaatgtagtctcgtaaaggaaccagccaaactccagaaacaataaagaaaaaacgacaaaacaaacaaaagtagagagtgagttttactaaacgacataacaaacaaaagtcaagagagaaagatcaaactaaaactttttaatcatacgattcatattagttgacttttttgattagttaccgcgttaatgggtgacatcactgacttatatgataggttatgaaaggtttgcgtaataacctattgtactatgtatcacttattacacgttgtggtcacatgttggaccattgcagtcttcagagaatcatgtttttatgtacgttcatcttcttcttcttcttcaaggaccaccgtcctttaaggtgataattacaatcacttttcatgttgaggtttagagttctagatcggatttattatttatcacacaaacaacagtttcaggcaatagacgcgctgatttactcctcaacgagctagcgaacattgatttattatcgtcgtcctggactcctggttggtttccaaattgatactctattagactattaagccgattactacgaatggcacatatataagctcaattggtaattttaaaaaagtacatgattttatgaagtcaaaaacccattcaaaagattcatgcatatagttggttaaacatacgtttgatcaaatgattaacaactgttttgttataacttataactcaactcattttaactcatcaatccagttgttataaatttgtttaccttgatagaatggttggtgaagacgaattcaatttgatgttaattcatcttcatacgcatgcattaaccttgactaaagtaagaaaaaaactaaaaataatgattttaattctaaactgcatctattaattagtcctgatgtgcaacaagccaagatgtattaaacaccaccatatacgtttattacaactcatacaatagaaaagtacaacacaaacgagtcttttggaggacacacctgaaaaattcaatacaaatatgaacaagacgttacacaatgcttcacaaaggcatagagactacaagaaatgggtttagcgaacacttggggtgactatgactttttttttttttgggaccaaacttttcagcgaaccattcttgcttgtgtgaagaaaagatgtatccgatcaccaaaccacagaaaacaccaggtccataagctattgcagctgctacacagttaaacattttttcctcctcctctaactactagatccttgggttgttgtgatgtaggattcaggacaagggttaattctccacagtctttttcgagaccatagagtttagggtatatctattaaagcttagccaatttctattcctaaacgaattatatcatcgttctcaacagatggctagattatgtccatctgaaaatttgatttgacaaatcaaaagacttggaaattaaaactaccttttaactccggcaacatacacagatttcttcataacaagctgtgggataagataattgtcgttatatatcgtaattgactcaaacactagaccttggggcctgtgtggttggtttccaaattgattgcctgtgaaggcccattaatacgaatagcctacatatatgtgctaatttaaatccctaatacagtacatagtcgtgcatctatatataaatatataataaatctacatttattttggtgtagtttttattataaagaaagagtcaaatggttactagaggatccaagtccaactttagcaatcaaatcttcggctaaaaaaatttcctccaaaattttcctcgcatagtcgtggatggtatccactgtttgtcctcctcaacaaaatgtaaaagccattcagaagtacaaacatgaaagaataaaaagaaaacacctttttgacaaaaaggatacaaaaaaatcatttgccaacaaaacaaccgaaaattcttcgagtagtatcagtgggtagggccaccaggagtaaaaaaatcattaagcatgtgagtaaaaaacaagagataaactgttgcttaattctgaaatctctcttgatctatttattattctcatgcaaaccattaatctttacgggagaaaaatattagtatgatattttgagtcctgattgcgactagtgatatcgaatgattacaattactaataagtattacctgaagctttcatcacgcgtctgcttaaacattgataaatacattatacccaagttaatcattctcttaactcatataatgtcagaagatcaatgacatcgagcagacacgttgtcgcctttttactcgcttttgttattacacaagctaaacaaaaagaatgtcccatgaaagaaaaagcaaataaagagagtaatactataataaacacatgggataagaaagtggattaaggcatcaatttcgtctccattacactaaacacacacttttgattacgttccaagactcggcgccgttatcttggcgccattcacgcttcccttttatcttttgtctcctctttttaaattcaaaatcacttaatccccctaacctaattcaactatgcactccctaactatacccatatatgaacatattcttactacggtagatccattttaaccccgaaactgcccatttcaaaattttaaacagtctatgtatatcgtaactaggaaatatattaaaaacaaacttaggtttgcataaaaggaaaacgttacttgtttagcaagtattagatatcttagaaataaaatcgtttagttaggaatcatttccaattcagtaggtgtgattgaatgtcgattttatatggttcagttgatttatgagacaaatattaatggggtcataatttgtagcatttttataggaaacagtttaaatatcaaatattggtttgttaagttaatatacgttggatatttgctttgcattaaaatatgaaaccatttactttacaagtatattgtatatacacgataaattgaaaaaatcaatgattaaatgtcgtttggattttatgtaggaaaaatctcaaaaagggaacgatctgattcgattgcaaaaaaaaatcggatcaaaatctcatataaggaaaaatacgaatcaaagacttccgcttcaaatttttttttttgaaatccatccgattaatttttttaaaatacatagatatcagtatatcaaaaaactgaaaactcttccgtcttttgagaataaaagagtccaacttttgcattcgacatttgactataacagtatcttttcgagaagacgcaaagtcgttacgtgcgtttatatttcgtttattcatgtcccaatactacctcttaggaaataagagactattaagactttcttgcttcccaatacacccccactaatatcaaataacctagtttaatttcttccgtttctcaacacttttaagaaaatacttaacaattgacataaaagaaaaaacgtacagaggaatttgaatggacaaacaaaggtgaaacaactagaatggacaaacaaaggtgaaacaactagaatttaacaatagacaaaaaaaaaagaaaaggatttggttaagcaatattaaggtatgaactaacctaaaccataaaatagtaaaaaaggaggattaaggttactttgtttaggagcagcacgttgataaccaaaaagccataattatcgcttccttcagcgcaggatccttctctctcctatctctctgtatatatatgtggaccttcacgtaatagcttcgtacttcaaacctcaaaagcaatttagctctctgtcttcaagatgacttctcttttcttctttgttctccttttctcgtctcttctcataagcaatggcgatgccaacccaaattacaaagaagctctctccaagtcattgctcttcttccaaggtcagcgatctggtcctcttcctagaggccaacaaatttcctggagggctagctctggcctttccgatggctctgctgctcatgtacacaccttaaaccatatttaactttgatacagaatatatctttgttagtaacattgatatatgaattgcaggtggacttaaccggcgggtactatgacgcaggagacaacgtcaagttcaatttaccaatggcgtttaccaccacaatgctctcatggagcgcactggaatacggtaaacggatgggtcctgagctggaaaatgcacgtgtgaacatccgttgggccacagattatctgctgaaatgtgccagagccacgccggggaagctttatgtcggtgtaggagatcctaatgttgatcacaaatgctgggaacggcctgaagacatggacacaccacgtacagtttactctgtatccgcttccaatcctggttctgatgtcgcagctgaaacagcagcagctctagctgcagcttctatggttttcagaaaagttgattccaagtattcacgtttgctgctcgcaacagctaaggatgtgatgcagtttgccattcagtaccagggagcttacagtgattccctttcctcatctgtctgtcctttctactgctcctactctggttacaaggtctgctttcacatgaaactaaaccactcttaccactacatcagatcctcatttttaaaaatgtgaatttatgaacacaggacgagctaatgtggggtgcgtcatggctgctaagagcaacgaataacccgtattacgcaaacttcataaaatctttaggaggtggagatcagcctgacatcttcagctgggacaataaatatgctggtgcctatgttcttctctcacgggtttgtctctctgctaataaaaactcattgagaacatagcttttagcatcacactatctaacttttacattttggcagagagcattacttaacaaagacagcaactttgaacaatataagcaagcagctgagaatttcatctgcaaaatccttccagattctccttcttcctctacccaatacactcaaggtaacctacttcacgatatagaacacaaattgctaaacaacaacctcttctaatcatatgtttaccaattacaggaggattaatgtacaagctacctcaaagcaatcttcagtacgtaacctccataacattcttgctcacaacttacgccaaatacatgaaagccacaaaacacacattcaattgcggaagctccgttatcgtccccaacgccttgataagcctatcgaagcgacaagttgattacatactcggagataacccaatcaaaatgtcatacatggttggattctcttccaatttccctaagagaatccaccacagagcatcttctcttccttcacacgcacttcgttctcaatcgttaggctgcaatggtggattccaatcgttctacactcaaaaccctaaccctaacattctcaccggagcaatcgtaggaggtccgaatcaaaacgatgggtatccagatcagagagacgattatagtcacgcggaaccggcgacttatataaacgccgccttcgtcggacctttggcgtacttcgccgccggccgttcgacttgaaattgaattcgccaccgccacattctccgatttgtagttccattgttagttaaagatccgttggtccaagcctaacgtgaaaatcagaagggacaaagttatttaaatgtaaaactcttaatgggctaagacccaatactaaaggacccgacggaaatatttctcgtggtcttatttaactctaaccatcatcattacgcgtttcaaatattcaaccaaggccgttaattaagcaccacggaaatatttcatgtttggttatagcaccatgaaagaacactagaatatttacttgtcaattatgtcatgaaagaacactagaatatttacttgtcaattatgtcatcagtacaaagattaaacagctgaaagatatgcattaagtaggaaatgtaaagacaaaatatcgttttctgctaaaaggaattacacatatgccaaacaatgggccgagagagaattgaaactaatgggccgagagatattttttctcttagtgggcttttaggagaaactgtagcaaaaacaacagatttcgaacaaaattttgatgtagatcatagctaaaaaataatctggagtgagcgacaagcaagcggcggccgtcatggattcatcgccgccgaagactatcaccaaggctctgccgcgtttctctgaactcaaacctccgctctcagaagatatcatcgaggcgcttgaccggtccggtttcgaggtctgcactccggttcaggccgagacgatccctttcctctgcagccacaaggatgttgtcgtcgacgcagccactggttctggaaaaaccctagctttcctccttcccttcatagagattatccgtcgatccaactcctaccctccgaagccacaccaggtaaggagaattagccgaatatcaagagtagtagcttatgctatatgttaacaatttcaatctcaggtaatgggggtgattatatcgccaactagagagctatcagcgcagatacataaggtggcagagccatttgtctcgactttgccaaatgtgaactctgtcctgcttgttggaggtcgagaggtggaagctgacatgaatactctcgaagaagaaggagccaatctcttgatcggcacccctggaaggctttcagatatgatgaaacgaatggagtttctggattttcgaaatctcgagattcttatcttagatgaggccgatagacttttggatatggggttccagaagcaggtcaattacattatatctcgcttgccaaagcaacgtaggactggcctcttttcagctacacaaacacaagctgttgcagacctggccaaggctggccttaggaatgctatggaagttatatcgggagctgagtcaaagtcgaaaacgtcttctggtctgtattgtgaggtattattattgtaaggtcaatatttaaatacgtatatgtgtttcgggatagtaagtttatttcttcttcgtgtctctgcagtatttaaaatgcgaagcagatcaaaagtcatcacaactagtgcatctcctgatcgagaacaaaaataaaaagcttgtcgtgtaagttttgtcacaacgtacttatcaaattaagcatccttttacagatagtctaactagtatctcttctgcagattcttcatgacatgtgcttgtgttgattactggggactcgtactttcaaaaattcctaccctcaagtccatttccttcttttccacccatgggaagatggatcagaaaggtagagacacggcattagcttcgtttacagaggcatcaagcggtgtccttctatgcacagatgtcgctgcacgtggacttgacattccaggcatcgattacgttgttcaggttgattgattaatgcttgttatgccatctttgttgcaatggattttgacaggttattgtatgtaactggtgcagtatgatcccccacaagacccagatgtatttatccatagggttggcaggactgcaagaatggaaagacaaggtagggccattgtgtttttaatgcccaaggagacagactatgtagagttcatgcgcattcgaagggtccctcttcaggagagaaaatgctctgagaacgcttctgatgtcatcccgattgtaagaaaacctccacgtatctcttttttctctctttctctctctcgctctcggccacagggtggtttaataataagtgctacaatgtaaaatgcagatacgttcactagccatcaaggaccgggcagtgttggagaagggattacaggcatttgtttcctttgtccgtgcttataaggagcatcactgctcttacattttcaggttcatttttcgccttgtgttgttaaaatatgttagcttttgtaactccattcttttgttccccttaaatttacagttggaaaggacttgaaatcggaaagttagccatgggatatggcatcttgtcttttccttacatatctgaagttaaacaagacagaattggcattgtcggttttacacctgtccaaggcatcacgtttgaggacataaaatacaagaacaaatctcgggagaaacaaagacagcaaaacttactagcaaggaaagacaaactgcaacaagaaaagagagggaaacgcaagaaaagctccaaagaggcggttgatgattctaacaaagcgtcgagaaagagaaagttaacggggaggcaaagacaaactatccaaacagcgcaagatgaagaagaaatgaatttgagattatagcttactggaaaaactgaagaaaggctcaattatagaagatgattttgctaaacttacaggagctcatgattttgtctgataaagaagcaagaaaacatttcaggcttcagcagagatgggaaggtggacgactatttattataactgagatcatgttttgtcttttggttgattctaaacatattggtcagaaagaatttaacaaaaggattctcaaatttaaaaagctctggagtggttttgtttttggtgagaacaagggttggaaaagttctgtaattagaaacgaaagctcaagacacatgtctaaagctattttcaatcctggtgaacataccagccggatttcagagtagagaatatatagccactgttgagagtcacaaaatacctcaacgctctttaagagatgtcaatctaaaatcgccccattatttttccagcttagctttcggcccattatatatttatttgaaaaaaatacccgctcttttattttaaaattttcataatctttcatgatcatgatccactgatccaggattaaaacatggcataaccagcaagtgatccgactaattctagaggtgaaacctacctgataatcataagaaatctattaatccatgtaattagcaagatggattactatataaaatgagatgaacatcaatgtttgtaactttgagaattgtcatttgaaacaaatctcatcttcatgattttatatctcaatctattaatctattataacttggtgatttcattctcccctttttaaaaaactttcttgcacctaataaaattctaatttatgttaataagctcatttgagcataaacctatcttggtttggttacataattgcttttcgttaacaaacatatgaaggttgctggtgtcacttgatttataactttcaaagactttcgtgtacaactccaaataaaaagagtaaaaatgaaagaagaggtcggccaaaggcgaggtcgacgcagatgaaaacgccaggtgtctcagaagaagggagcaatcgaagctggatctctctttacgccacgtcatttttagtcaacatcatgtgggacccatttccttaaccgtcattctccttctctaccgttcactagtttcctaattttgaatttcaattatttattggatttttaatttttatgaagtaatttcacactgacaaatatagtactgtaacttattcaactattcaaacttgctactttggttgctgctatatacgataacactgttatagaaaggtgtatactcattgctcgttggttttaaattggaatacaaacaaatttccagaagataaacaaattattgaaagataacttatgtcctaagtaattggtatgatggtttttactctgataattaaattagtgattttggacaaacggaaaaatcaggaaatcttaaaaatatttgtttattttgtttgatcggtttgttgttgctgaaagtttttgatcgaaaattttgtgattgaatatttagagttactttgtcaaagttggatacctaattaccaaattgcatttccaatctaaatctaacttatacatatgtctgtatgtttgtaactaacataggaacacatatgtcttgttttaacgcatatataattttattttattttgttgtgatgttttgttacaatctaaaatatgtaatagaatttttgaatacttttaatttaaaattttgggatattcctaatgatgatattaatagaccaaaatgaagtaaatccattaggaaaaagtgattggatccacatattcgggaatatgcattcctaagataaaagttcacttttctttttaaacaaaagttaaagagtcctaggatttaaatgattttaaaaagtttttttttttaaattacttttcttcgtaggaagaaactgaatgaatgtgaaactggaataataataattatgctttctggagatataatagtttgaattgaatactataaccaaataaatataaggccaatactatagtggctataactactaaactacatccatgtccattaaccccacaaatgaattggcaacctccccatatgttaatttctatacccaaatcaaatcaaatttggaaaaaacaaaaaaatgttcatgtacaaaaatatttaaacgtaggaaatttaataatcagtttgaacaacaacagagaaggaaatctaataataatatctttagtcaaaacgtaaagataaatatgataatttacttcaatttaaaattattcactttacagctaagcacataattttgattagaaggtaagatatagtaaggaaacaaatttaaagaaagtaattgcaaattcaaaattattgaccggtacaatcatttcatgtgtatattaaatttgctcaaaactcttctcacacccatctctgtgtccattgtcttgtctttcgcggatcagttctgtcgactctacagattcttccgcgtttttttcaattttcgaaagtctctctctttttgactcttcacctttttttttaacaccacaacggttaaaaaccctcggcttctataaatcccgtgaaaaaagtgggatagattgaggtgcgtttcattgattgtgatgcagagacgaggtagatcgtcggaatttcatcgaccgggtttcattagatcggatactcatcggagacgtcgccgttgaaaagggttttgttacgaagaagccttccttttcggtttgtcttcctcaatcaccgattcgcttctcaggtaaattcttactccggctactttctcctcaattcttcgtctttctacaattggatctgaaaatcatttgctgggtcgttatcgtttttcgatttcattgtaaaattttgcagctttgactcaagtgctctgttgttattgcttgtatttatgagatctttgtttctgttgtttagtttatacaattttgcttttagttgtgaatctgatgtgtgtcgttatgaacaggtgtgaacagtatattaagtttttgtttggtgatctgatcttattggttggatgtgaaatgcaaagatcacggagagctcttctggttagaagaagagtttctgagactacttctaatggaaggaatcgcttctacaaagtttcattgtctttggtttttctcatatgggggcttgtcttcttatctacattgtggatcagtcatgttgatggtgacaaaggtaactttttgagttccttatttggacagaatgcaaaacagttattagaatatggttagagaactgaacttaagtaatatacgctcttagagatatgacaatcatgaagatgtatagaccatatcttaagtgtatctaaggcttactcttgggcatttgcaggtagatctttagtggattcagttgaaaaaggtgaaccggatgatgaaagggcagatgagacagctgagtctgttgatgcaacatcactagagtctacctctgttcattctaatcctggattgagttcggatgttgatatagctgcagccggagaaagtaaaggctcagaaaccatcttgaagcaattagaagtcgataacacaatcgttatcgtaggaaatgttacagaaagcaaagacaacgtgcctatgaagcaaagtgagataaataataacacagttccagggaatgatacagagaccactggttcaaagcttgatcagctatctcgtgctgttccgcttggccttgatgagttcaagagcagagcgtccaattctagagacaaatctttgtcaggccaagtaactggcgttattcataggatggagcctggtgggaaagagtacaattatgcagctgcttcaaaaggtgcaaaggtcttatcttctaacaaggaagcaaaaggagcttcaagcatcatatgccgggacaaagacaagtatctccgaaacccgtgttctactgaagggaagttcgttgtcatagaactttcagaagaaacgttggtgaacacaatcaagattgcaaatttcgagcattactcttccaatctgaaggattttgagattttggggaccttggtttacccaactgatacgtgggttcatctagggaatttcacggctttaaacatgaagcacgagcagaactttacatttgcagatcccaaatgggtgagatatctaaagctaaacttgctaagccattacggttcagaattctactgcaccttgagtttactagaagtctatggagtggacgctgtggagcgaatgctggaggatttgatatctatccaagacaagaacatattgaaactccaagaaggagacactgagcagaaagagaagaagacaatgcaagcaaaagagtccttcgaaagcgatgaagacaagagtaaacagaaggagaaggaacaagaagcctcaccagagaatgcggttgtgaaagatgaagtatcacttgagaaaagaaagctgccagatccggtggaagagataaaacatcaaccaggaagcagaatgccgggggacactgtcttgaagatactgatgcagaagataaggtcgctggacgtgagcttatcagttcttgagagttacttggaggaacggagcttgaaatacgggatgatattcaaggagatggacctggaggcgagcaagagagagaaggaggtggagactatgagactagaggtagaaggaatgaaggagagggaagagaatacgaagaaagaggcgatggagatgagaaagtggcggatgagagtggagacagagcttgagaaggctgagaatgagaaagagaaagtgaaggagaggttagagcaagtgttggaaagactggagtggatggagaagaaaggtgtggttgtgttcacaatctgtgtcgggtttgggactatagcagttgtagccgtggtttttggtatggggatagttcgagcagagaagcaaggtggcttggcttggcttctgttattgataagctccacattcgttatgttcattttgtcactttgatgagagaagagttctcagttttggtctttctttttgttttctagtttttttcttactgtagagttagctgagtcttctttatacccaataaaactatagaagttacctagataagttatgatgtgcctatgaggtttcaaatacaagagttttgtccggttcaatggaaaaaactcttatcaaatcaaagcttatacgtagaaagagttttcattgcagaaagttgatttacaaacaaaactattattcacagaaaacattttcttatgaccaaaataattataaacattttctttcaataattaaccctagcttcgtcattgccacagagcaaagatagttttaaaattcgaatccaatcaacctcttataccaatctctcacatgtcatctcctactcttcatagttcatccaaagtggggttatttgtcaacgtaacttcagcataaaactgagctttatactagagagaaataaagttagctataatcatttataaactgaagattgatggaggtttattaatggttaataaacctttccaaaaataggcgtatgccgctaagaacagagaagacacggtattctttagtaaaaggcgaaagaacagttcgctttgtcttcactgcacagctccgtgactcttgaaggcaagctctcgatctttatttatactaaagtttactcactgttctcaagaaatgagccgatgtgggatagtacaatcaatcaaattaattcatgggttattaatagcagtatatgggccatatcttgtttatttttaagcccatcccaaagcctggaggtttcatcatcttacaattctagactggttttggtgaaccggtttgatgaaattagaaattacaatgcaagagacacgtggcaggcttagaaaaataaccgaaagcaaaaacaaaaaggtttaagagagagacgacactagtctggttttggttcgagtcccgcagtggtaaagggacgactacaagcgaacataatgtttaagaaggcggtggaggctaagtctcaccagcgtctctccggcgctgaccggaaaaaactccgtcgcaccgtccgaaataggcttccccttcttaccgatgaactcctcgacgcaattcttcctcccaaggtttgatttctcttttccctcaatttttggcatcgttgttttctccatagattactaggtctttcttcttgttgtgtaatctgattgattctagattagattgcatcgagtattggcttacttctggcattgattgttttgtctaggtcgagattacactttccaagtttcagaatcgagttattgtttatagtattgaaggtggatgtcccatgtttttcgatatcgatggaagaggaactgagattttccccacagtttttgctctgtgggaggctcctgaaatgttaccttcctttatgttgaaaggaggtgaggtttcacgttatattataggcggtgcagatttgatgttcccaggtattttgatccctccccaaggctatccttctttctctgctggagaaatatgggctgtcaaagttcctggaaatctagcacctattgcggtaagctttttatgtcttgttaactgatgaatcttcttaatgaatgtaaagtttgcgtattgagttacatgatgtttatgaaggttgggtgtaccacaatgagtagtgaagaagctcgtaaagcaggtttacgtgggaaggctttaaggataactcattattaccgtgacttcctatggtacatgagatgctggcaaaagtttttttatattttacatctgtggaggaactctgtctcttacatactgaatttgtgtttcttagggaatcagctgaggggcattatgttccaaatgcggggtttatggaggatgtggtcatggaggacccatcgtaccttgctcctggttcaggtgaagatattttagacacttctgcaagcaccggaaatgaagaagatgaatctgctctggaaacagcttcaacatcggctgcggatgctaagaatgatgctgaagtacatgtcgttgggagcatgaatgagctatacttggtagatgatgtatgtgctactgaaactaataccgacaagcagattactctctcccctgaggaggtagatacccttcttgaccaatgtcttttgcaagcattgcatacaacactaaaggagaaagaccttcccatcccaggaagcactctatggtaagaaccgcattcagatacttgacttactttgaaagccacctatattctggtatttgactatgattaggttgttttattacgctctgaagctctattctgtgttactcttgactttgtcaataacaagcaagacaccttaaaccattttctttctcctttccacgtttgactgacatatatttttctgtgagtggtgcagggcaaatcatgtattaccttgtaggccttctggtctcacacttgacattaagaagtcttcccataaaaagttgtcaaagtggctgcaatctaaagcgtctggtggaatggtcagttttcatacgaatttcccttgtcttatgatactttttttggcttgattttatattttagtagatgttgttcgtagatgtttaactgcaaaacccaactggtttatcaatataggaaactattagtatcaagtgttgtaagctgtatctccttaaaagtatgtatgtaacacattggtatacatttaccctgatatactcataattgctagtagatttactctggtgtcttgactggcaactgcactctgtcacaatctttgaaatatatgcgcagatatctgttaaggaagacaagcataagaaggagatagtattgatttcagtcaaccgcagccacccagattacaaatccttcaagccagagaaaaagaaagcggaagtctccgagtctcctggagagcgctccacggcgcaagctcagtcagagaaagggcttgaaattatagaggtctataaatcaagcatacacaatagtgcaatatttgcatcagttggggaagacaaaggaaatctgtacacagcttctgaagccactgacgttgtgttcaaatacattgagaaggaaaatctagtaaagccaacaaacaaatcaatggtggtgttggatccgatactatgtgatgcattgttcaaaggagctatcaaaaagggatcggcatatccgtcagagatccacaaaaaggatgttgggtcgacatttgtaggtagaatgcagcctaatcacgtagtgatgagaggaggcggtgaacccgtggttcgtaaaggagctgtaaagccggttcagataatgacagaacgaagacaaggtaacaaaaaagtgaccaaggtcacagggatggagacgttcttgatagacccagactcgtttggatcagaactgcagaagaagtttgcttgcagtacttcagttggagaacttccaggtacgtttaaaatctatcctttttgttttgttcagctgtgtaagtgaattaactatttgagagatgattgattgttttgtgtgtttgctttcaggtaagaaagggtacgaggttctgattcaaggaggtgtgattgataaccttgcgagatatatggtggaacactatggagttccaaagagatacatcgaagttcttgataagactagaaagtgaatggttttttctatttcattttttttttgtgtgttttaatcttctaattttatttgatacgtacactctgtgactctagagatgtggaacaaatgagaataaaattgttttgttattagttttttttttaatataacaaaaaaattaaagaaaataatttatagtttgatggactttctctcttttgtgcagttgagaaaataaaaggactttctctctcttctctctctagatcttttagagagaggaagtttctgatgctcaaacttggctccgacaatagccagcttttttagtggtgttggttggcttccttctggcgtcgttagctcctttagcaacgtcggctagcttttctccgacatcggtggtttctttagcaccgttggtcggcttcgttcttcaaatttagtttttgcctttcaaccttgttcgattctattttgcttcggttttaattggttttgatttctctttctcttcatttcgatctaaatttgtaatttttcgatcctcccttctttaaggggcttaatttgttcttcaagcttattgagttttcattttaaaagatcaaatttttagttacggattgaagtttaatttagtgtcttttgtttgattttgatgaaattagagctgttgtttgtctttcttgttgccgatgcttgttgaatcgtttgggtttatgttgtttttcctttaaatggcagaagtcgaagtcgatagtttgtgagctatttctttcttgaaggttttaaattttacagtcattgtcacagaagatttgtcaattgtctcatcggatttgtagctgcttccgatttggcgtttacagcaattccggtgaacttaagttttttgtggttatgattctccacctgcgacattctgcaactcatcattttctgtttccacgtgtcctctttaccgtgtctctagtgccatgtgggctttgacttattagcacattagctttctcttcttcagaaggtggtctttgggcttttgtccgtttatggcctgttatatggctttgtaaaatatggcttgttaaaaggctttgtaatataaataataaaacagttgtgacaaaaaaaaaaaaatatatagtttgatggtgattggtgaacttcttttttttccaagattgcagtaaacgtcgtctttagctccaaaaacaacctttgtcttgttcagctaatggcgatttttgaatggcggcacagaagacggccattcgacggcggaggaactcgtcgccgtcgtttcttcagcccattgtattcgagaaatttcaagagaacgattctcttcgctgtgattttcttagctatcttccctcctctctacttccatttcaagctccgacgaattcgtcagattgtcgcgcaaaagtgcgattggcttcaccatcctccacttgtctgtgctcacggcggcgattccaccctcgctttcccaaacactgtacgtacactctcgatctcttcttcttcacactcttgctactaacctttttaaaccttaatctcttggactcttctcaatcgtagatggacgcttacagtttcgctatacgttctcgagttgattgcattgaagtcgatgtttctcgttcctccgatggtgttttattcgctcttcacaacaggttacagactctgatccttgttgtatcatcttcttctaatgtttctgtgtttggattctcatcggtgttcttcttattcatcttctgatcacacgcacagtcagggatctgcagcgtattgctcgtaactcttctgttcaagttggagatctgagtatgaaacaggtctcatctctccctctctctctttaccagcttttgggatatgcttttttgcatccatttttcataaaccttttgatgatctttttgcagatcaaggaactcgatgtctcggagattgttaaaggaaccttgggaagtagtaggattcctactcttgaagaggctttagcggtaatgcctgtttttttaattactatcttgtcattgctttgctttgtaatttctgcttagtaacaagtggctgaagctagttttgatcttgaatcatctagttgatatcgaattc

SEQ ID NO: 1240 - DNA, 80413 bp, Arabidopsis thaliana
atatgagtctctttttagacgattggatattaatatgatctgttgcaaatatactagtacaagcgaagttgttgtgagcatttgtttctcaagttaaatttcttcgtattaaattttagcaagttttaaatgttccataaacagtgatgaagatagaaactatctcgttgatattgattgttgaacttatcttgtttgttttttcatgctaacttatctaattacttgttacagactgttaaatgcggggactattttcaagacgaagatggacctagagaatttggcaacatatctcttacaacaaagtggataaagactactgacacttcattgatgttacggaatcttgaggttaactacaaggaggtaagaatcttgtatcagttttcttctgtttatttttaccagatcaagttatttcttcgagggttaagcatgtttcaattattgatattgtgttttacagacagaggatcagcccatgtccgttttgcatattcagtatccagaatggcctgatcatggagttcccaaggatacagtggctgtccgtgaaattctaaaaagactatatcaagtaccacctagtctcggcccaatcattgtgcactgcaggtacgatgcatgtcaatgagggatacaagtgttgttcaacgtctcctgagagaattgtttttttctctctcagtgcaggtataggaagaactggaacatactgtgcgatacataacacaatccaaagaattcttgctggcgatatgtctgcgttggatcttgctaaaaccgtggcactatttcgcaagcaacgcattggcatggttcaaaccatggtaaatctttcagcgttacaatttttagctaccaaatttctgtatctcaccacataatttgttctgaattgttcaattccttactcttttttgaaggatcaatacttcttttgctacaatgctattgttgatgaattagaagatctaaccgcggggacaaatgctggaacgagttcctaaaggtacgcaatttcaacaatcaaatctgagtgagccatacctgttataatctatgaatactcttatcttgtctatcttttgatccagctgaagggttcgtctgcttagagagggaaaaaggcttctacccaactatatcaatttcgtaatgtgattcaagaagaaacccgcgtgaatctctacattcaagacttttcaatttctgtaaatttccatatctgataggtttcattgttacttttgttgtggaaatgctgattaaaaagcaaatgaagtcgccaatgcgagattcttcaaagactatgaattcggtttgatttggtttgaagtgtaaaagaaccgaagattaatttaatggtttagacttaaccgagtttctttcgaaaataaataaatcagaagcggttaaaattggcgtaaaatgtcccgagtcatcgttgctcgcgggaaatctagctagtgtcggcgcgtgtctggcacgcgcagtaaagttaagctataaactcccaaatcgagacgcgagtctttcgcctttggcttctggatcctcgtgatgatgatgatggagaattcgaaatcaaagtaagcaatcatcgtcacttcttcgaatacccctactcaaatcgagaatcacccagaggtaagtttagcttctccagatctcaacttatatctctctctctctagcgcgcaattggaattgaatttttgggggatctttcctttgatcgcacgaatttggtcaccaatttgatgcattttagcggaatattgtgtatctaggtttaaatttggcgttgaggatacaaatttcgctatgtcgagagtttagtgtagtatctcaagactctgagccctagcagtcattactaagaatccaggctaagttagagatggtgtttttgtgggggaatcataatttattcgcgttaaattcttctctcagtgaaatgtgatgatcccttctctagtctataaagctttttgtctagatgttgaacatatgagtctggttctgattgatggtttagtagctatatcactcatgattgtttcaggtactccgatcggtcgcatagtgaactttgtcatgttttctttttctacttgtatagtggttagtgaaaattatcctcaagaagaaagttttcatcatcttattgatccagtgtcagctacctgaaacgggtcagattttgcttattatgcggtctatttcgtgagtaaaggaatttgctttagtgatttggtgaacgcgcttagcttagttcttgttcgttttttctcccctgtgaaggctccttttaagttctttttccacagaaatgacatcactcgcagttgctgaaacctttggattttgtcaaaatgcaggatttctaaagagaaagtttgcttgtgactgaaaacccgcatacaagataatcaccggggcaaaaaaatgagttttgcatgcctcgtgtgccatagtgtagagagcccatcccactcatttagaagctactctgtttctagctcagacaacgagggaagatgctctgtgattgcaagctgcctcacaaggaaatcactcattcaagctgcaagatcgaaccctttccctgcatcgtcatcaaaggtaaccccacaacccaatttccaagcaggtgaaggagcctcaccacggttagtacgaagccgtgcagtgagaagagacattgtcagagactggaacttcaacgaaattgagacagagctttgaaatcagatctgactcttctcttaggaatagtattagtttgttcatcaactgttcttttgtacctcgtgttcaaagttttgtatttggcttagaagaatgcttttacaaaccaataatctaatattttcctggccgtttattgaattgtggtattacaaatcaagcacacgctaaagtgagagtagtcaataaactttggaaaagcaacaacagatcgatcattgcaatcgttaaggaagaagtgttcacgtgagatgaggaaggattaggtgagggaaggcacgtgatagtatttgcctttacacaagcacttgtagacgagagggcaagcctcggaggcggagcacgtagaactgatcacgacaagcttgcatggtttacatggtccacacgcattcgaacagtcaggtatgcttgatccgctcgccttatctacaacctcgcaaatcacaatacaacaaataaaagaaccaaccaagatgtatataacacattcattgtctctatttataagccatgtaatagccaaataatacttacagtgaaaaagatccaactggaaagtatcactactaacaaaaagatggagaagaagaatcgcgattaaagataccgatttcattccgaaaagattgaagggtattatttttagaaatattcttaggttctcatacatagaaagggttttgaacaaaagaaaatgtggtgaagagatatataagagagtgagagtaaagattgaaagggattttaaatgaaacagtgttggattcacatgatccatctctctcttttcaaaggctttcacattctttgatcctttctcattaatttgaatcttgttactattttgttttatctaatttggaatactgataggcacaagaatgtcccataataaaaccctattcgaaaggtactttttaaaaatgaagtaacaaaatctcagatgtctcgtcatcatcaagtcctacatgctatcaagcgtgaccctttgagaccttgcttttaatgaagtccccactcttgttacaacccaatataattcactctcatttactactccattctttcatataaaatgtttataattaaaaaaaaaatcatgtagaatgagatttctacatgagagtaaattagaatgagatatcttcaagattcgtgacttggtgacaaggacaagttaagaacttgtagaagaactgatagagttctctttatttagagtgaacataatatcaaattaaaattctaacctttgaaatattaccattctttgtcactgtgttattcacctagttccaagattgatctgaatttgtagctcatgacacttggtttacaacaagtggatatctaaaccggtcattacagataaaggtatgaatcggataggtccgtgtgagacaaatttttataattccatagttgagacttgaagtgcccgacaaaaaaagagtcctttgtatgggaaaatctggcaaaggcatgtcctaaagttttttgggaacatatgtgtctatgtcgggctttaaatcattgcgattttaaatgcaaaaaaaaagaatgtactctacaataatgtaccctttcctcatcatcttttttgacccaacttaacataatttacacaaataagatcttctaaaaattacttgctgattatgaaaaccacactagaaagtggaataaatgactatatgcatgcgctcaattgtgtttggcttaataatatagtcaaaaaagttctcttacaagcttttattacagtcctctttttcaccatttctagcaaaaagccaaatccgataatttaactattttttaatcttattttcaaggactaaaaatgattgagcttccaagatttgtttcaattagaaaaattcacttaaaaaaaaaacgaaacggatacaaacaaaacattgaacaaacgaggtcaacactcatcactaatgaagacaaaaactaaaataacccttcaaataataagaataagtcgtctctcatgtttttgaccccacaattatccaattttattacaaaacatcacccaacttctcatcatccaacaataacaatgaagactcttcatcttgtccaactttcctcatctccaaactcgtcagtctcattgccttcacggcttccccttcccaatccgtcctcgccaaaaccgcatacaatatcgaaaccacgcaagccgcttgagctgaaagcaacccaaaccacaacccactaaacccaattttcaaccaaaacgctagtccaactgccacgggagtcccaacgaaataaaacgacccgagattcacatgtgccccaaccgcaggccgacctgtccctctaagaatcccgcagcccgtggtctgtggacaattccctagctcgcatagcccgacaattggcataaccgaagcaaccaagaccttgagtggctcatagccagtgaatagtccagcccaacgctcttttagaataaccgtccaagccacattcaatgctcctactacaaacgcgcaagctagagccacgttcgcggctagtctggccttgtaaggtctacctgcaccgagctcgttcccaacctgagaaaatcaatgaaaccaaatcttaaaaaagttattgaagccaaacttttgtcacgtgtaaaggaaagataaggacatcaatgaggttgaacagtatcatgagattggcaacaataaaatagaccacacttgactactctcttttcaaccacttttttatatatttttatttttaggtatgttaacgtccaatcacataccacggagtgacctattaatggaagttgatgtaacattttcccattacattgcacgttttttatcatctcttttcttcttttcgaaaaagcgttaagaaacttataaagaaaaaaacaacaactaggaaacaaagagccttctaagaacttcccttgagtaaatccataattagatacaagaacaaaattcaaaattttctcgaacaaaatactaatcactaggaaacagagaaccttctaaacacataataaggtcctcgaaaaacacacacagaaaaaagaacttatgtcaattacaagaacaaaagttcatatctttcttgaataaaacattcttgcatctactgaaatgttttggtaccttcaagttccaagacttttgtctttttagtctttaatttaatataattacttccactctttccaatatcaatcataaacaccacataattcatttttaaaaaaaacgaaattaatattcaaaagtttcatgattttgaaccttcaaatgcaaaacccaaatcaacttagtcaaatagttttctagacttaaatcttcaccacttaatcactaatcattagtctaatcatgactcaaatcaactttgtagctttgactcaaattttgaccacttaatcatctttaatttaactataattttgaccatttacattcacataacagaaagtataaagatacatacccgagcagagacgcatccagctaaagccataggaaccgtatacataagactagtagtctgaatcaaaatcccagtggcagccacagcaagcttaggattctccaagtaaccacccatcacaatcacaatctcataccaccaccattccaaacatatccccaaacaactcggaaccgccactctcatcaacggtcccaaccctccaaccaactccatcacagacgacgactgagccaccaccgccaccatcgtagtagacccaccatcaccatcaccactcactctcttctgcaacatcccactaacccaaacataaccaaccaaaagcacaaccatgatcaaattcgtcacaacagacgcaatagccacaccaggaacaccccaatgcttcaccatcacaagccaataattcaatggcacatggaacgccactgctgctagcgtacaccacatcatcggtttcgtcactcgctgcgaccttagataaacacgtaacggctgaaggagagtattggtcaaaagatcaggaagcgcgtagagacaatattcagccgctgtagcggttatctccgggttttgacccatgaaaagcatgatgggtccaaggttgatccaaaggaggcttatgggcagagaggccattaagagaatcacgaccatacggtgaagagagagcgtgaggagatcccagtttttgctaccgtaggcttggctacacactggctcgagacccgaggcgagtccaaccataacagagtatcctgtgatgttggtgaatccgatggagagagctcctccggctaactcgaggctaccgagacggccgaggaagagaacagacacgacggcgcgcacgtagacaagacagttcattgctgtgattggtaaaaccatagcccagagctcttttagctcttcaatgacttgaggaagagttgggtttttatgggaagtgaaatcatctgactggattttgtcttccattgaaaatggtggatttttagtttactgagttttctgagattcgaccaaatagtagtgagctgataaacggagctagaggaagctagccaaaaacagagctttagaaagctctggatattttaaagaagaaggaaagccatgggaggtgaaaagttgggagttttacgagtgaaacagaggaggagatgggaagacgtgaaacaggggagctagaaaggaaagtgaaagagcaaaaaagaaagaaagtaaaattcgcaaaaaaataaaaatctgttcgtttgtctcctgaaagtgaaaggaggaaagctgcattaaatagaggcgaaagagttaatatatggttttaaatactaattcaaaataaatagacgttttagtagtatcgttttttatataataaaaaaatatttgtatttaattctataattattaatattctttagagttttttgtttttgtttttctgtcatcattctttagagtttttattataagatcaaaatactttttatagttgttttgcaaaaaaaatttagttagtgtgtatatatttattaaatactttttatgcaagagtatgtagtttaatacaaaaaagttaaaaatatatagttttgattgtcattatatcaaaaaattaaaataatttaacggttttctgtcaccattcatcacggtaacaaaatgcaaaagataagaattacaatcttaaaaagcggcaaaaagtgacaaaatttgaccgttcaaaatggtttttagcggtttattgtgtcttttgcatctttaaactaaattttttaatttcttatgttttcactttatttaagtatttgttttgtcacaattactctaattgtttcaaagttatataaaagaaaagtctatttggatatgaaatttttattaaaagatatcagttttctctagatgcttcaattttaaatttgtgaaagcatatatatagaaacattgataatgaacttacatttgattttatttaggtgttgccacatatgattttgttatctcttgagacgttaacatttgtattgattattgattatatgtacgtagttatgaacggaatgattaagtttcgacttcttgccttttgtttggatatccgatcagtaatgaagatacatatgtatatgttattattatgtctatatctcacagcaacaaaaatcataacctctaaacattttgtggtgaactgaattatcaaattaaagaaaaattattttatcgaaagttatctaaacagagtctaacactattcaataccattcaatcttcttcaatatttacaatttggttattcatttttttctaacattatagatatttgttttgttaatcttttgaatatgtttttttcggtaaatttgaattttaaaacatacataataaccctaaaaaatagtgttcgagttcatattcattgttagtttaatggtgaactagtgatgaagagtcgtggttttcattgcaaaaggatcgtggattattttttttgtactttgtagattactctctccattttctttataaggctgcaaatggttgtcttaagatgaatagttggaaaatattaagttggaaaaattgagttgagtattattcaacatgttcctctacaaaaatgtagttgaatgagttgaatattgttgaatttgttcaatttttcagtttttaaagttgaattggttgaatcattttttcaactcctttatctcaaatggtaaaaaatgagatgaatgtttatttaactttttcaactttttcattttaatcatgaattaaattgcaataaaaagattttgaactttattttttccaacgcatgatattttcttaaaggcttaaactactaaaccactataaattaattattgttttggataaatatatttacctatatatatgggggcaatggcaacttttactgacagcaccaaatgcatgaaacactcaagcctttgtatgtaattaacacacttatcagaagtccattgggaactggactattaacatgaaatctagctaagaccctgagagttttaatagatgtgtaagagccgacacgtgtgggaggcaagagataggttggacgtgcgcagccgcctgacaaaataaataagtgtggttctgttaaaagttggacattacaaatcaggtgttggggatagatcaaattaattttttacaagttgggatacggaagaaaaaaaaaatcattttacaagatgttggttttcaaaacaaaatttattatttttattagtcacgaggggaatctttttttcgtcagacaattctaaaatacgaattcgtcaaatttattacatgtctaaaactaaaacacagttgaatgtgaatgattgagaccatcactatgtagaattaaattgattctcctaagtaagtattttaataactaggcttgaatgtgaatgattgagaattagaacttcaaatttcgttttgttttaaaatttgaacaaaacctttaaacaatacgatacgacgctgaaaatatgcctcataagtcataagtcatcatcactcataacaaatcaacaccaactaaattagaagttaatccattacagaattattttggattaataaagacttaaaaggcaaagaatgcacgtacggctacccataaacccagtataagatagtgactggtccgataatacgacaccaatcaatctatttcttaaaacatcactaacactagtatgttttttgttggctttataggcatttgtttatatttcggcttgtcgatcacaaaacatagaatcatttaaacaaatcgaccaaagcatgtgccttccgaatcaacataaattatgtcgttagtgtctcctacgtcataaccaaagaggttggtgttgcctcgtggccaattccaaggggctaaagttccacaattttactgatatcatgttaataatataatccttcaaaatcgatcaaataatttttaaaaatgtttttggctcctatcctaaaatcatatagattttttcaccaaatttttaattaaaataaaatattgtaggtgtaataaacaatgattgactatgtgtagagaagaatcttggatagggatggagaagggaaattgaaattggtcgtgtgagtgtaatgtagattgtattacataatcacataaagtttttacaaggttaaattatatagtttatgtgtggctaatatgcgataaacgagtattctttaggaaataggcatatatttaatttaagtaaatggcagacaacacattctttttatttaaagctatgcgttttatgaaagtagattcctatattttagtacaattttattctctaatctaatattcctcatttgtgatagattagctaaactgtttatctgtaacaaaaaataacttttttttgctaaaaatcttcttttgttatataaagcaatgatgaattagtgtagtagccaccacgatgaattctattccggattgaaattccatagacaaacaaatatgttacgcgagactcatatacaagatgataaggttgatattgttgtaatgtggatcaaagaaaaaaaatagaggatttcaatgatttcaaatatatagcataaatacaattatattctacaaacgaaaaaattatatataaaaattgatttagtttgtgcgagatgagatattcaacatagtaaagcatttggacataaactttcatttatttgttttcaagctaaacttttaagatacatcctctaattttgagaatattatgagtttatgatatatttatatatagttctctactaaacagttcatatatgaacataggtggtatacttaaaaaacatttttaatatattctggtaccaggagaatatctttatatatatatatatatatatatatatatatatatgagttactaaaaatttccaagaaataaaacgtaataaaataatgtgaccctataaataataccataggatttgaacgatcggattcagctccattatatgagaaaggtaaatgccaaactagttaggtaaggaatagaatatatttcatgattattggaacactttaaagagttagtatcaagcataaattcgattaagaaaaaacaaaaaaaatacaaacttcgtactcgttgacacctccctatctaaaatgcgtttatagttaaaatcaaacgagtgttgggaacataaaaagttataatcaaacgagtcaaacaaaaaagaaaataaataaattcaaacgagtcgtcagggcaactctttggaattcggtactatcaatatcaagtatatttttaagtgttacaaaaaaaacgatacagtttggctatatatatttttcaaacaacttcgaatcaaacaacactattttcgaataaatcatgttgttaaaaatctgattttaaaagtgtttattcttttatcttctctccatcgatttaccttttcaacgcgaaagatggagttggatcgaatccaaacaaatagcataatttgtattatgtgatgatggtgtagcgtgttttacgtagtccgtttaatatatcatactgagccttaatggtatccattaaataatacaggcccattaattagtttatcaatattatgggctataagcctataatacacttctacaatctacgtgtattctattattctataccactctccatttctatttgtaaactctttttcattcatgcaattaaatttcagatgaattacattttcaatgtacacatatatatttatttattttttgtggtaaaatgttaaattacacatacagtttgactgtagtattttaactattttccaaacaatttcgaatcaattatagctaagtttcattttattgataaatcttattgaaaacggggaagatggagttggaccgaatccaaacaaagcacagaagaggcataatgtgttatgtaatgtggttttgagtggcccgtttaatcttattatgggccttaaatatccagtgtaattgtttatttaattatttttgtcaaacctccagagtaatgtttacctatttatttgatagaaaatatgtttttaaaaataaaaattcacaaagtaacaatatgcatacagttagtttcagatttctccttatcattattattttgtcagtcgaagtattaggcatataaaaaataaacagtaaagtgggggaaaaaatgtgggagatgaatcgttgacacatatttgaaaagtagagagggaacgtatatgctagagtttagaaatatgtctactgaaaatatttatttgctaactatttttttgaaaagatttacggttgaaagacacagaagaaatgtcatttgtctacgagagagtaaaatgcaaaatatcaattttaatttggtaggggtgatatggagaatgatgtatgaagagctttcaatttcaacaatcaacatagaggagacaaatattttagggagtttttggtggatggcctaagaagagaacagccacaagacatgttcacattaatgtacgtagtcttatttgggtttgggtctcttgggagagaatctgatgagcagttaggtacttttgactatgacatattcttattttttttacatgagcaaaaattaaaatggaagccaataattgtatcccattatggtattgtgtgttacatgatttctttggaacttttcgaatccacatttttacttttcaaattcgaaaaattcattagtcagtttcttatatagtgtttttctgcatctccattttcttcttaatttaagtagctagttgttctaacatattcctaaaaagaaaacaattcttaaaccttttgatctatactagaaaaaaaatcatttcacgatctatgtcatgatgtataaaaagtacgtacgaaaattctttatctcgtacttttcctaatatatgtcatgatgcatcactatttccagaaattaggataatataacatattataaaatatattgcttcaaataactctactatcccacaatcttatccctttttttttcttttcgattttgcatataaatgaagcatatcataaagaagttaaaggttagattagagagattttaaaaaatttaagagataaaacagttttttttaaaaataattcaaattgaaaatcacttgagcggtgtaattaggaacttccatttgtgatttcattatgtagtaatcttattgctaaacagtcagcattttaaggaaaaaaaaatcgttagcctaacatatacttaaatgcgatattttgagaattgccttactctatttttgaacagaaagacgacatgtaataattattttcatacatatatttgaacactagcacagataaataatcattttagccattcaaaatgtacaaaacaatagtacatcattaatcatttaaaaatcattcattcgactttcaattatatgcattttttcatctcaagtttatgttttattctgatttttaaacatgcttgctacttgctagctccatttacattggcatcatttaaagttttgtttccagtcactgaaagagaccatattggaaaaggaagagaagaatgcacatattaagttgtcaactagggtttcgggttgtgtacatgcatatagttcataattatggttcttcaacatgtgcgaagacttttagtattttattacattacaaaagtgggttagtagaagtcaatagactcaataccacttcaatttagtggtggatcttggtcacgcatgcggctgctaaagacaaccacaagactcttgggtttcgtgaatatatattttcattgatttcaatgaaactttcatatatatatatatatatatatatatatatatatatatatatatatttatttattcttatttatttaatagagataatatattcatttgtttataagtttgtgactgtaaattttgcattagctattccataatctattagttgcggttttacagttggcacgagtgaaatgcatcaaccagacttgtccatagttcaaatatatttgtgttagtactagtagcattaaaatatggactactcatgcaaatataattaagtcaataattattcatttaaactcgtattccactatgtttcatactagttgcgtaagctactaactacatttatcgtcgttatatacaagggacgagcaaggaaaatggtccacacatcttcgctttggaaactgtacaattcagttaatagtttcgaacatgaacttttttcctcgcatcacaaaacagtatgtgaataaacaacagaaacagtgaatcataaatttttaacttatccatttgcacgcagatatgactcataactcacaatgactactcgttgtaatatctccaactttaataccacttgaaatcagtgcctttctcacatttatttcttctcatttctgagtatcgtttcgggattcgccgtagaaaggtcgacgactttatgattcattaagtaggtcaataacttttcttaatgttgataaggttttggataagttttcaacttttcttgactatttgcatactcttagtaaccacatagttcaatgtttttctacattgtttaactgattacatgctattggtcctatattgtaactgttttacaaaaaaaagaaattattaaattattttacagtattaataagagaaaaccattataacaatatgaacacaaactatcataatacatgtcgtggtcgaatattttcattgtgtgtgagggtggattcgaatcaaaacatggcatcacctatatcgaccctatagatgtttccatgctctttgaaactatgatcatgccgttggccctaccctattatcaccacctactctactatatgtatgtggggaaattatctgcacatccaccgatattcatcataagtggaaaattacgataattgaatatgacgtctgtaattattttactgatcgaagctttttttgacaatagaatttatactaatgcagaaatctgcaactatttttagtaaccagaataaaaagttgcgccattgtgtgtgtgggtcactgtacatatctaaacatttttttttatctgatttgtttctttattctactatgtataaaattttgtatacgcacatgcataatactttttttttctttttcttttttgggtatgaaacatgcataatatactttctaccaaacgattgttggtcattctctcaaactccatttgccaaattcttcacggcattgtgttctgaagtcggctacgtacacaaagatcaatatgcagaaccaagttgtggtagcggcaaattgtcctgtgtgcatctacaccaaagatccatttaagttagactcaatttttttttatctttctaggatccatttacattcagattgggtcatgtctactgaggttacattttttgtagaattttcttctaacttacaaatcatcgtcacaaatttaggcgttgtcaatatatgtatgtgtacaatgtatatatatatatatattataaaaaaatattcgattagtagccaccacacgggttaatttggacttaattaaaaataagttactctataaagtgtcataatagtttaaatccagactctaaactcctgattcgcccaaatctagaagtggcaaagcaaaagtttgaacaaaattctaagtaattattatagtgggaagagaaagtgactcctttttgaaatgatttgcatttgatgcaaatgatcggaagaaaggtcgtagttatatatcttatccagtaattatggtttcctcgtgtaatgctctagtttaattttttaattgggaaacaattgtgagctgagcttgaataacgccagtgcaaacccttccttttttttaacgtccggtgcaaacattgaccctatattaagttattaaccaagtagtgggagatcgcagtcccacttggcccatgaaccagtgtgtaaatcaaatatacccttttactgcaaaagaagaggttttcctataaattttgttttattcgaaaccctaaacgctgaatactatttttcttataattaattttatttaagactttaaaaataataattgaatttctggttttattctctctgattaggaataattggtatgttattttagtttgtctaccaaaaaagtttggaacatatgatatttctaaacagcaggacaaaaaataaatacatagagaaccatatttgaaagagacaacacatgagtagacacatgagttgaggttgatgttgataatatctacactaaccttatactgtaatgtcaagagcgtgttatttgttttcggtaatagtttgagattgttttggggaatgtacaagaaatttttatagtatttctatttaagcattcaaattcaacctttttatactagtgctgtgaatactacttttagctccggctgctcagctttttataaaggagcagtattaaatcttaactgtaatactttttactaatcaattaatttctatgaccacaataaaaccgtgtttacaagcttctgacgtgtaagtgagtcatttaaaataattaatgggtagtggatttcttttcggcaaaaaagaaaaactgtgagtaggtgatttaaatcgtcatcaaatctaaatatttactttttgaggtaaaggcaaactaaaatattgcggaataaaatagtttgagattgacaaatgagagaccatcttaagtccaactgatgaccccatgacgctacgaaaaggtatgccgtttgcgtcaacgtcatacaaataaaaaccttccaatcagaaaacagaccaattgggcttgatttgcgattttagttattgcgtgccaaatatgtaaacttatagagttttggaaccaaatatgtttttttcatgtgaaaccttcacttacacagttatacgaatgatatgcacatgagaatcattcatactactattcttttgccttccaaaaacgtaaatgtttacgtagttagatatttcaacaaatatcaccatagtattgcattttattccaaacacattctagacaattatatatatatatatataagtttacaaccataaggttcgtaattgttgtttgggtaaatttttacccgttttatataaacagtcttatggataactgttaactgttaagaatatatttttaacaaagacagtgttttgtatgatggtaaattttagaatttaagtggttctcgatagaaaactatgatatgaaatataaaaaggaaaaaaaaaagaaagaagaagaaggtattatagcttgcaataaaaaaaaaaccattgggttttgggttaatattctctagaatttgattatttccgctacaatattatttatatatatcatgaatcacgaatgttttgtattgaaattttggaactccattgaaagtgttcggggaaggaatcttcatatctttgataaattgtagtttatctgtaattttaattgtctcgacagctacaacactccaaacttggtttatcatgtagtaagattttaaaatctattaatagtctttattttcttttgtagaatcacgtgaatcgtgatccaaccaattgaattttttattcatctatactcgatatacgttagaatgttttggtttttagtacttctgttgttaattgttattatgcaagttagttagttaatagaataaaaatagaattagtagcatcactaattcaaaacgataggtttattataaatgtaaaattgaatctttggattactctcgccaaactttttttttttttttggcaaaaccactaataataggacacaatacttgttgagtagattacccatatgacttatccgtttataaactaaagatgtccaatttccacgacacaacaaatatacaagtgtttgacaaaaaaaaaaaaaaaaaatatatatacaagttagtcgttgaattagctttgaaaactttatagttagtaaaaaaaaaaacattttataaaacagttaagtccaagcgttcaaaatgaagtctggctacccaaaactagaaaagtaaaaatatatagaaagaagtaaaaaaaaaaaaattagaagtcagccattttattaaaaaaaaaagaatgaccacagaaaagtataaaaattatcaaatttgattgaactttaaatttcttgattttttatatcctttaattctccaaaacaaatacatatagatatatacttttattgttgtggtagggaaataaatagtacaaaagaattctaatattatattagtcaagtgtggtgtgcaaatctactactgtggaacccatttgtacttttgctatttacactattttgttacaagagaacgtcctactgagatgaaatggatctttaataattgcccgacatgtacatcgttgtgtataaatgcacctttggatattaaaacgtggctactttaagggatacatacattctttcctatttatgctacctagtataaattagaatcttaggatgtttgaataaattataatgtttgaataataaccttaggatgttgaataacaacccacaccatgttgtatactctatgattttttctttttaataaaagttcttagtcatttttttaatgtataaaaattcttagtcatttaccgaccattcgataaaaaacatcacgaacatcaatctctttttttgtcaatcgaatagcaaatctcttaaaactaaaaaaaaagaacaacaaaaacaaactagtgggctatggatttcctcatgaccaaataaacatggtccatcttaaaaatcgtttggaaacttgccttaatgctctttgttttgttgttgctgataaaattaaatatattttgtctctttcgtgaatttattacttttgtctttctaattatcgtagcatcgtattctggaatcagtagacaatttgttacgtcatattttgaaaccctaaaatatattactaaatattatccttaatttatttgtataagagaattcgtcagttaaaccaaaaatacgcgcaacgtcggtaattcaagttttgttttttctcatccactatacttctacaaatctatgaactatatatgaagcggtacaacatgtataaaattatacatggtgacagtactatcttacacttttgatctctagatctttttctattgatactctttgttaaaaaaaataactacccaagttaggttgacggtgcgacagaagaaaacaacaaaaataagttgcgaattacataataattcgatttaaatgattgtttctttttctaatatatatatatatatatatatatatataatattttatgcaaactcatataaataattttacgaggacaagattgaatacagataaattattagtaaagtcattaaaaacccgtgaagagtttcaagtgaagacgaaagaggataacgaagttgctcacattgcatgataatttatttatttttgattgattcaacttggttttgtaatggttcgatgaatctaaaaaataatgttcactctaatctaagaaactaaaagctagtcagctttgattttcactttctaaacagattattttaaaaagttggtcggcacaaatttattttatagtgttgtaattaccatagtattgttctttcggtagttatagcagatcataagagtctctacaattcacgtattttcacgtgttctaatatagttacatcgatctatggagattatagctagattttattttttaattgtttagagttgtaaatgtaagtatgttaggtttttttttttttgttgttcataaaaaatataaactttactaaaagattttagaatttgcaagtgattgtttgtaaacgcagatggagttaaacaatctagcagacacaaaatccaatcagcaacatgttggagtttataaaaaacttgcattatgcaaaatttctgcattgtgtgaaaatcttactgaggtcttctctagatgcagtagtcccttaatcaacacgatacaattgtatcttcttacaaccaaagatttatggttacatatcataaagtgatttgagggtaaataggtcacgcatccgtcatgctagaacaaccgaggacaataatagaatcgaaaaggatattgactatccataaataaaatgggtagattatttttttgtgagttaaactttcatataaacgatattataaaagcgaaatgagatagggaagaaaagtcagagatgaggaaggaagggatggggaaaatccggcggaataatgaggacgaatccatagaacaagttggctaaaatcagattcaattcagacgcaacacttcttctcacagacattgatagagtgatggagagcggctttgttttgtctgttttgttgtccttttaaaagtcaaccaagtcgctgcatggtcccacatctctatttgttttggaaactaaaaaataatttcagggggaaaaaaatgacaaatgcattatatgtcataacttataaccacaacattttttttgttaagaacttataaccacaacattcataatgaaaatatattaattcaaattattttatataaattacaatatttcaaatgataagattttgaatatcaataactagatatctttcttggatctaataattttcttaaggcaatatcaataaaaaccagaccaacgtatgtccgtgagtagggtaggttactaggctattacctaccatgttccttcatttctactcatctttgatctccagttgcacaagttgcctccaagagaatgtgtgacgttgtttccttctttttttttctttctttttttttgtctaaagtgtgacgttgtttcctttatttatgaaaaataaacctttttgctgcctaccgaccattccgtttctttttattagattaaaatactaaaaaattactcgaatatttagtatattaaaacactggaaattcactcgaatatctaaaataataaaatgataaatgaatataattaatacctattaaacttttaattgatttagtttaatttgtattttaaaataacctttttgcaaatataaatcaaatttaattttaacgattgttttcttataaaatttgattataaacgtatactcaggccaaaattactgtagaaggctaatttcccacgtttcagcaattttggtaaaatttctcttattttagttattatcaaaacgactggaaaatgtaaacgatggtaaaataaatgtgatgcagacatgcagccaaaatatctataaacccaatcattcacatgtataaattagcaattcattgctatatatacagttttttattttttacgttttaaaacaaattgtatttttgtgccgtctataaattaaccctatgcatgaactttaaccccaagaaaaaaaaaaaaccatgcatgaacggtctcacgttctttgcctacaattcacctacattatcgttgatgttattttgaataaattatacagacaataataatagaaaatccacggaatattattttgatgataacataaaaagacagaagaattgggaatctgagaccaagagttgaaatagagtaaagaacaacaggaaaacaacagaatatacaactcaagtccatgcgatatttcaatctgtcaacttagaagtgagtacatcaaatattaaacgcatatcaatacaaattcaacttcaattattttggcgatatatagtttaaacggctagatttaataatcagataggtctttttggaacaaatcgtaagctacaaatcttcctccaactttttcttctattacttttattatttgtattattataatcttatagaaattttgtggtgcttatattatgtgggctgcatcagttaactgtttatacaacgatttgaaaatttattttttatatgatttatatatattatacaatgtttttcaaacaacatgtaatatatgtagacttaaattcgaagaatgacactaatataaagtataaacgattatattacacacacaagttcgaactatatttatttaaaaacaataatataatttgtcagtaagtatgaaaatacaagtcatttttgctttcgataccaatacttgggtactactttgtctataaaagatattgtaattaatatttataatgttaattataaaagattattctgtttaaaatgagtttattgttaatgtcttgtgtgagatgtaactagggactatgtcagagattaaacttttcacagaaaaagaagaagaagatagttgctagtcaatagataaactagatatatgaaataaaaataattggaagataagcgtgtgaacaattatagttggagtgtaattaactaattactaattagagaggtcaatgagtcaacaacttccctcgttacctttttgacaattatgcgctcaaaaccaacaatgatgtccagtctcgatcgacttcctaattacgccacgccatatgtcatatttaattattacttttataactaaatttagttggccttaatgttcattgaaaataagtaaaccttctttataagaaaaacttttgtgttgtgctggttttggaagctgtagaaaccaaaattgtaattccatttatgagtagacaaacattctaccacagattatttttcgtctttttcgattgttaagagttacgttgagttgaagtagttaaaaactagtaactgtttgaacattaaacatgttatgtgaagcaaaacatagatatcgaatagacttattcaacgagatcttaacgtggtgcagagtgaaatatttaatcgttgtgcgacgaaggcagttttgaaatattgttatctattttttttcttgtttatgttttttcagctaatattattttggatgaaaaatcgaaaagtataagccgttctctctctctctctaagaatgttattgttagctagcattctcttcgttctgtttttcttttacattatttttattgatctcttttacacttctatagtgttctaaatgattaatattggatcttccagtgattaatatgttgactaatctcatagaataatatggtgaatagttgaactttaaaagaaaattaagcaaaaatactcattgccgagtcatattcaactacgagtgcataatgatggggcgaaccacgatctcgttaggctacaacaaactataatcctctcttggggtcccgatccccgaccctataatttcgggaaaaaaaattataatttcattttgacaaaaccttttgaattttaataattcatgttacctgtattattgtcatgtccctgaaactataaggaaatgaattgcattgatctagtgtccactttgttttgcgggatacattgattttatttcataaagtggatgtaatttttcttttacttaatgagtcatgagtaaataaataaaaacgctacaaaaagtgatgcaaatgttttgaaccttgttaatgatgtttaatgctgtatatttggctaaggtcatataacataacatttggtgatttataatgatttatattttggtaactaatttctcatgcatatatcacatatagaaagatatgtctatatatatagaaagatatatatatatatatatatatatatatatatatatttgtactccatttgagggtattttctgataaaatatttcatagtcattcacctaactaagttccagaatttggttatctacctaattgaatcttgaattaagattgattatttatatataaacgaaaaagagtacgtatcctatggatatttctataattccaaaagataatttaggtggccttaataattactcttgcttcttcttcttctttaatattttgtatatatttttctgtcattaatattttgaaattatgtaatgtaccatataaacttttgacattatgttttcagatatattcttctgtggttacactaatattgatttgttttccgaaaggcattcaaaaaaaacaaacgaaaatagagagaaagtcgccctcgaaatatacgttgcttttcttttcttatgtgaagaatagcttcttcttctttgtgtctactataaacactaataatctttttttaatatgattatttttatttatttttgggcaaaatgtttttttaatatgatagtattactatatatttaggttgatcggaagttatatcctctctcattggcctatttttgactgttattttctctatccaaatatatctatcaacattgaatcctgccttattttatcgattcccaaaacacagcttaaccaatttggttttatttcagttaagttttcggttcacaaccaatatgttggagtgttactaatcagatagacgggtaaaataaattgtttgcacaacctattcatatagttaaaataagcgaatagagagataattgaaactacagtgaaaattaacaacaaatggaacatacgtccaagtagttgagacttgaggagtagaaagacaacgtaaggagttgacaaacatgtgagccatttgagactaattcacagacaactaaaatccaagagttatactagtaaatgctttggttattttaatatattttcaagtcgtctgcccgttgaaaactggagaaaatgtatatagagtactattcagctcgaagacaaaaatgtagtgactaaaattaaaatgcttaattggtcggataaacaatccaaaataaatgggaaatgagttttgagttgcgatcgtatcttgcattacaagaagcaaattttagggttaaagtttctgtcacataactccgttacacaattcgcttaattttggatatttgacagaaactaattaatatgtaaactttaatatatatattggattttaggcaatttaacaactaattagtggcggacaaatactgattattttccctttatatatatatatatatataattgaatgcttctatatttgttattttgttgtcacaatgtttttttttttaaaaaattaaatttgatatccttcagtccatcactagttaacaacattgccaaaatatactatcttttcgtcgaaaaaaaaactcaccatacaaactaagtgatttttcagtagtttgtgatcaatgcaaaaatgataaaattaatttaatgtttacaaagctgatgttgggtcgaaagacttggacgtcaaggataacatttggttctaaaatatatggacgtgaaagatagcataccatctttgggactgttcggataagaatgtgtgtgcattagttttggaaagtgtttggccactcggatctttttgtgataatctccagactatgaatattgcggaaatataatccatgatcagagaatatttggcgatgcttgatccatgaccgtaattggagccggatatgttatgatttgatctacaactattattacgctagataagccaattaattatggtaggtgatcgtgaatataacttcactgtccgaaaaagaatagtgtatatgttgccctgaaccatctatctcattaggtgctatgaactagtgagttttaagtatagagggtgcatataagtcgtttttccatcttaaatcaaagacatttcttagtatcttctagatatttcattcttttagtaccatataaattagggatttggacaattcacaattatttattttaaaccaaacaaaataattgttctccgataatcagatgtgacttatgtgatatagtacatataaatatacacactgtttaaatttgtctacccaatcggaatcatagaaactttattgtttacccaaacaaaacggtactgaatatcggaactttttttattaaaaaaaaactgtgagagagaaattgaatcaacgtccaagtcacttgatgcaagaaaaaagcgaaaccaattaaattcccgtaaaaacagaacacaaaagaacaggagagttaatgttctaactgacacgtgtccctaccttgccatacactcacacaattaaaatttctaactctgtctcttatccgaaaaataatcatctccaagtgtaataagaaaatcaaaataaaactctcatttcttcttcttcctcgcctataaatacaactccattctctcatctcctacatcacaaaacaaaaacctcacttaaaaaaaaaaaacagaagacagaaaaaaacaaaaaaaaaaagaaaaagaaaaataaacaaattttcttttcttttttttcctctaaagtttctattttgtctattcgtgtttttttttttacttcctgataatgggagcctatgaaacagaaaaaccaactaaagatgcggcggctctagagacacagtcgccggaagatttcgatcaaccatctccgcttcgtaaaatcatctccgtcgcttccatcgccgccggtgtacagttcgggtgggccttacagctctctcttcttactccgtacgttcaactcctcggaatccctcacaaatggtcatctctcatttggctctgtggtccagtctccggcatgattgttcaaccaatcgtcggtttccacagtgaccgatgtaggtccaaatttggtcgccgtcgtcctttcatcgccaccggagccgcactcgtcgccgtcgctgttttcctcatcggttacgctgcggatttcggttataaaatgggagataaactcgaggagaaggttaaagttcgagctatagggatctttgctctcgggttctggatcctcgacgtagccaacaacaccttacaaggaccttgccgtgctttcttagccgacttagccgccggtgacgctaagagaacgcgagtcgcaaacgcgtttttctctttttttatggcggttggaaacgttttgggttatgcggctggttcgtacactaacctccacaagatgtttccgttcacaatgacaaaagcttgcgatatctattgcgccaatctcaagacttgtttcttcttatccatcactctcctcctcatcgtcaccgtcacgtctctttggtacgttaatgacaaacaatggtctccgccgccgcgaaatgccgacgacgacgagaagacctcaagcgttcctttgttcggtgaaatctttggagcattcaaagtcatgaaacgtcccatgtggatgcttctaatcgtcacggccttaaactggatcgcttggttcccatttcttttgttcgatactgattggatgggtcgtgaagtgttcggtggagattcagatggaaatgaacgatcgaagaaactatacagtcttggagtccaatctggtgcaatgggattgatgtttaactctatagttcttggtttcatgtcacttggtgttgaatggattggtcggaaattaggaggagctaaacggctttggggtattgtcaatttcatcctagccgctggtttggccatgacggttctcgttacgaaattcgccgaggatcaccggaaaaccgccggtgatttagccggaccgagcgctagtgttaaagctggagctttaagtctctttgctgttcttggtatcccattagctgtaagtacacttttgtgttgtcttgttaaaaaactttttgctttgcttaaactaacattaatcgattcgttttttattatttacagattactttcagtactccttttgctctagcatccatattctcaagctgctccggtgcaggccaaggtaaatatatacatctttaatattaaagttactaaagttacaaatatgtgggaccgtaactattatattttggtttcatccaccttatgcaattataacataggtatttaaattgtttttgtgatgttttgatttacaggactttcattaggagttttaaatttggcgattgtgataccacaaatgatagtctcactaggaggtggacctttcgacgccttgttcggcggtggaaacttaccggcgtttatcgttgcagcaattgcagcggcgattagtggagtattagcgttaaccgttttaccttcaccaccaccggacgcacccaaggcaacgaccatgggaggattccactagtttactattttttttttttaatgaaactcatcaaatacagtattactgtgcgaaactgcaaaaacccaaataaaagaaaagaatggataaaatgataaaatctaataaaccttgggtcgtctgtatttcacccttttttagttttttttcttctttttttataacttttgtcacttattttaatttgaaatagaatgttttttttttttgcccttaaataagatttgtgtgttgagtacaattgtttactgtttgcttcggtagaacaaatatccaactagaaagtaattccctctaccctcagaaaagaaaattttgataataatgtatggcaattcttttatatatagggaacaagttgaacaatttatgtagtttagaacggtttaggcgataaataaccattaataataccagttaaattaattaatatgattaataattttaaaaatacttattaataaatattaaaacaattctcatgtaagtacataaaatataaacctagaagatattaaaatattaaatattaaataagaaaccttaaatattcttgcaaacaactagtccaatcaatatgacatttttgtattctataaacacactgtattataatataaactatacagtatgtttcttagcacagtatgacacttaacaacttgatgatttatactaggcaacaaccaatgtttttgaagatcatacaatatcatttataagtatatcattttttatattacaaaatgaaagattgttttggtcaacaatatgcgggcttgaaccctcagtggcgatacaacattttacatatctatatataagttttttccaccaatttttagaatatttgcctaaaatataagaatgtttatactgcttaattagtgagtaagaacaggtagtccatatccattttatacaattcggactcagttgtcacgacttcgttaattggcaactttggcaagtatgttgatttcagaacacatcgaatcaacaaaggacagtctattgtgttaagttgcaaacgatcaaaacaaggctggcgtaacataaatgaaggcctttgggctaaataaatataatagatacatcaaaatacaactttcaatttggacagacttgaagccttctataatttggcctggatcaatactccttttaagactaaggtgtatcagcccagtcttttgatttttgattattttttttgtaaaccgaggcaagatttttgataggcaataatcctactttataatacattcggagtgtgtattcaattaaacattttaaatgatttgtgttaaaataacaaattcagcctcacaatttaatgttaaggatacaatcatatcatcctttcattacctcttatgcaatttaccacaaatgattgaaacctcttattcaactagaggttttgaaatattgatatatatatttggattttgtaaataattaaggtttttaaattatgtcatttaattatttgaaaaatgagggtaaataagattttgtacatgactttttttaaggagttttaagtttggcaattgtgatactacaaatgatagtagtgtgacagtgtcaccttggattccattaattttctatgttcccttttcatgaaattcatcaaatagacaaatacagtattattgtgcaaaacccaaataaatgaaaaggtaaaatctaataaaccttggaccgtctatttcacccttcttttagtcttcttactgactttaatttgaaatagaattggtttttgtttttggccttcagtaaacattgtgtgtaactaaagtcttcttttgttaacaagaaagacccagaagatcacactagagaaaataagtcctttttatggcacttctttttgaattagatgggggaaaagttgaattactttactttatttttatttaggtaaataaattacttaatatgacttcaaaaaatagacattaaataaaatttgttaaacttaattaatttgatatttgattaattcaaattacttagaaacattttaattctcatgtaaagatactgaccaaaaaatattaaaaagtatatactactaaaataaggacgtccgttaaattataaaccttaaatattcttgtaaacaactaagtttagtcaactaaaaaaaacaaaacaaagaggagttaatgacctactgccacgtgtcctcacattgtcatgcactcacacaaatgagatttctaactgcgtctcttatctggaaaataatctcattccttcttcttcctcgcctataaatacaactccaatgtctcatctcctacatcacaaaactaaatccccactttcacaacaaaaaaactcttttctttttgtctgctcgtttttcttttcataatgggagccttggaagcagaaagagccgccaacaatgctacggcgttagagacacagtcgtcaccggaagatctcggtcaaccatctcctctgcgtaagatcatctccgtcgcttcaatcgccgccggtgtacagttcgggtgggccttacagctttctcttctgactccttacatacaactcctcgggatccctcacaaatggtcgtcttacatgtggctttgtggtcctatctccggcatgattgttcaaccgatcgtcggttaccacagtgaccgatgcgagtccagattcggtcgccgtcgtcctttcattgccgccggagtcgcactcgtagccgtctcggttttccttatcggattcgcggcggatatgggacatagttttggagataaactcgagaacaaggtaaggactcgagccattataatcttcctaaccgggttttggttcctcgacgtggctaacaacaccttacaaggaccatgccgtgctttcttagccgatttagccgccggagacgctaaaaaaacgcgagtcgcaaacgcgtgtttctccttctttatggcggttggaaacgttttgggttacgctgctggatcttacactaaccttcacaaaatgtttcctttcacaatgacaaaagcttgcgacatctattgtgcgaatctcaagacttgtttcttcttatccatcactctcctccttatcgtcacattctcgtctctatggtacgttaaagacaaacaatggtctccacctcaaggagacaaggaggagaaaacatcaagtctttttttctttggagaaatctttggagctgttagacacatgaaacgtcccatggtgatgcttctaattgtcacggtcattaattggatcgcttggtttccatttattttgtatgataccgattggatgggtcgtgaagtgtacggtggaaactcagatggagatgaacgatcgaagaaactttacgaccaaggagttcaggctggtgcattgggattgatgtttaattctatacttcttggtttcgtgtcacttggtgttgaatcgattggtcggaaaatgggaggagctaaacgactttggggatgtgtgaatttcatactcgccataggtttggccatgacggttcttgttactaaatcggctgagcatcaccgggaaatcgccggtcctttagccggaccgagcagtggtattaaagccggagtatttagtctctttaccgttcttggtatcccattggccgtaagtacacttttgttttgtccttttgttttcttcacaattttaggtttgtaaccgattcttttttcttgtgtaattattatgacagattacttacagtattccatttgcactagcgtccattttctcaaccaattccggtgccggccaaggtaattttcatttatttaaaatgttaagttacaaatctaatggtcagattctgataatgtaggacatattagcatttattgagttcaaacgtttgatttgaataattaattgaaaagattatgtttccaattttgtgtattattgtatctatctattcaaaagtaattctttcctttattgcataggagaaaaaagggagtaaatatttcctttgtaacttttttcaaagtcttttcttgttaatgtggattatctaccaagtttatctatagcatttaatagggtgagatttattaacttaattatattaattaagatttctatgtaatctgctcttatattttcattatccataggtttcatcattcatgcacctaatgtttgaaacgtagacagtttcttttgcaacataagtaaatatttaaatttaacgaaaacgtgtttctttttacaggactttcattaggcgttttaaatatagcgatttgtataccacaaatgatagtatcattctcaagtggaccattggacgctcaattcggcggtggaaacctaccttcatttgtggtcggagcaattgccgcggcggttagtggagtcttagcgttaaccgttttaccttcaccgcctccggacgcaccagccatgtcaggggctatgggattccattagttaactagtttttacatatatatgaatttccatctaatacagtattgttgtgcaaaagtgaaacccccaaaaaatggataaagtgagaaaaataaaccttggtcgtctgtcttttactgttctttagttttttttttttttttacttttgttattgatgttagtcaatttgttttcgttttgtttggacgttaataaattctgtgtttgactacaatttttttactgttttttttgcttcggtgaaagaaagatccaactagagaaaataatcccaaaacaaaaaatcaacattcaaaatctgagctcttttctaaaattaaattcaaaacatgaacttattctatgtaattttttttttttgttttaaagacatggccaatgggcctttcactcttgtcaaacccatttgagtcgggctttagtcataactcattttaaagattaaggaatatgaggccagttcttttgtcacaatcctagtttaagcttgtctcacttaccaattacgtctctcaaaagacaaattttaaaaaatctataatctctactctctaacatgtatatatatatgataaactcgttggctattacaacttttaaatcacaaatggcctgattggaaaaaaatgtatacataaatgataagtttgtcactgattaatgcgagaaaattctaattatttgcattaataaaattagcgtagttaggttttaaaaaggtttatacaatacattatacatatttataaatttaaatgtttttaaatttatattaaatttattttattatttagataaatcttaaataaaaagaaaccaaatattatttgttattttttcgtgaaatttatctttttaatatattttttattttagtaaaaagaaggaatggtggcgccggaaactgaccgtagggtcagtctaattactctctcagcgtttctctttttggtcctcaaatcttcaccttcaagatcttcttcgtccctcgatctccgatttcaaatctcgtttctccgttcaagcaacctctctgaattcctagtctcacagcaggaattagtactcggcgaagcgatttctgcttcgatctctacatctgaagttccgatctgacgaaatttagggttcgtctgggtcgaagttaaataggaaaaagatttcgaattggcttgagaatggcggaatctagtggaagttggagagattcttataaaggaatgtcgtctgataacatcaagggtttggttttagcgttgtcttctagtttgttcattggtgctagtttcattgttaagaagaaagggcttaagaaagctgcgagtactggtactagggcaggtataaatctctttcctttaatcggattttggtttctgggttttgattctggtgctggaattgtggttttagactgtgtagaattatgttgaactcaacgagcagataacatctctgatagattttggatctgtgattctaattgaacttatcaggattcaactagctagctattcagaggttgtgaacagataggagattttgtgtttcctctgttgaacttcatttagtagttaatagccacattgtcgtttctagtgattacattgtggcatgtaaatgttgttcctttaggtttccttttcatggtataattcaatctgatttttgtaggtgttggtgggtattcttatctctacgagcctctttggtggattggcatgacgacaagtgagtcttctttgctttttaatcttctttcttagtgatttgattactatgttgttggtttgttttgttgctcattggtttctgctacttccagtgttacttggtgaaattgccaatttcgctgcttatgcatttgcgcctgctatacttgtcactcctctaggtgctgtcagtatcattatcaggtaagagattactcatgtctgactcttccatcaggttttctatatacgattgaatgtgtgatttttctttcttttctcttacactttgttatctgaatctcagtgctgtcttagctcatattatattacgggaaaaactacatatctttggaattcttggctgtgccttatgtgttgtgggttccacaacaattgtcttacatgcccctcaagaacgtgaaattgactctgtgattgaagtttggaatcttgcaactgaaccaggtgcgttgcttgatggggctgtgatttgagccatctcatgactcatgattctatttcgccttccattcaattttctaacttcgtctagtttgttgcagcattcatgttctatgcgagtctggtaattggggctgctgtatttctcattatccgttttgtgccccaatatgggcaaacaaatgtaatggtttacattggtatttgttcgctcgtgggatcattatcggtatgtagtttttggtatttccagtttgtaatcctttatttctttagaagaatgttgattccactttgcctaaattgatattgtcaaacttgtgaacaggtaatgagtgtaaaagcacttggaatagcattaaagctgaccttttcaggaacaaatcagttattttatcctcaaacatggatattcaccttggtcgtacttacttgtgtggtaacccaactgaactacttaaacaaggtaactattaattaagtgattttcaggataatcgattggaagactttgacgtgggtaattagatgtctatctttgttacttaaagaattgcattttgtattgttttcacttgcaggctcttgatacattcaatacagctatagtatctcctatatactacgtgatgttcacatctctaactattttggctagtgtcatcatgtttaaggtatcctctgctcccacaaaatgtatctatggttgtatgagggtgttgtttcagactttcagtacatgattcaaatcgttgtggttttgaacaggactgggatcggcaaaacggtactcaaattgttacagaaatatgtggatttgttacaatactttcaggcacttttcttctccacagaacaaaggacatggtcgagggtgcgttccttaatttcatttatggcacttgttatgcatatatatgttctgacgggctagatctcgagtttttgcattcaatgagaaaaaaacgtatgcggatatgaaaagaaatcggaagatattctaactctctcttaactacaaggaataagaatatacatactacatgtatgtacacactcctagctagaattttgtaaacatagttttggtgattgacaaaaggattgtcatctgctgtatccatacattcttaataccaagtctctgtatccctctggagtttttgagagtttgaaactgactgttattcgctattgttattgcaggttcgtcggtaatattaccgttgcggataagcaagcatataaatgaagaagaaggcattccactcagacgccaagaatctctccggtcaccttaaaagctttttcgctctgttttctggtccactgcgataactgcaaaccagagaatcaaccttttttccttatctcgacttattatgaacatggaccatggttctgtctaacacttacaaatggttcaagaagatcgaagaaggaaagaggagcagcgaggatgagatcatcttctccaatatcggtaaatatgctgtgagttcaagcacacgccattagcacacacccacgcctaaacccttggtgtgacagttaaaattttataaacaagagatgggttttgcctaaattggtcttacaagcatctataactaaaggtttcaattcaagatttgcattattttttattgaatcttctatttttcttccttagttggtttgaagctttaaaccctttgaaaaacaagaaatggagactttgaaagttgacgaaacacacatgttttattattagtcaatagtaatttgatgaggtggagttataacattgatgataatagatagtgacaacgttctatgttcatcttttcctcaatcaatcactccaccggtagatgagatgtcaaattgaaactgcgttatgtcactctcattactctttttgtatacgtttctcatcttatagctaatccgaaaccaatttatttaaaactttataatagcataaaacctcttaacttcaaacaagtttcaactttcacatatcttatagggatcatggtaaaaatggttaaaagttaaacctgatttgcattacaaacagaggattacgtgtataagggctataaactatatattacctaaaaaagaaaactagagttgacttattgagtaataaaatcgcctataaatatcgtaacgaaagaaaaaagatcccaaaagagacaaaatattaatttgttaccatagttacagatttctttcgaataatcaatcaataaacaaaactctttctctacaagtcctaaaatccttagagaaagaaagaaataaaatagaataagagaacttgttgtagcagttgaagcagaaaataaacagagtaacgaatccaacatcacaaaacaaaacacaaactgtgtgttgtctctcttctttggtcttctcttcttcttcttcttctttttctttttaagtatttttattttttggtttcttgatctcagaaaaaatggctctgaatagtgtctcctctgaagaatttaccttcccatcgctagcttctcatgattcttctcaccattccggtcttgattcacctcctttgtggaaacactcaccggttacttcctttcgccggaaagattacgactttggtttggcaagattagtcattggaaaagacggtgatcatgatcagaggaagagcttctcgtacgtggagatgagaagtcgttggatcgacgacaaagaagaggagaaaatggatatgttatgggaagatctcaacgaagaattgcctccaagaagtcagagtttgagaattgtacatggcggcgacggtggagagaagaaaacggctttgtttcccgatgagagctctgccgtggccgtggggtgtgggatgaagttatcgaagaagacaaagaagaagacgaatctgaacgttttggtgttgatgagggttttgaagaagcttattgtgttgcgaagttcgtctcagaggtcgccggtgaaaactcatccacggtgattgatctccaccgtgataattgtgaattggggggttattttgtggaattcagaacttacggggcttttgtggagaaaattggaattgtctgaaaatgatttatttgtagtttagtttgggtggttcacaaaaattaattttagggtcctaaatttttaataacacatctgaagtcttttttggttcttcgtcttgattcatttgcctgttccgtggggtttggtttgaatatgtatgaatttataagatgaaaaatgaaagaggtcagaatattagggtgcaataataaaggaaggtaaaaaagatttgtatttgaaacattccacttgtatatgatatcactttttaaatgtgtgataaaaaagatttgtaacatctaaaacttttgggggtctttattttaaaatgagtctttatgaaatacaactttagtctgaatcaaaaaggttttctaaaaatgtcaaaatgtttgtagtcttgtacacttactcactagtcacttggttcatgccacgaaccgacctccctaaaatatttctccaatttgttttctctttaagttcacaatagtagagttttgttttctccctaaaagttatttcgaagaaaacatgttttttctttttcctttttaataaatcgaagattctaaactttagtctataatccctcgaaccgaaaattagaatgaattttaatcctcatgggaaaaaaaattgtacagtagtttgttcttctctttatactaacgtgaccaactacttcttggtttaaaacaaacatgtttaaattatcaatttactaaaactatgattctatagtaacatgtgaaatgagaaacatttcaatgtcaaaagtctggtccaattatcgaactacataaaaacattgtaataccttttatatatatgaagaccaccattaatgtcgacagaaaagatagccatgaatcatattcaagcatcaaaactgatttaggtatctccggaatcattgggagaaaaattaggtgaccttcatatgaaaaagatagagtagacttttttatttaacactacttggaagactttcttacctactctcactatagacccgattcgtcagaaccgggttttggattcaatttcggataacccctaaattggtacgccaattctcagtcactcggaaaaaaaaaaaacctcacctttgtccacgaatcgcaagtgggtcatagaaaaatcgaagcttttgactgatctcagtcactttagtctctctgcccacgacccttctcgtctactaagggttatctccatttgcccctcttcctgacaactttcaggtattacttgtcaataagatgtgaaattgagtatgtgcatcagatgtttcctctagattgaactgattccacctttgatatgcgcagacacgaaaactgatgggtgtgatcaatgttcagggctctccatcgttctctattcattcttcagagtcaaatcttcgaaagtctcgagctttgaagaaacccttttgctcaatccggaatagggtttattgtgctcagtcttcaagtgcagctgtagacgaatccaagaatataactatgggagactcttttatccgtccacatttgagacaattggctgcttatcagccaattttaccctttgaggtgatatttagattgcattgaatttattttttgacaattatagatgattggattgggttggattggatttatcttctaaaatgtgtatgtttgtttgtaattaggtattgtctgctcaattaggaagaaagcctgaggatattgtcaagttagatgctaatgagaacccatatggtcctcctccagaggcaagtctatatctttctttcactcattcatagatatgttgatgactggaaaaaggataattttgttagttagttagttgtcctctctaacttcaggtttcagaagctctgtgtaggtttttgaagcattaggcaatatgaaattcccttacgtttatcctgatccacaaagtcgtagacttcgtgatgcactggctcaagactctggtttggagtctgaatacatacttgtaggctgtggtgctgacgaacttattgatttgatcatgaggtatggcttcaagatttgatttttcagtcaattgagcttctaccagaatcgtattttctgactaaaactctgtttcttgcagatgcgtgttagatcctggggagaagattatagattgtcctccaactttctcaatgtatgtgtttgatgcggctgtgaatggagcaggtgtcattaaaggtgaaagatttacgattttcatgtgtttcattctcttcgattttgcttctctctctctctctgaatgtatagtcttaaacatgttggtctttgtttgtttcacagttccaagaaaccccgatttcagcttgaatgtagaccgcatcgctgaagttgtagaactagaaaaacccaaatgcatattcctaacttctcccaacaatccagatgggaggtaaaacaccaccactctaaacaactcgaaaggaaaaattctttttagtagtccgtcatgattattaatccgagtttctctttgatacagtatcatcagcgaggacgatctgttgaagattctagaaatgccaatacttgttgttctagatgaagcttacatcgaattctcaggagttgaatcacgcatgaaatgggtgaagaagtatgaaaaccttatcgttctccgcacatttagcaaacgagctggtaaattttggtttatcactctatataatctaaacattacagatataaagtctgcatctaagaattctgatgatatttcaggtttagccgggcttcgagttggatatggagcgtttccgttgagtataatcgaatacctgtggagagcaaagcaaccatacaatgtctctgttgcaggggaagtagctgctttagcagcactctcaaacgggaaatacttagaagatgtgagagacgccttggtacgggaaagagagagactgttcgggctattaaaagaagttcctttcttgaatccatatccgagctattcgaatttcattctctgtgaggttacatctggaatggatgcaaagaagctgaaagaggatttggcgaaaatgggtgtgatggttcgtcattacaacagtcaagagcttaaaggttatgttcgagtttctgctggaaagcctgaacatactgatgttctcatggagtgtcttaagcaattttattgacttccccatttgtttgggaattcttaaaacagcgacacaaaaaaaaaactgatttttttttcctccttttttgtttgttttcacttgttggattcagtgtttgaccaaaaaaaaaaggattcattgtttttgtttcagttaacaaggagaagcttttgttgtattgtactttttggtttgaaaatgggcctaagtccatatgtaaacttgttgatgaagcccattaaaactgaaacttgactaattcgggtcggactcaaatcaaaaacatacagtatgttgagaaagatgaagtgaagacaatggttggttcctataatccataacgtaggtttatcttggttcaattttcaactttaatttcttatacataaaccgacaacaatttttttagtaaaagtttgttttttttcattcaaagtgagaaacaaaacatctcaaatctattacaaaatatttttatatcatttttagacttttgctcatgcatagtgcaggttaagcacttactgctttaataaataaaaaaaacaaactagaatacttagaaaaatgttgtcttcttacctccactccataaatataatataatagctaaatgccttaaaccagttataatgtaaaataaaacaaaattttggcccttgttcaagaagagccatcaaagtatcaaactatattcctttaaataagtacaaagctaattaatttttaaaaagtttctaattataaataattaagctgtaaaggaacctaaaagaaagacaaaaagaaaactaaaaataaatgtaagagaaagatgaataagtatgagagaagcaagaggatcaaagagacaactttgggggtgtgggccgacatgccatcatcagcctctctgttccattcaaaaactctagaagtttttgcttctctcatcattacaattttttagttttcattttgttaaaatccattttccgaattcggtttctggataactgttgaaatccatattccaaattcagattcacatataagaattttataattcaggacttgtacggtacaagcagaaatgatacaaggggaaataaaaagaaaaaaagtggattgcaaggtattactcggttttatgttgtcgttgattttactcataaacatgatacgaaaagcgaatgataaaaaaataaaataagaaaagttttaaatttccatgtagaacatttaaagataattctaacagtatggaactattatttgatatattgtgatagagacgcaatctcaagattaatataagttcccactaaaccgccccaaccataaaaacagatgtgcccgcttgatttcgcttcacttgtgaatgtgaatatgtgatctctctacaaaacaccagtgctgataattgtatcattgtatgtacatgcttagcaagttttgacgtactaaataatatctacatttgtttttttaaaacgttaggttatcaaaataaaagtgaaagtttagtgggaagtcttgacttaatctttaccagataggatgtggtatagggagacaagtagaggaggttgtaggggtcacttggagaattagtggtcgatatccatccaccgtccgttcatcattaattgcggctaagtatattaactttcgttaatcctttgatttctcatttcattaacctcaacaaaatgagttgaaaagaacagaatcgttttcgatttaaactgacaaacatgtaacagttttcattgagttgagttgatataaatgatcacttgtacaaaataaaaattccacgttatgaacttccgatttccttttgatgggtatttgttgatgttagttcttaaaaaaagaaaagacattagctagggttcgaagtttaaagatacagttttcaaattcttcatatagtatatactttccattaaaaaaaatccgaaatttttcacgtaaagacaaatttgaaatcaatgcctatgagataattaaaaaatcgacgatgattattatatatagcctatgagtaacactaattatgacttactatttcctaattattattgccaccaagatcagctggtaataattcattggtggatatgatatctttcagggttcaaatatatttctgtgagacttggagaaaagcgtaaagatagaattccaagcgaattatatatgaatacacattgatccataagcacaaaattgttacaaggggtgaatattacaaaagaaagaaatatgacttcagtttttttgtttaatgatttaaattcacatatatatatatatagctctggatttattaaagttcctctaaatctttaaacaaaaaaataagtgaagtcatgtttttttgtcttctttattataaaactggtaaataaaagaatgacgacattgaagcttgtttctagataccagtcgttgtcaaagttcagttaggatagaatctaagacaagatcctaagctaactctttcagccaaagcaaatctattactttctttttcgggaaactttcttttctcatttcattgatttaatcttatcttatttgacctttcaatcgatctcataaacactgctaattactgcagttgggcacaatacaaacacccaaacatttgttgatatattagccatagtttgataaccattttgtttccctcaacgaccacatctttgtacagtgatgtcacaaataagagagttgataacgtgatacattttacagtcttgttgatttcctcaagtgtaatataatattatgtgactaatcttccaagtgaccaatggagagaattggtgtgtgcggccataattttatagtacactatacatgttttatgttggcggtttggtgaacagtccaattaaaatggactacaataaaaagaaaataatagaaagtgaaaggtcggtagatcacatcagattgtaatgattttatcagattaagttcatgatttacatttttaatcagtatggacccatgtaaacgaacatttctccataattttgtaattagattactatacaaacaaatcattcatacaattttgaatgataacaataaacatgacagacttatttgtttgtagactcagttaaatagttctattttcttgtggataataattcttgtacgagccaagtgtttttttcatcactcaacagaatattgagatgttcttgctatatatattttgaatagttaatatatatgtctagatatcatagatttcctcgaattctccaacagataaaaggaccttggagtctttaattagaccaaactgtcatattttcaagatattggcgtgagtgatattaacaaacttttaattcgtgggcggtaaagtagatagcctccaaaaaaacggtcgtctaatgtgtcaattacttttgttctcatgcttgaagcattctgcttggtaatctaattattacatctcgtaaatattttagttgattaaatatcttaggatatcaaaccggccagccaatagttaggacggaatcaaggactagtttacagtggcgtcactatcttcttcaattttttttttttgtttcttcaatttttttttgtagtggataaaaaactccagatgagaatttcaattaggttcagtagcacgttgacgtatgctgagtgaaaaaagtcaaaaattaaattgctaaacccactaattacagttaccgctaattataattagtgaagagtggcaagtacacacgcactatgatttgtgagttgtgaccatccatatatgtagttcaatgcatcatatgtatagataataaaactgataaaagtatagttcaaaaagcttcgataatctgtaaataagaaaaacacatgatttgctatctcatgacacgacttagtaaaatcaatctatacgtaacatatatagccaattcttttaataaaaatatatatatgaaatcattttatctttttggagaaacaaaaggcatgcttagatatgctttggtgcttcatgatatatccaaaattagtagtatcaaactaaaccgaaactgaaagaaaaagaaaaaaagcgtagtcattctacatggtgaacgtaactcgtatatgccatattgccatacataaaagagtccataaatatggttcgactgcaaagaattaggggttatattgttatatacgtgtgtgtgtataacgagacttagagacactatgattagagaaaggaaaattagggatcgagggacatttatataacgaaaaaagtgaatggtgtgaaagggttaatggatagatggtcttgggatttgaacaaaaggctctctctccctcgcgcagtagacaaataggcatgcatgtgaatctgactccaaatcaagtgctacctcttttgccttttctatttttggtacccaatatttgttataattttcattttttctgttttatatatccattctcctcgaattctgtgtctaccttgtcatatgttaagtattttggatttttctttggactagggtcaaagagttactgagatgacgtcaccttaagccgaaaggtgatgaggtaaaagaaacgacagccaacggctttgggtggacccgtgcaagcggataaatcagatgaggaacaaatgattagttatgtgatagaaacaggtctgaatcttacgtgtcttacattcgtaatgacacgtgttaaggacggcgccaccaaaccagacaatgggagctggattgctggagaaagacttaagaacatatgaaacatattcctgtgttttactcttctccttattttttctttcataatataatgttcatatatacacgattcctgatgttttaatggccaatgttcgttcctttaggtttactataaatctgagtttagtttaatcatttaagaaaaagttgagattgtggtttcgagtggatctagctagactcacattataaaattagctgcggtggtatattgagtgagatttacgtagtaatccataaatgtacatgcgtgtaaatcctttcgacgttgagatgtttatatacttaataagttaatagtaatatctctttgacaaaaaagttaatagtaatatctcaacaactttgaggtattacgtgtcttatctatgggttaataagacatactaaaactaagacacatttcatcagtacctgatccagcaaacatataggaatatatttctgtagttcttcttcgggtttacaaatccagtcctttttaatccttgaattgtgaatttccaacaagccactcacaatttataactaggttttattactgaaaatatcttacatggtataagaatttatggtgtgtagctgaacatagtgttttaagaaaatagattaattatattcaaaacgtaatttttttgtcatctgattttattgataatacatggaatcgtgttatgaaatattatccaatcaaactgaagtttttggatatattcggaacatccatttgacctaattacgccacataaaaaccgttaatctaaaggatttgtcttgtgtgatgtaataataactaatgagcaatagacaaataaaaaaaaggtttggcttgtgcagtaactgccggtaaagtggagaagattggaaaaactttaaacaaaaaattgcggtaagagagagagagagacgccgaccaaaaacaaaccgtagatgtctatcccacgcgcaatcaaacctttccttcatctccttcttcttcttcttctccttcttcttatatcatcattttgcacccacatgtcacacacttaccatatacatataattaagcatactcgcataaacctatatatacactctaagatttctagctggtccatatgcatgtgatctaatcaaaagccaaactctccttgtctttgctatattaacaatcatttgatccacaccaccagagatttcaatcttcctctccttcttccttttgctactctcttttagatcgttcttgtgaaaatcgcttgcaaataacaagcccttcgtccaatctttattagctcgtaagtttcaccccattgctccttttagggtttttttgttttgttgctgtactcacttcatgcacgaaccagatgatgatacatcggcgtttgtgttttacgtttttattattcaaaaatacatacatattacatatagtatcgttttgtatcgtttcatatcttgaatagtatacatgtgtgtggtcctgttgagattgacccacaaatattagagtaaactggggaattgaaatcaatcatggtggggatttcggaatctatgtgtgtttctaagatattattgtttcttggaaattaattgttgttgcaccataatataatttatattatatagatagtctaggaaaataactcaagacaaagagtgtgtaacacactccaacctcagtgacttccacccgtcaagcttttcggctacatagcctttatatacgattattttacatatagttacagatatatacagtactgcttgtatatttttggtcttataatactaccttatgtcattatatatagtacatattatacaaagtttcaatcttttcatttataagcatcgttcggtatgtagaaggcgaaacaaacccttaaacctaatatttttttctggtccaaaaactttctctatcaagcttttgcattttttcttttaaaatagtaacagctcctccattgttgggtggtcccataaaaatacatcataaccatcatcagcaacatataatagcgatagccttaagcttaaagatccaagcttttggatataatatctagttacatgtatatatatatatatgtgtttgtatatttataggtatatagtatattatcgtgtgcgtccgtgtgtaacatcactatcattacccaacatacagcttttggaatttcattggacccaagagccattcgatccctttcttataattaaatataacgaagcttgtaataggctttggttttggtcccaaatacaaaactttaaggttgtgccttgtttgtctaaggttttcgcaatagcttccaaaaagacacgcttatgtttatatacatttcattttccttcatatcattctcttctctgccacttctccatcttgtttcttactcatttctctaacaattttccaaattaaatacgtttataggatcatcgtggatggataatataatgcaatcgtcaatgccaccgggattccgatttcatccgacagaggaagagcttgtgggttattacctagataggaagatcaattcaatgaagagtgctttagatgtcattgtagagattgatctctacaaaatggagccatgggatatacaaggtaattatattaatcaacgtggattttgtataatgattatcattgattaatcctttgcatggaatgacagtaaattgtctagttatgacataagttttgaaaaccaataatatgtgatgaatttggcatgcgaagtgattgagagagcctactttctttgacttgtatgttcataaacggagtgtgaaaagaatttcacaaagaaattaagagatgtatagtacaatcataaatcataatacttcttttgaaattaaaccggttgaaaagtataatcatatcacatttagaaattactttactacataattttcaatattctcttttttttttaaagaaacataaaatttctaatattttgaccttttgtaatgtaagaaatttatgacattaatatttagttttacatttgcagcgaggtgtaaactagggtatgaagagcaaaacgagtggtacttctttagtcataaggacaggaagtaccctaccgggactaggaccaaccgagccactgcggctgggttctggaaagccacgggtagagacaaggcggtactatcaaaaaacagtgtcatcggaatgcggaagacacttgtctactacaagggtcgagctcctaatggaagaaagtccgattggatcatgcacgaataccgtctccaaaactccgagcttgccccggttcaggtatacacattgaaagactctgactgatacgcgattcactatcaaagcaatcatccaaaaactactaataaatagtacaatacatactccgtctatcaaacctaagcaataatgttacatgtttgacgacatttgattcaataatgtttaaaattaaaaaaaaagaaaaaaaaaaaaaacaggactaaatcaataacttgttatctaaataactttatatgtttgtgaactataggaggaaggctgggtggtgtgtcgagcatttaggaagccaattccaaaccagaggccattagggtacgagccatggcagaaccagctctaccacgtcgaaagtagtaacaactactcatcttcagtgacaatgaacacgagtcatcatatcggtgcatcttcatcaagtcataaccttaatcaaatgctcatgagcaataaccactacaatcctaataatacatcctcatcgatgcatcaatatggcaacattgagctcccgcagttggacagcccgagcttgtcgcctagtttagggacgaataaagatcagaacgagagtttcgagcaagaagaagagaagagctttaactgtgtggattggagaacactagataccttgcttgagacacaagtcatacatccgcataaccctaatattcttatgttcgaaacgcagtcgtataatccggcgccaagcttcccttccatgcatcaaagctataatgaggtcgaagctaatattcatcattctcttggatgcttccctgactcgtaattaaaaaaaaacacacttctatatattgatttgtattctatgatttaattgttccatctggaaaataacatttataactgtctatttgtaaaagaagtttgtgtttattacgtagaaatttgttgttgaatttcacaaaggtggatttgttttttttaaaaattagtccctttgtttttctattcatttattctgttgtccaaatttgtaactcatccatacattctacccccattaattttttatttgagtggtggcctattagttaagagaacttgtaatttctgatcagactcctaactttcaaaatttcaaatcaaacctcaaatttgtaactcaaacccaaaatgcacgatttgaatcgaaatcatatgttcaccatgtatataattaattaatgtacgtattaatatgtactacaaatgtttacatgtgaagaaggtgatgaaaaaaaacaaaaaaaaaacataaacacaaaaaactttttattcatattttttaaaaaattgaccatgatcaatattgagcatataataataaataaaaaaaatgagttaaaaaataaatttaattgagaaaccctctcatcgagtaagaggtttcaattaagaagtccaagtcaaaaccttctgatccacgtagaaggtcttaaaagccaccgtcaaaaatctacaaggccaacacgtttgccgttaaaaattaatttctaatttcttcttcttcttcttcgtacgttaattaaaatctgaagaaacaaaatcgtgaaatcgatctctttaagcatcatctagggttcatcactgaaatcaaaaatgcaattaaatctctacaaaatctctcagatctaatcccagatcgttgttggtttcttctccgtaaaccaatcccacatatgaattaaagattcgatctcgaaatcgttggcttttgttgttgttgcattcttcggtgatggctccgactcggattctaaccagagacgaagagcttggtgttatttcagacgatgatgattctccatcgggtaaaagatctaaacttgatcgcttccctcttagccgttgggaactcgccgtttctctcggtgtcttcctcgtcttctcctctggactctgttgtatctacatgaccatgcctgctgctgaatttggcaaactcaaacttccaagaagcctcgctgatctccgtttgctcaagtaactttctttctaatcttacgactcaatttttgtagccaattaggagaatttactgattagtgttggtgtcatgattggaattgacaaaatctgtaatctttcttgttgttgatgtttcagagataatctagcaaattatgcgaatgagtatccggcgcagtttgttttagggtattgtgcaacgtacatttttatgcagacctttatgattccagggactatcttcatgtcactattagctggagctctctttggagtattcaaaggtgttgtcttggttgttttcaatgcaacagcaggagctacctcgtgtttctttttgtcgaaattgattggtcggccgttgattacttggctatggcctgacaaattaagattctttcaagcagaggtaagtctctttgttgtgttgatgaaatgatctttgtgaaagttcttgacttggtactgattaagttgtggttttatacctttcagattagtaagcgtagagataagcttctgaactatatgttgtttctgaggataacaccaactctgccaaatctttttatcaatcttgcatctcctatagtcgatgtacctttccatgtcttctttttggcgacattgattggtctcattcctgcagcttatataactgtcagagtaagctcttttacctccatccttcaccatctttccgcttatgatatgctatcattcaacattcctgtgtttcatctcttttcgccatctacataaagtgcgaagaacatggctttaaattctggttctgtttattgcaggctggccttgctattggagatctcaaatcggtgaaagatctgtatgatttcaagacattgtcagtgcttttcctcatcgggtttatctctattcttccaacgatactgaaaagaaagaagattgttgaatagccagggagaagcatctttacaatacacatggcctaacattcaatgccatacagagaacaagaatacacttaacttgtttagaggacacaacagaacaaaacttctgattcgtttacttgtcacttgtcgtaacgattcgttgatagtttttttgttgtcatattttcttactatttggcaagtagaggttgagaagaaattacagaaataatacaattttttgtacaagacgagagaccatgaaatattttggttctagatttattatgatcgtttcttttcagaatttaaccatctgaaattggaactagaagaaacatttatcttagaataatatattgacaaaaactcagttactcaacaacacagaacaactcgaatcaaagcaacttcataacattattttagttagatacttggttcaaagtcacaacaatacaacaacagactagtttctgtaaagcaacaggtttagttgagaagtagagaatacacaaagtcaagttaggtcaacttgaaaccaccaccaccaccaggtttgtgcagctgataagtctggcttggcacaacttgaatcacacctggttgttctgcaacatccaaatccccaaaagcatataagaaaaacagaacaaagacaaaaaaaaaaaacattgatcaagttgaaaactttatcctgtttttcctaagcctacatacacaaaatcgtgcattcatgactatatgattctatttctacaggttcacatgcgcctatcttaacctgacagaaacattcaaacatcacaaatcatggaacagtttatgaacttggactaaaaatggaatttacttcaaccttggtgacaattggatctttcattgtttcagtggaatcgatgatcacaagttcaaaaccagataagcacttaaaccaattaaactaaatcaaacaaagaagctactagagacttatgcattcaacgggttctatgctctccaagttacaagtgcaggatcaaacgagaaatctaatggaaaaaaaaacgtacttgatatctcagcgacttgctcaggagtgagcttagctgaaaaaccagaagcagcttccttgtaactgtaaatcaaagcatcttttgcagcttcctcactgtataataatcagtaacataagaacaaacacatccacacatagaatcaatgttgaagcaatccaaactataaacataaagtgagacaatccgtaatcagacaacaatatctcttctttaaaacaatttcagctactaaattgaaaaatcccccatttcacagaaacaaaaccctaaaatcaaagcgatcaaacccaaaaaaaatctcatccaagacaaattgcatctataacccatggaaatcgagagttgcaatttgattacagacctgccgagagcagaggaaagggtacggagatgataggttttaggttcttcatcggtaggtttctcggtgtagatgatgtgaacctttgcttccgacgatcccgttgcttctccggtatattcatcagccatgacgattgaagcgaagaacgatgataagcagaagaagaagaagaagacgatgatgatgaggtggtagactcttgttccaggagcaaatgtttgcatttctcttttttatagaatctgggaattttttttcaataacgcgtgagaggtgacattttccatttatgtcacaatttaaaccgactcataaatggacggtctcaaatggttaatccataatctgacggttgaatgatgtcggtatgtagataattttataattccactcatttttgtaattaccttgcctacaatgtgacatttaacttaaaaaataaaatgaatcagccaatattttttgtgactactttgattttagcaaaaaaaaatgataattaaaaagctaatcaaaattttgtgagcttttatctttaattacaatatttctttatggtattcaagattttatttttaaggaatttttaatgttttttaaatttctagctttaaattagttttcttgatacaaatctttgacttcatacagatttttcctattagaatttttatatttttgtgaccattttccacttctattatttatttgttctctaatactttattggaaaaataaatttaactaattggaaaaaaaattgtgaatgaatctcaatcttttggtagtttgaaaattaaatttttatctaaaataactttttgaatccagactagttgggttcaccaccagtaaaagtataaccatcaaaataagccttgatcaagcccatgggccattaactatgagtctttgactactcagaaaactcaaatggctctgtttttcttttaccgtatcacaaatggctctgtttttttctctgttttaatatcacacaaaacattcaataggttttgacaataaaaacaatacaaaaccaataggtgaaaatatacattttattaaaaacaattaaaaatacttgtcattttcattttcacatgttaaaaactgaacccgtcgctaaatcgcaaaattacaattagcgacgttttaatattccgaactagaaccctaaaaattaaatttacccactcatttttatttaactttctccccctctccctctctttatttaatgtttgatacgtctcaaagctagatatgccaatactctatacccaaaaaacatcaaaaacaaaacaccaacgctcgtccacatcccaacatctccgatcacttcctcctccacaaatcgacatccagccgatgtcgccgcactcgctccttgcttaccctttgaatcacatccaagcattcgcaatatctcttccccactcccgtattggatcgccactaaaagacggtaacaataaaacgtcgtggaaacgtatttcatccacaccattccggatggcactttgttgacgtagtaaccaccggttaagacaaacgctagcattgtcacggtcacgattgtagacgcttttttagcgtccatgatcgctgcaccaagggcaagtccaagtccttgtgacgctaaaacgtatagtaaaagcacggagagggtgaggaggaatgggactatcccggggcgtagatagaccatccaataagtgaacgtcaagaatgatgccggaagaacgagctccatggagagcgatccgagtacatgggccatgaagtaagaagagagtgtgtacataccggacgcacgctctctagtgaaaattgcacgttcttgcggaaacgtgaagaccgcgttaaatgatggaagtactccccaaaagatggatatgaagaagagtaggcctagtcggtcctgttataacaacattattattagcaaaaacgccaaaatgttttgttttaaatgaagtttggtacttacatgtacgtctcgataatcagagtgccaccacatgagaccacaaaggatcgaagccgcgacgacttggaaaatgcgaagtaagtcaaaggattcgtgacgccgttcttttaaaagtctgtggaggagaatgcagagttggctaaaccatgttgcaatacatgttgttattccaccgccgtttactcgcgttttcacgaaacgcgcgttgtcttgaggaaaatgtgacacttcgatacaagttttgacttgtggggctagcaatgtatcataagccgtgaccagcgtttgtctcacgtttggcttttcccgttccgttacaccgtcagtctgacaaactcctgcatattaaagaaaatcaagcagcttagagataaatttatcccaaaaaagtgttttagaaactaggaaatttttcatgcttttgctaatcactatcgtgacattagcatttttacgatgacacaccactcggatataaattaattatacgaaatatcctagcgattaattaattaattaattaatctaccaatcaaaattagaactatttactaatgaaaaagaaccactcaagttatcatccaaatagacgaaagttaattggccagtataattaacctaattataaaaagaaaaagacaattcaaagtggcattgaaccgaacagaggcgagagcgaatcagccaatcgtgttctttggaccgaccaaacaaatatacttaaacaggttttgacactatgttggacccattaatttattaatcgtaacaaaagcaaacatctttaaattaataaattgactaattaataagatatgatttgcaagtaaagctgaccaatcaaggtggagagacgagagagtccacccaagaaagcatataaggtcgccactatgattcttaattttagcttcttcatgatatcgattccaaaatttaataaatggaaaatgtttgagcatcatcaaataatctatttgaagttaacttttccttagataagcttatgctaagtaaggtgaataattagtctatcctaaacacgtggtatgcttttttcttacgaggattatcaagaagattaaaactgaatttgagtggaacaaaagtttgagaaagtcaataaataaatgaacaaatgcatagtcaatactcgacaagtgtaatcatgaaatgtcataagccagcttttggaaaagcaataattttggaatagaaaatttaattatgttgttcttttctttcaaattgatcaataataagttaaagcaagtggagtttactgttgtaatttgacgttgaaagcaatatcctaacagctcctcgtgaaaaaatagcaaacatatttgatctttctaataacgaaataattagtcaaagaagattcttgcttagtaagatcatgcatgcgattattaactttccccccatggaacatcgcatacatgcacatttataatattatatagttatatactcatgaaatagatcgaatggtcatgtgaatggttggttcaatgaaatgagcttttttcagagataataatacaaagaaagattgaatgtgaagcatatggttcgtggagacaaagaacttaatacccaccaaattattaaattgaaatctaatactactgtatatatgccatcgtgcgcaacaaactatttctatgtgccaattttattcccccatcttattaatgccttcttactctacctatggcgtcaccaaaatatacataccatgtgcatatataaatatatacatacatacattttgtgaagcaattcccttattaatagactcctaccaaaaatgaaaagtcaacgaagacatgagatttgttttgtcttcggttcacataaattagtcatttaactcttataacaatccccaaaaaaacacattaaatcatgtatgtgatgcatgtccctagtatatatatatatatatatatatatatatatatatgtatataaggaccatgaaagaatgaatatttatcatcagtacactgaatgaccaaacgaacataagtttggtccacactttttaatcatgtatatgcctaaaacgtcaaaacactcgtaccattatttggtacttactagcttgtttaggattagcaaggacgaattggaataaattaacgtgacctcaaggatccgtctctttagattttaagatcgtaaatttcctagaagtccttttctatttcctaagtggaaatattatttatattcaaaaaaagagttgactatgaagaatgcaaatacctatgcaggttttcttcacaaatcacaatgagactcaaaaaacattgaaactgagttaagagtaccctgacttctgactattccaattcccgaagctctatgttttattgcttcgatgaggattgaaagagagttaacagcacgcgctaaatgcgagagtgtgattgggttcccttaggcggttatctcctaaagtaaagttttcccgaatcaaggatttatggacaatacgtaagagcatacaatcaaaaccacacgcctccgtcgactcgtgtagcttaaacgccacacacaaaataaataaaacaaaagcagagagaaagagtgtgagaagactactttgatcaaaagaatgtaaaagccaaaaggatgttaatttttaaagttggctgaagaaaaagagaataagaattattgggaaaacagaaaaagataagagataaaatggaaaagtttagatagtgcaaaaaaaagacgaactaatttttgaaaaagttggataaagaggaaacagaaaacacaatgcccatcgctaaaaccatacgtcatcttgtaaccagttagacacatggtgttttcctatacacccgttttttaaaaacaaccaaaattaatatcattttcctctctttttattatccctcaaaaataaataaaaagcatggtttaatagtgtaatgggtaatgcgataaaagattttcatataaaagcagggaataacatttattcagatgatatataatatgccaaaattttagaccccaaaaatcatacaaatcatactcgaaaaaaagagaaagaaagacttaacacgtatccccaattgcccataattattaactttagaataaacaattattggaaaaaaaacggtgagaaaaaggatgctatatcaatattaatctaatgctagaaccgtactaatgtaatagctatagattagggctagtttaactccaaagacaaagcaataaatcaagtaattaaatttgtagccagcgcgacgaccatcgtcaacgagggacacatcaaaacttggacttgcatagctctcatcgtacgtcggcgataacgttcataaataagcatttattactctctttttttggggtcgagctgttattttcatagtagttttctacacaaatatctaccctcacggcctccccacatgatcgtattatgcatggtttcaataccaaagatccatattatacgtatagatatacacgtataaatatgatttctttttaaaaaaaaatcatcctatcatcagtcaattcgtgtaagaatactttcacgcaaattaaatataaaacgggaatcataagtcatatagtaaaagtattcggttaattcaatcatataatgatttaagttaattatcgtgttagtacatacactacgtaaatgaaagtttaaaagctgtattttaaaagagaacgtaccgttagcaagatcaagaagaaaatcagccggattcataggaaaagccggcgaaaatccgacggattcaaagtaagccatggcgtctcttccttttccgacgaacaaacactttccttcactcaaaagaagcaccgtatcaaacatctgaaacacacgactcgacggctgatgaatcgacgtaaccaccgtttttcctttcccatgagccaacccggcaagagtctgaaccaaccggagcgccgccgtagcatcaagacccgaagtaggctcatcaagaaccaaaagactcgggtttataagcaattcatgagctatactaactcgtttcctttctccaccagagatacctctaatgaaagtgttcccaacgactgtgttctcacatttcgttaaacctagctccgatataaccgattcagcggctctgagtttaacgtctcttgttagactccgaggaagacgaagcaaagccacgaaaactaaggtttcacgtacggttaagtgagggtaaagaagatcgtcttgtgctacaaatccggtgcgttttaatgtttgtttcgttattttaccgtcgtttataagtatttttccggtgaggtttgatccatggagtctccctgcgactgcgtttagtagcgtagatttgccacttcccgatggtccaagaacggccataaactcgccgggtgatatcattccggtgactccgcttagtatcgtcctctcctccgtcgatcttgtctcatcggacggtttttgttttaatcctaatagtttcttgatattacaagaatcgttactcatgccatggatcttgactcggtaacacacatcaacgaactaatatcaagaaaccaataaaaaaacagagtcaagaacagagtcaaaactagtcaacaatagattagtgtggtttaaattttagaaaatacgaattaaatattgaaaatctgagttttgttaagtgaaaccttgagggtgattgggaaacaagaagatgataataatgagcgaggctcacgaggatcttgagagagacgaggagatgaatctggaccgttcatttgattttcaacgccgtcaaaagctgacattagtgttcctttgtaaaattcagacggaaaatttaaacggagttaaaaaaaacacagagagagagaggtgaaaatggagaaagctgaagaagagattgtgagagctgtatttatggagaagaagtggaacgtgaagcaagtgggtgccacgtcattagattactggtcattgagaaaataacacgtggcaaaacgtataatgccagctggcgactgctgaaaggaataaataaaaagtgttttagttttgtttcttttttctgcttagccactttaaaattcttctttttttgccagccttttttttcttcttcttctgattttttttttttttcgaatatactttctttctctttacagaaatttcaattagtgttttccactctaattgtcaaattgagaatccacctgatttttattttattttgaaaagaggaaagatatatttgtaagactgactattaatcatcatgaaaaatgtgcaaaaactttattttgtgtttgtatgtgtttatgtccttttcctttttttagttaacaatgtaattagtaattaccacataattaattttgaaatcatggtataattaaaaagtatctatatatttgatttctaataattataaaatgaaaaagtatcaaaagcatttattattagtgtaattcaaaatatgtccctgtctaaaatatgttttcacttaaaaactctgacactctttagtatataaaatcccaattatataaaatttaattatgtgcaaaatataactttagatactctaaaatatattgttttctagtaattgcaaaatgcaaaacacttaaaaccaataattatttgtgtaacccaacaaatatctctctttaaaaacaatttccacttaaaaattatataatctagtatataaaatctcaattaaaaataaaaaagtatgtgcctcatatattttatgatttggtttataattattgactatgtatgtgttacaactaattataaattttttggccttaaagttgttaaaatatatttaaatttaaataatcaaaattaatgatttcttttgtcagataggttttgaaattacatttattttagtttattgcttaaattaattggtcttactagctgtttaatttaaatttgaataaatattatgaaattaattatttgattttaatttaattaacatttttatttcatgttattggttattttagaggaaattgtatactagataaattttgatgtaatatacattaacttatttttttttaataagagatattaaaagactttagatggcaaatctatatattttcactgcaaatgttttggaggaaatatttttcaactttatcttttccttctatagatacatatataaaacatatacagtacattgtgctgggtttttttctgaggcaatttttcatacataatgtctttctttctattagaagtttcaaatcgactattccactttttctggcaccagcgatgtctgtttgtatttattgggctatatgataccatgtatttctgtaaatcattcgaaaccgtccaaagctgcataagcttcttttctttggttaaattataatgaatagaaaattcaaatttacgtaaagacttttagtatgtcttgaaatcagaatgttgccgcattgatttactaaaatgtaactttatgattttattttataaacacagttgattaaatctaaaatggaaaaagataaactttataaaacgtgttgcggtgaaactaaattttcgaatatgacaaccacaaatttacacgtcagacttaactcaacatttccaagtcatacgtgtctcggatgaatgaaagaaacttgtcgatagcttagagccgaatgttccttagaccggttgatcaattcaaaaaaggtaaacgtacgaagataaaacacgatcaggataaaaatatggatacacaaaaataaatgtagctgtattcatcttatgcgtggctcaatatgacaaaacatgtatagtagctatcttacgaatattttataaccagcctcccagcctccttttttttgttaatcttgtgcatggtcatactaatcgattacaaaaaaaaatcacattcaccgattcacgtgacaaaatgtatattgtgtaaatattgtatctagcgatcaagaagacgtgcttttacatggatgttacggtggtgcgttttagagccgtcacgacattgtttaaagaccgttctcatcttctgtggtatggaaatatccccgatttaagtcgaagcgttgaccatgacgtgactgtaattgtacaaataatcataactcaaacgctctcgaaaagtcaaagtgtgttatatgaagaaacaaaaactgatttctcgggatttcagtcctttcgtcagagagacacaaacaatgaatggcgtagatcagtttagtttcaacgatagtgtcccactccaaaactgatgacggcgacgcgtgtcacacgcacgtgatgatccactcaacactgtcttttcttttctaaaactcagatccaattttatgtcattcatgattcataacttgtgtgtgtgactgtgctgcttagattttcctttcttcgaacaagggtttacttcaaatgccaccttcgacgacggcgcgtgggtgtgaagcgctgtgttattaggaaacaaggtgagatagaagtgtacagagaatttggaccacatgatctacttatggccatgacgaacgaagtaagcaagcattcccttcttccattttcttttgagtacactttattatatgagtatgacaattacgtcacggcaatataaattagttttcaattccttttttttccctttcaatacggtttctttgttagtctgttttagtccttttcctaaatttaggactctctattcactgaatttaagtattcgtctacggtctgtactcctacacattttttcttagctactacaactaatcattttcaatttataaagaaaaagttaaacgctataactaatagcaattaattttgaagtagttgtcaatttgagtttgttcaactccggtaattaattttcttgaaattttattggactataattaaaaaattgacatccacaaccaaaaagtatataaaaatgtacaatgaatctctcgacaaaaaattatagtaacgaacacactagagaaaagtgagtttagagaaagaatgggctacggagcttaaagaaataaagataatgtggtatataaagatgttagctcgatttaagcccaccagtagttctcagtacacccatttagcccaaaggattcgtcaaccttatactacatctattattcgtactacatctttgtaaactttactgtgaattaatgtcgtaattcttttgggtatatgtatttgatatcgtacatataaagtcttaaaaaacaaaactttgtatttgtggatcataactacaaattaaaacatacaacggacaaaagttacaaataggcagaaaacaaaacaaaacaaaacaaataactcatcgagaccatattttaacgatccaaatttcacgaggccagtagttaggggccttatggcccatgaaatgatgatatgttttatgtcatgtgccattagcaaagaaatctctttgttttcttcttcttttgaatgtgaccagaccagcgacctaacgctctatacgaatgggcaatgtcatattattaattttttatgttgctgttgtagttttttctatctagtcatagtcagaggcggctcaagaatattatgagtcttatttataattgtaaatatacatatttgtctctacgtaaatattcttcacaaaacttagattttaaagataggtaaggtgcgacaaaaaagggtaaggtttgttaatttgttttgttatgttagggtacgttaaaaatatttgatgacacaaagtacacaacctgcgttatttaaaaccggttttgacaagtgtgcaatgatttgctttcacatgtaatttgtgtatttatatggaccttcgattataatgtcactcaatttaaaccattttgaattgatagttgtgaaaagtgttatcaaatgaaaaagcttgaagacaggtcaataaaaaaaacaaaaacaaaattgtagagactaggaagtgcttaaaaagaccaaaaaagctcgtatagtttcttttctttgtagctaactattgtcaaattctaccgccttcttacatttgtatgccgtggtgaattactcgcatgtagatttgtcaatcaatctataacaatttgttgtttttgttcttaatgactcatgtaccccgcataatttttaaaatttaatagtatcctcttgagtctggatagaacttaaaaagatcatgtccctagtggcttcacacaatgtctatgtcgttttcatctctaacgtctaagcccatcaatcccatggggtcgccattctcactcttaaattcatctttacttgcattttcagaattttcaacaaattaaacaagacgtttctctttatccactaatacaaccacatctaccaaaaactaatcttctgtttaagtttctgtgcgtattatcttcacctacctaaaagttcttaacccacattcatataaaactttagactttaagcgtataaataaatcgtttcaaaatagttatacatgactagaaacaaaataataatacttagatgtgataattatgtttagtctttttgtcactatagtaattacaattagttgaataaacaagagaaaaccaaaattattcggacagttttatcctcattctccacagcttaaaaacaagtcgcagaggagaccaaaccaataaaggccaaaaatagagagtttttctctggatcacattatctctttctttttcttcttcttcttcctcatggattctttaagaactcgaaatgtatccaaaagatccgatccgatcaactttccggcgaagtcatccatttcatcccggagatcattatcttcttcttcttccttctcatctttttcctcctgctcctctagctcccttgtctttcccggcgactctcctctgaattctccggcgactcctctccgtctactcggtgtccctttttcatgggaacaacttcccggaaaacctaaagactactctcatagactcaacaaccgtcgaaacaatgaatcttcaaatctattgctacccctccctcctcaccggaatatttcctttccggccaccggaaaaaaacctaaacctaacaattccagtaagaagaacagcttccccgtgaccggaaaagatcccttcgcggctgcgttgttggaatgttccaaagacgaaggaacaaacagtgacaacgatgatgacgtcgacggtgttgaagacgtagatcgaaggtttcgaggaaactccggtggttcaagcaaggtgttgtcaaagaacagcatcggagacaggtttgggttagtaaatctctacggttcttgtcggagaacttgtgcagtaacagagtccattgtttatcttccaagagcaagaaaagctgcttcgtacgataatcttcttccacgtcgtcgctgttgatttgttcgtatttggtgatttactacatatttttgtctttttttgtgggttaaattctgtataattttctctgaatgtgatatattatgggtttatgagtttgtgtttttatttttctctctttagatcgtgacatgaatgtagtataattccgagacgttgtttacttgtagaagttgtaaccataaatccatgatatagcatattcacttacattatttgtgtgtgataattgtttataaactttaattatattatatttgtgttcaattatttaaatttggtggaaccaagtgtgaaagattctgtcattctgtgatctctagctagtttccaattccattccatgtgacagcaagctaagctatatctgcagataaatacaaactatgtaacattgattaacttgttataggattttaaacaaggacacgagcttgtactgacatatgattttgttttttttttaccatcttgaaaatgatgttctcttagcatgcctggaaaatgatgttatcttagcatgcctagggacttgagctgtgtatatttagtgttttcatagagttttggaagtctctaaagaaatagatctttcattattgttgttagcataaggcaataaaaataacaaagttgttgagccaccatgcatgtctttgcagcaagtatttttttttttttgatcaaacaccaagtattttatacgtttcagattaaatataaacaaaatttcttcttaattagatggagtatctatctttatttattgttaataaagacattgtctcgtcttgtttgggggtgagatagaccccactttcccatatttgtgatatcaaaatgacttccgtggaaaaccaatatcacattcgtaccaccaaactaccaatcaattatttgattttaactttcattatttttaaaaagtggatcaagtatttcaaaaaattctaataaaatacaatcgtattgcaaataaatgataagttttaaaatacaatcatacatatgtatgaatacaagatgaaaatttgaacaatgtaatacttcttcacatgttctggtggcatatttaaaatcgaactattataggtttcttttttacacatgtgtgaattgggtttgtgctgttaactatattttttgtggtcataagtttatgtgattaaatttcagggacccggtagaaataaatagcatgtagtacataggtgcaacatattactatctgcactatggagtgaaaaattgaagtcaatagtcaaatatcaatgacaattcataatttcgtactcaaatactgtttctacatccgaatgttacgcaactcacatgatgtaatatttgaatagcttgttcacatttatgtcccacgctgtagttaacatgtcttgatcatgcttaattaagatagattatgatttttttaataatcaagttgtttggtttagcgtacaaattaataatataatatattgtttcggtttaagataaatgtatcacgcaattcaaacatatgtcaaaaaatcaggctgggaacttattcccagaggtttgtacctgttgctgtcttggtttacttaagacttgtgatatcagtttgcaatgtattggaaaataatatagtatttgccacaagattgttccatttcatcttctttttgtattttaatccgtatttgtatcaatcatattgctctctattgcaaggttcgtagtcaactcgcaaacacccccaccttacaattgccagttatcgattatttttacgctaataaatctaaaattccattttgtttcgttttttttttgcaatggaaacatttaaataaatacaaaagaaatacctacgataatggggtatttatacaaaaaaatgaatttgaaacaaaaaaatataatgaaaaaaagagagagttaaatttgctaagaatttattcttcaggtttctgttttcgttggaactaagtttggagttggagcaggagcaggagcaccgagaggaatttagtggggagcgaaaagaacctaaagaaacgtggaatattaatgatgaccaattctctaataacattgttagacataatttaatatgaacattactttcatcattgtcatttgtctgctaatgtattcgcgtgtttgcttttacattattgacttatgtctgaatattataacgccatatagttaaaacaatagacccctaaatgtatcatgagcacatttggtatccataaaaactgatggaaaatcatcacaaaagtgatagctatctcggtttatttagtatattatatcagattttgaagtgacttcaactcagtagtgactatttttacgtactaacttatatatgtaaatattcagcattcgcattcgcatgtgtatgggcatatatattatacataataaatgaaaattggatgagacaagatggaccgctctaagtgtgattgagatgtagcttgagaccaaagagaccgttatcatcatcaaccatcatgtcctctctttagcacatggaaagcaatatactatagaaattgtactatatatatggatcaagcatacgaatcagagtccattttgatgtgaaggcatcaaatctgcaaaattaaatcaagtttcttgagcgacaaagctgatgatatcattcttgcacttggagtattttctacaacataacctaagccggtggttatttaataatgtttagtaatcttgaattccatacatttacgagggagtgtctgcatagttgatagtaatcatgaagaagctaggtcggttcatttcatcaaattatatgttttacaaaaattgtatcaacatgacttgaatccattatcacagtaataaaagtttgaaacggaatgaatacaatattgagatgctgcaagataaatggatataattaatgctttgtcttttctttcttcttttaagccttaagtgtcacaaacgtaaacatcaagattcaataccataatgatataaaagatcgtgcgtgaaccatgtgaatgtgatcaaacccaaagtgaagctaacaagtaataacacatgtcaaagatatacaaacatttgtatttagagtgtataactataaccccatcccaagagtgtcgaaccaaaaaccataatctaagagatttataccgatcagatcacggaagaagttatagaaaaccgcatctcgttgattctgattttcgacaaataagatacaagccagcccaccgtctgcacggatactcaacttccctgttggtaatcgagttaatttcgaattacatgggtcaaattagaaaaactgttcttgttttatttgtttttaaatgggccatggggttttaatgtcttagtatttaatgggcttatttaaggccgactctaataatagacgaaattaaaaataggcccatttatccgttaattttgccatggtttttttttccatgaatattgcaagttttttttttggtgtaaatcttacaaggtttaagaaagaaaaagtgaattaatactactatcaaaaccgggagtaacagctaattatgtgtgtattattatggttttggatagcaatattatttaagcagataattattattttttgatataacggaagggaccatcatgttccgttgtctccaagagtttacgaacagatacaagttatctagaagattagttccaaatcataatatatatatttttttaatacaagtatacaagtttccacatcttttgttgactgtttattcgagaagaaacaaagataacaccttttgtccgtgtaatcatatatcaactcgtgggtcatgactcatgtatgatcaaacctaaacatcttcaaaaccggtaaaaaaatcagtaagtaaaacaaatattgagctgtaaaaaaaattcttagaattgttttaggcagatttatctttagaatttagagataaaacaaaaattgttaaaccaacaaatggatccacaaaacaaaaccatgagctctgaagtcaatctcaccagtcaccatgactcacttactacgtgtatctgtcttttttacatatattttgaaagtttcatcctttatcccgatggatgcgaataatacaaataacctaacaaaactcgaatcagagaattccagatattacttacataagacaattttagcaattagctttcaaatctcatctctttattctctctctctatctcttctcctcaagaaccctaaaaatctccagaaaaaagatcccaaatttcgtatttcaacgatctgaatctctctctctttcgggtttattttgtttcccgatatggtttagaatttgtgatttaaatggaagctgacgtgtcaatttcctgaaaaaacccttatcgcgaaattttccagattaccaaaaaaaaaaagattgaaacttttttcgatttgtttgaagaagaagcacggtaggaacgacgacgatgaatcgtgctttggtcctacttttatatgtttgtactgtttcttgtttagcttcaagcaaagttattttgatgaggaataacatcactctctcttttgatgacatcgaagctaacttcggtgagtctcttccttatcactctgttttcatttcagatttttgatgaattgaatctgtaattggggtcaacgcataaaaaagaagagatttttaatctgtttcttgcaacagctccgtcagtgaagggtacaggtgaaattggagtggtttatgtggctgagcctcttgacgcttgtcaaaatcttatgaataaaccagaacagagctccaatgaaacttctccttttgtgttgattgttagaggaggctgtagttttgaagagaaagttagaaaagctcagagagctggtttcaaagctgctattatctatgacaatgaagaccgtggaacattgatagcaagtatgaaaatttatgtcttgatcttgtgattctgttgtttctacattttgctgaaagttttgagatttgcagtggcaggtaactctggaggtataaggattcatgcggtctttgttacgaaagaaacgggagaagttttaaaggagtatgcgggtttccccgatacgaaagtttggttgatcccaagttttgagaactcggcgtggtctattatggcggtttcgtttatctcgctgcttgcaatgtcggctgttctcgctacttgtttctttgtgcgtaggcatcgaataagaaggcggacatctcggtcctctcgagtgcgtgagtttcacggtatgagccgccgcttggtgaaagcaatgccgagtcttatattcagttcgtttcatgaagataacactactgcattcacttgtgctatttgccttgaagactacactgttggagacaagctcaggctcttaccttgctgtcacagtgagtacattgtatacaaaatcctgtaactcagggcacatttgttagaacttagaactaactaacaatttctgattctgtttttgtgtgtatgttttcagagtttcatgctgcgtgtgttgactcatggttaacctcttggagaactttctgtccggtgtgcaaacgagatgcaagaacgagcacgggagagcctccagcttcagagagcacgccattgctctcatctgctgcatcgtctttcacttcttcctctctgcactcttcagtcagatcatctgcactattgattggtccttccttgggctcattaccaacttcaatctctttctctcccgcatacgcaagctcatcctatattagacaatcattccagtcttcctctaaccgtcgatcacctccaataagcgtaagtcgaagctcagtggatctcagacaacaagcagcttctccatctccatcaccatcacagagatcatacatttcccatatggcttctccacagtcactaggttacccaactatctcccctttcaacacgaggtacatgtcaccgtatagacctagcccgagcaatgcatcacctgcaatggctggatcatcgaattatccgttgaatccactgcgttacagtgaatcagctggaactttctctccatacgcctctgcaaactcgcttccagactgttagaaagtctacagaaccaaccactcttggttcaggtcatataagattatttcttttgcatttgagttttactacgaaacgtacttctggcgtttgtgtgtggtgtgtgtgtgtgtaacgatgcttttatagtcttttggttgagatgaaacatcatcggatttaggttagagagattttaacacttcgacaattacacaaactcggttcctttgtacaaagaaatatgagcttatgtatatacacgtctctttccttgttattactatctgatcactcttatctctatccgtttgcattgatacgatcctatctagtaaataggcccagtaggcctaattaaggtccagtaacataaactgatttgggctaaagtgaatgaagaaaactccatcccaccgttggccggtctattctcctccggcgtcgttgaggatctccggtggtttaaggaatcaatcacaccatgccaatgagatacctcaacgcaatggccgctctactaatgatgttctttactctcttgatcctctctttcacaggcattttagaattcccatctgcttcaacttcgatggagcattcaatagacccggaaccgaaattgtctgattcaacatcggatccattcagtgatgttcttgtagcttataaaaaatgggactttgaagtgggttgtgctcggtttagggagaatcataaagatgcgattttgggtaatgttagttcgggttctttacaagaatttggttgtggtaagcttaagatgaagcatgttaaggtattggttaaagggtggacttggattccggataatttggaaaatttgtattcttgtcgttgtgggatgacttgtttgtggactaaatcatcggttttggctgattcacctgatgctttgttgttcgagacaacaactcctccactacaggtaataaaattgcttgttgctaatcttgtcaaagtttgcgttttggaaagtagttatagatttggatgattgggacagattagatcacactgtctgttttttcttaccccaaattggatgtgatcttgtgatgtattcttcactctagcagatcttttagttctatgactcactaaaagatactttttcattgttgtctatatggttcaagaattttggtttgtaaagtggaaaatttcagagtttaattgtctacgtgagcttattgtaaaccagaagaatctttgtgtactgctattcttgttcttagtcaattcatttttgaaagttggacatagatatggataataaaggcaaactaaaatctcctatgttcttattttcccttcagtgcctgcttcactatagttttctttcaataattggatcccattgatgctgagtttcttggtttgtttccttagagacgtgttggagatccgctccgtgtgtacatggagctagaggccggaagaaaacgctcaggccgtgaagatatattcatcagctaccatgcgaaagacgatgtccaaacaacttacgccggttcgctctttcataataacagaaactatcacatctctccacataaaaacaatgtaagtaacgttttatacacccattccatactgttcttctttcatttcatcgttttttaattcgattgttaaacattgcacaggatgttctggtgtattggtcttcctcaagatgcctccctcacagagatcgtctagcaaagagcctactcgatttgattccccaccactcctttggtaagtgtcttaacaatgttggtggcttggactcagctctctctatgtatccagaatgtgtcgctgagcacaacgctgaagcaaaatggtacgatcacctccactgcgctatgtcacactacaaattcgtccttgcaatcgaaaacacagctgttgagtcatacgtgaccgagaagcttttctatgcgctcgactctggttctgttccaatctattttggggcctctaacgtgcaagactttgtccctccgcattccgtgatcgatggtagcaaattcggctcgatgcaggagttggctgcgtacgtgaagcggctcggtgatgatcctgtggcttactcagagtaccatgcgtggaggcggtgtggactaatggggaactacgggaaaacccgtgcggtgagtctcgatacattgccatgtcggttgtgcgaagagattagcagaagaggtgggaagaacgccggagtttgatgagccacatgtggtttcatttagtgtgggtttatgtaaatgtgatcctatgatctgtttctgttacatatgataacttttttgtcctatatagtctcagatcatcaagtaaatgctatcaaatcatgtgttcaagggacaaaaacagaattattcacttatgttagagttaaatgggatctcttggtgtagcttttccttaatcaaaaattcaaaatagattatgattgtgattgtgtagactaagttaaaaaggacaaaaatcaagtcataaccactttcctatatttacctacaataatcagaatcatttaaaacttatcaaaactaaaaccattcaaaatattgggtgaattaaagtttcgattgtttcaaaacgtctgtataagtatgacaaagagacatcaaaattcagattattgtcacatttttatcaccgtaaaatcttagaagaaagaaagataattttttttttttttttttaatgataatcaaagatattatgttagtagtaaaatagagaatggaaaaaataaattaattacatagacaaacgtgtaggtcataaaatcatttggtacatcaaattcatacatgggtcttctggtattatctattaacagctttaggaaagaaatatgagatcagatttttaggctaatcaaacaaaattttctataaaaccatcatatacataacaaatatgcacaagaagtgcataagaagaaagaaatcaaacagaaatgcaaacaaactagatatgatgattggtgatatatatatcttgaaattgtttctatccgcaaaaaagcaaacgctccaatcaacatgttttgccagcttgctaggtctctctataaatattggttccttctcttaacatcattttttcttctctcgagtgttgttaaagtttttgtatagtttgctatttttcgtgaatcaataaaaagagctttgttgaacaaattagctatctccatggaccgaccaaagaaacgggacgtactacgagcggtgaattcgatgagctctctatgcgagaatggcaaaaaaaaggaaggaattcgagcagtaaactcgatgtgctcgatatccgaactgacggatgaagacctactgtctcggctgcttgaccgtccaagactcaaacttgaacggaaaatatcatacgaggaaatgtctttaagcctttacgacagtgcacattcactagacggtaagtctggttgggatactccggttttctccatgaaagactcaatggatcgtaacccgatggtcacagaagcttgggaggctctctgccagtctcaggtctacttccggggaaaaccggtaggaaccatcgccgcctacgaccatgcttcagaagaggtcttgaactatgatcaggtatggttgtgttttgtttctttctagtttgtttttgctgttttggttttggtgaatttgatgaactcttaagacataaaagagaagaacaaaattagagtgaatcgcacgtcaactagaacatttaagcaaattacaaactatgattgttctgcctcattacaatttttcttgtctattgtaacttttaaggtgttcgtacgtgattttgtaccgagtgctctagcatttctgatgaatggagagcctgaaattgtgaagaactttctcctgaagacacttcatattcagggacaagacaaaatgatcgacaagttcaagcttggtgacggcgcaatgccagcaagctttaaagttctacataatcctatcaagaagacggatacgattatcgctgactttggagaaagcgccatcgggagagtggctccagtcgactctggcttctggtggatcattctcctccgagcttacactaagtctacaggagatcattctctagcagagagaccagagtgccaaaagggaatgagactcatactttctttgtgtctctctgagggttttgatacttttccgactttgctttgcgcagatggttgctcgatggtcgatcgtagaatggtaagcttgctctcatcctcttgactataaaattccataaatcaagaaaccaatactttttttggcatcgaacttttgacttttgaatatgaccgtctcaaagaacatataggcctcaattcatatacatatatatcctaagtgaaaatgaacctcttgaacgttctctttttgaaatgtactgtgcagggcatttacggctatccgattgagatccaagccctctttttcatggctcttcgatccgcactctcaatgctgaaacatgattctgagggtaaagagttcatggaaaagatagtgaagcggctgcacgcactaagcttccatatgagaagctacttttggctcgatttccagcagctcaatgacatttaccgttacaagacggaggagtactctcacaccgcggtaaacaagttcaacgtaatccctgactccatccctgattggatctttgacttcatgcctctccgaggtggctacttcgttggaaatgtcagtcccgcccgcatggacttcaggtggtttgcgttaggaaattgtatcgcaattctttcctcattggccacaccagagcagtccatggcgatcatggacctgattgaggcccggtgggaagaacttgtgggagagatgccgttgaagatatgttatccggcgatggagagtcacgagtgggggattgtcactggctgtgaccctaagaacacaaggtggagctaccacaacggaggctcttggccaggtgagttaccttcttttacaagtcattgatagatagttaatgggatctaatgggcattaagttgtcaaaattaccgaaaacattatataaatataatttaaggtcataaaaaacatgagaaaataaacgaatgcaaataaatatgatatagatgctaaacatgagcgattgaagagtaatagtatagtagactaagatatactatatgattagggaatccgatgccgaaaccgacattaattcttggatttgtttgccgtctatgatggccaaagaatattcaactcttaaatctgtttgaatttttggtttgtccaaaaaataagcagagtttgtttttataatatctttattgtaatggtagaaccaaaacaagatccacgtaaatactttcattcaaccctattttctatttctaacgccacatttgattaattttgttttttgtttggaaatataatcattcaatcaatattgttgactcatgtggctgatgcaaaatgtagtgcttctatggttactaacggcggcaagcataaagactggacggccacaaatagcacgacgggctatagagttggcggaggcacgactgttgaaggatggatggccggagtactacgacggaaagtctggaagattcatcggaaaacaggctaggaaatctcagacatggtcaatcgctggctatttggtcgccaagatgatgatggatgatccaacgcatgtgggaatgatctcaatggaagaagagaaacatatgaaacctcctcttagaagatcttcttcttggacttaaattatataatttcgttttgtgtttttttttcttcattgtagggccttttataattaccattaacagaaacaaaaatattcatagctcccaaattaactttaatatgtggaataatcaagaatggttgtcttgtgatcactatggtaccatggtctactacggaccaccaggtaataaggcatgggtttagaaggagtcattgactattgacgaatcaaaagtcttacaagacacaatccgacagaaacaaattagaaaaagaagaaaaagacaacagagtacgaccgttcgattaatatcatgcatgtacttatacaaccctacacttccagtaatttttggtaactttaccaagtcaaacgcagtataatctcttatgtaactactttgtgatacttgaggttatggatattttcgaatatgtctatttgagttaaaataaagctacggcctacgtcacatgtcatttaaaaagaaactaggttgaaattctgtgctatactaaactaaaagatgatacaagaatcaattacttttataagcaaattgaaaatctcaaaatacaagatttcatataccattttaagtgcatataggtagactaatagaaaagcaggtgaaactctatgagcctataatatataaactttgtgattctttatccacaaaatattaattccataggccatagacactttagatagtgtgatacaaaatgagcaaaccctaaatcctattgatttaaggtttctgatcgtacaacttcggtcaagttcatagaaaaactagggaaaagattcgtaaacaataatatttttctctgaaaatcatgatcaaattctaaaaaagagagagtattggatcgcactttgtatactttaggcttgacagggtcaacgagttgcttttatgtccttgttttattccagattttcggccatttacttttttttcttttctttaaattcttttggtgggaaaaacttttttcttttactggtaaagtaagaactgttttatctatatacattatcatggacttaaaacttgaaagctgaaatctaaaaattagtgataaagtttggacgaaaaattagcagttaactaaaatgatttgttttgagaccaaaactaataataataatcaagatctagctttttttcatgtgggaataagaataataaaaaggaggcaaaacgggttgttgaggagagtgattaacatgaatcaccgctcaccagtaacgtctttatcgacaaaaaaacaatttaaaaatggtgagtggattagtattagcaaccaccaaatagatttaactataataagataactaaactaattagctgtatataatttcttttaactatacattaattaatccctctcgtaaaataagtagatatgattgtagtcttttcaagtatgaacaaccaacaaatctcacactaaatatctccttcgcgttaacttaaacagtacacatcacgtagtctttatcaaaacactcttaaggttaaagaaataatacacctaaattaaagagttaattaggtgatgatcacggttaaagaaacttagatgggaaaatcaaggttaaaaaaattcacctaattttatttttattttataaaggttcttaattacatcactgatctataggattagatactctaagaatgttcatgttccattctaattaattatatatttaaaaaacaaatccgaaaattagcttgcataattatccaaaagtaacaatgatgatttttttttttttaactgtgtcaattttaattttaaccatggcaaagcaaaaaaatgaagggttttcgacaagaaagaagaacagtgtaagaaacaaataagtcaataaaggttgaattgaatagagaatttagatggatagtttcttcctgcaatcacaccattcatatccacttgtttttatccttctcaatcattctctcttctctctccctctctgttctcaaactccattttagtagcaagcttagatctcctccttccacagtcactttctcttctttctctgcttttgtttcttcaatcgatttgcttcagatttccccagattatatagaattcgatgtcaagacacagaattcacatgggttttgtctaaaaatcataaaaatcatatctttttacggatttgaagatgaatcagaattcctctgttgcggaggcgacgcttcagcttaattccggtgaaaaaccatcgccgggatcgattccgtttatctcctctggtcaacacggaaacataagcacttcagcgacgagttcgacaagcacaagctcaggtagtgctcttgccgtagttaaatccgccgtgaaaaaaccaactaaagatcggcatactaaagtcgatggtcgtggacggcgaattc

SEQ ID NO: 1241 - DNA, 38629 bp, Arabidopsis thaliana
gtattgaacctttttgtttgattaattatttcttgttaattaaacccgttttccaaaaaaaatttaaaatataaataataataataccctggaaaagttatcaaatttgatagatatgtcgatttcaaaccttttaaaaagtaaaaaattgtcatttttttatatttaaattgttactataaagtaatatgaacttttcaccaaggttaatagatcaatctaataacctttataaaataaggttttatcgtagagtaatatctaagctttttaataaaacggaaattaatatcactcagacaacggtgatggtcaggtagcatgccttgtgtggttacttaaatatgtaaccaactttgaaagttacagagagtaagctgctacgtagttaatttcgggtccagctggcagagaacgtgcatggtgttgttctgtgtgagacaatcaatttttgggcaagctgtgtatatatccgaaagacctactcatatttttttaaattttttttggggggcaactagagaacctactcatctttaaagtttccgtttattactaaactttatttaaatatatgtgttttctagctagcttatgccattttgtataacatgctagcctggtttacccctatagtgtggggttgttcttttctagtagttcaaccaaacgacagcgactaggaaactgaaaggcccaaatgctttcctacaccaacagtcataagtaaagctgtttcaaaattctacttcaaaaataaaggcgcagcaaccaaaaattgagctgccatattcgctgaaaaaattcagcgctaaatgttaatcaacagtgcttgctgtcgcgttagtctcagtgtatcgctcgagttgttatttaacattgccctggtcacattaacctgtccattttggctccttgctttgtgaagaaagtatgagattgtgcacatacaatagcatagactaagcaagtcagccacatgggacaagcttaagcaccgcttttgcttcttcaatttcagcaaaactacaagaaatcgctgccttgttgaggaatctgcaacaatacataaggacacgaaccaagatggtatagaacaattgtggcttgaaagattttcaagataagtaattatgttacctgaactgcttggaactctgatgagtgagaagggtctcgttggggttagctatatatgaatctggttgtgttctattctttaaagccgccatgaaaacatgactgattctagcaaaaggatttttcttcccttctcttgcagtgctaaaacggtaagtcttagtgccgagaaggaagagaaacagagcaagtagcatgaaaacacttggaataccaaatcctaaggaccaacttaggtcctcttgtatgtagctagagaccaaacgaaaggtcaatatgctaacacaacttccaaacatcaaccaattaaagtaagaactcttgtcttttgcatcttttatatcatttccatcaaattgatctgctccaaataccttaatacatggtttgtaaccgccttgtcctattgctataagatacagagagcagaagaagagaatcacttggagttgatttggatctttagagttagaagaagtcatggctgaaaaagacagcaacccaagtccctgcttgtttcattaaatcatttcaagaaacaacaataacatgttttagtagagatgtttttaagaggagattgttatataccatgatataaagagaatacgcgatcacgattgtacgaaaacgtccaagaaacgagtcagcgataaagcccccgagaaggggaagaaacgacaccccactccatgcgttgacattggctgcagctgcagctgttgactcccctaatggtccggtcagatatgttatcaagttcaaggaaatcccataaagagattccagttcaatattttgctttgaaaaattagtgattcaacaataagttaaaagagtgtgtcacaagcaagttggctctgaatagagatcataaaatattcttgtcgaattttatctttttccttagaaatttcaaatttctttaacagaaatcttataagcttttgatatactcacgaaatttctttcgcctgaggaaattcttatttccttggttgtgaaatcccagcccaatttaattggcagaacagaggagagacaatttaaaaggtgtttgatctgctgtagacatatgacttggcgaaccataagtagaaggcgaaaccaatgaagccgagacaagccagtagccagtagaagtaatctagatgagcttggtccaagtcattatcgaaccagctcctttgaccatactggttcgtgattttatcaatgactgatatcataaagctgcttaggtagtttcccgccccgtatatgcttaggttcaaagccataccaacgctcctaagctcactagggacttggccgtagaagaactcttgtaaacccaccattgtgaacatatctgagactccaaagataacatactgtggaatcagccaccacacgctcatcggtatggagagttcatcccgggcggcttggagcctttttgtctcgaccaatgcggctaataccatagcaagaatggagaggaaaatccctgtaccaatcctttgtagcgttgtgatacctgatgagttttgagtgaaggaccttgcgaatgggacgagtaagcggtcgtagattgggatgaaaacgactactgagaggtttatgaaactttgaagtgtagctgcaggaactaagagtcctggtgagattgacctgtccattgtggctccttgctttgtaaaaaaagtaggggattgtgcatgtacaatggtgtagactacagaagttatccatatgggaataagcctaagaaccgcctttgcttcttcaatttcagccaattcacaagaaatagctgccctgtctaggaatctgcatagtatacaagaaaagaaactataaacttcgttttcttataataatttttctaaatatcagttggtatatataaaaacctagatggaacaatatacatttcttctctaatatatcgacgtggattcactaatagaaaccaagatggtatgaacaagaagattctcaaaagaacatcgctgttaattatgttacctgaactgtttggaactctggtgagccaggagaaggagagtctcgttggcgttcgcgttagcaatatctaaatcgggttgtcttctgttctttaaagcctccatgaatacacgactgattctggcaaaagggtttttctttcctactctctcagtactaaaacggtaagaggtagttccaaggaggaagagaaacagagaaagcaacatggaaacactaggaataccaaaccctagtgaccagcttaggttctcttgaatgtaggtagagaccaaacgagtcgtcaatatgctaatacagtttccaaacatcaaccagttgaagaatgaactcttgtctcttgcctctttatgatcatttccatcgaattgatccgctccaaataccttaatacacgggttgtaaccgccttgtcctattgctacaagataaagagagaagaagaagatagtctcttgcagctgattcgaatctttggactgatgagaaggaatcatggttgaaaaagacagcaacccaagtccctgtttgttttgttttcgttaatcatcaaaatctgtaacgaaactctgattatagaaacgttagagaggaaatttttttatctaccaagatatagagagaagatgagatgattatagtacggaaacgaccgagatacgagtcagcgagaaagcccccgagaagcggcagaaacgccaccgttccagtccaagcattgacattcgctgccgctgcagctgttgactcacctaacggtcccgtcaagtacattattaggtttgacgctataccaaagtaagcgaatcgctccgccatttgtacaactacaaaatttttagaaacaaaaacaaagagaaattagcaaaattcccgggagaaataataatgaagtaaggaactaaatcaatttttttgttgctaaaaaagtaaatatcatgtttatttaccgatgatgagcctcgctgatttccatccaccggaggtattttctcggatttccagaaaaccctcagtggtgtttccgagctcgtcggcggaggagtaggtgatagccattaatgtgtatgattgattggtcttgataaaataatatacaaacaaaatgtttattatattgtttctgtagtatatataggtgaagattatatgatgaaggtgtggacgcaagtggcttagctgacaaggcaagttatattaaatgatgaccacgataacaattaacttaactcgtgattcgtatggactttgttttattagcagaagttcccgaaagggccatatatatatatatatatgttttgtatatttcgaaagttgttggaacatgctcaactagttaagattccttgtgttcttgagcttacatatatgcactgtcggcctgaaatttcgagggtctaaaatttttaaaagattttatttgtaagtttttaaaattggaggtgtttttgtaaagaaaaaatctctagaattttggagaccacaatcaattgtttattgtcgctgtgctcacgcacgacacatatgtgattaagaatattgaagataaagaaccggggaatggaccacaaaatttgttgttagttatattttataatggtttaaacgaatggaaaacgaagaaaacctataaacatgtataaatcaattttatttattttttaaataccttgtccacttacgtcttatttttttaattttgtttttatgtattaaactcttgcatggggattaaaattcaacaagtttcaacgatctttatagcactggccgtacattcatacataaatatttgcataatgttatttttacgttagaatcgtggaatcacaatttaatatcaaatttgcatacttgaaatatagttacaaattcacataagaatcatgatatttatggtctgttttgtcatttgtgggagttttacgttagaatcgtaacgtccataaaaatcaaaaatcacaaaaagaaactctccatttcctcctccatgcgtaaactacactacgtccacccggcgatatatataggacttggagatgaacaagaacgtaaagaacccaacggcactaacaaccgcaagtaaccaatagaagtaatctagatgggctctgttcagattactgttgaaccagctgtttccggcgtctcctccagtggccaaatcgatcagatagatgagtaagctgcttaataagcttccaacgcccattgcacttaagtaaatcgcgagaccgaggcttctcagctcagtggggacttggctgtagaagaactcttgcattcctactaaagtgtgtacgtcagccaatcccagtaacatatactgagggaataaccaccatatcgacattggaagagttgttttcggttggtctataagtccgtattcttttgcagtctcgagccgctttgactcaaccaaagcagccaccaccatagtgagagttgctagtaccattccggttccaattcttttgagagttgtgatgccacaaggatctttagttattgaccttccgattgggaccaaaacacggtcatagatggggacaaagagaacaattgatatgctgataagaacctgaagagaagcaggtgggatctctacacctggaaatattgttctttccattgtgacaccttgctttgtaaagaaagtcatgtactgcgcgaaaggtatcgcgtaagccaaagttgtaagccatactggaataagcctgacaagagctgtagcatcttcgacatctctagacttgcatgccacttctccttcatcagaatcatttgggacaagcaatgctttgttgagaaaactgtcacaagaaagtagaatcttataatcatacaacaagactttgaagttcgaaccacaacctatatgttaaacatacctcagctcctctggagattcttgagatcgatttgcctctattagctcaactttgcacaagtctgatgaattcaatctctggttcttgaatgctacaaagaagactctacctattctcgtaaacgggtttgtttcctcttcttgtcttgttttactaaacctataactctttctccctaaaacgaaaagaacaagagagatcaccatgaacacacatgggattccaaacccaagtgcccagcttacattttcttggatgtacacaaccactaaaatcgctaggccgattcctgcacacatactaaggtaccaccagttgaagaaagagcttctatcactattctcttgcgggttcttctcatcaaactgatctgcaccaaaagcctgaacacaaggcttgtgtccactttgtccaatagccaccaaataaagagagaagaagaagagtgcattgagaaaagaagaaggtgacgaggtcacttcagtattgttgggaatcagaaacgcagataaagtcagaaacgccagtccctgacatcaaattcaaatattctcaactcaatttctacttcttctatatcagagaaaccgaatccaaatcaaaccgaaaaggaataaaaccgatctaaaaccgaagtttctttgaaaattaaaaattttatttgacttaatcaaaaccgaaaccgtaccaaaccatcacattgcggttgaaacgaatcaatttctacaattccttcactaattgtaaaattcagatcgaaagagaagagacagaaggagacgaaccaggacatagataaaagaagcgatgataattgttatgtagcgaccaagaaaagcgtcggcgacaaaagctccaagaagaggaagaatagtggaaattccagaccaagcgttgacattagcggcggcgaccgccgtagattgaccaagtggtccagtcaagtagcttatcaggtttgatccgatcccgtagttcgcgaacctctccgccacctccacacctgcaaaaatgtcctcagggattcaaagaagaggaaattgaaaaacagagcagctagtgattgaaggttaccgataatgaaccatgcagctctccatctaccggtaatagaccttctggcggaaaagccacggtggtcaacggcgtcgatgacgtattcttcttgaagagaagttttggaagtcgtcgtcattttctctgtctctaacgaaagagacaataaacaacatatagaaacttgtttgagtttgtttgaccttcaaaaggtatttcttgtctttttatgattaaaaaacttattttgtgtaaagttacagtatacaaactacagagaccatcaagaagtaacttaatgttaaagaagcatttttttttcatttggaaactacactcgatccactcgacgatagatgtacgacttggaaatgaacaagaacgtaaagaacccaacggcgctaacaatcgctagtaaccaatagaagtaatcaagatgagctctgttcagattactgttaaaccagctgtttcctgcgtctcctccagtggccaagtctatcagagagatgagtaagctgcttaataagcttcccacgcccaacgcgcttaagtaaagcgcgagaccgatgcttctcagctcagtagggacttggctgtagaagaactcttgcattcccactaaagtatatacgtcagccaatcccagcaacaagtactgagggattaaccaccatatcgacattggaagagttgcttccggttggtctataagcccgtgttctttcgcagtctcgagccgcttgaactcaaccagagctgcaattaccatagtgatagtcgacagtacaattccagttccaattcttttgagggttgtgatgccacaaggttctttggttattaacctggcgatggggacgaaaactcggtcgtagatggggacaaagaggactattgatatgccgataaagacctgaagagaagcaggtgggatcttaacaccaggaagaattgttctatccattgtgacgccttgcttagtgaaaaatgtcatgtattgcgcgtagggtatcgcgtaagccagagtcgtaaaccatactggaattagcctgataagagctgtggcatcttcaacatcactagacttggatgcgttttctccttgagaagaatcattgggtacaagcaatgctttgttgaaaaaactctgtttctctggggatgtatttgcctctagctcaactttgcacaagtctgatgaactcaatctttggttcttgagtgctacaaagaagactctacctatcctcgtaaaagggtttatttcctcttcatgtcttcttttactgtacctataaatccttctccctgacacgaaaagaacaagagagatcaccatgaacacacatgggattccaaacccaaaagcccagctgaactcttcctggatgtatacaacaactaaaatcgcaaagcagattcctgcagacagactaaggtaccaccagttgaagaaggagcttctgtcagatttctcttgagagtctttttcatcaaactggtcagcaccaaaagcttgaacacaaggcttgtgtccactttgtccaatagccaccaaatacagagagaagaagaagagtacattgagaaaagaagaagttgaagatgtcacttcagtagtattgggaatcagaaacgcagataaagtcagaaacgccaatccctaacacatcaaattcaaattcttctttaagttacttctcaatcatgaagaacaagtaaaccaaaagaaaaaaagactaaagagaagagaacgaaccaggacgtagataagagaagagatgataattgttcggtaacgaccgagaaatgcgtcggcgacaaaagctccaagaacaggaagaagagtggcaattcctgaccacgcgttgacattagcggcggctacagccgtggattcaccaagtggtccagtcaagtagcttattaagtttgatccgattccatagtaagcgaacctctcagccacctccacacctgcaaatatattctcagagagattcaaagaggaagaaattgagaaacagagcagtttgtgattggagcttaccgattatgaacaaggcggctctccatctaccggtattggatcttctggcggcaagtccacggtggtcaacggcgtcggtgacgtattcttcttgaagagaaatttctgaagtagtcgtcattttttcctctgtctctccaacgaaagagacaagaaacgtgaaactcgttttgtgttgtttaaaccttaaaaagctatttctttgtgtgtgtttttttatgatcaaataattgatgtggaaagtaaagtaaaaaagagttttacagagcccaataccactagactatgaaccctcttctaagcccaatgttgggatttgacccagagcattgagggggatccagaatctaggtgaatattaaacctaatgtcactctttgatagactaatgtctttcttttgaaacaatgagaattaataactagtactctagtagtacccttcaccaacaacaagcacggacgtatggccttccttttcatttattatacactgaagagttcttgccacagaaatagaaatgttaagttcaatttcgaaatacgtggatacttttctgacacacctttttttttttttgtcatcctctttcactaggagtattatctcttgaaattttggttgaagaaaaatatctcatgaatccacgtaccgacaattacaagagatagagaatgcataaaacccctatgaatggtgtcaattataattctctcgacaatcgccactatctcttggacctatcgtacatatatatagtgtggtaaagaagagttagttagcttctcaacaacctcatttaattaatagctattatgtgtttataaataaaccatttgcatatatatgtaatttgtaaaataataccataaaactagaaattggaaagagagagagatatggcaatagaaaggcaagtgacggaagcagaggagccagtaagtccatttgcacgcttgtttagcttgccgggtctcgatgtcttcaacattgtaaccattggatgcaaaaccgaaggcaatgcctcaaccatcgtcgaaggcataaagaacacattgatcaaccatccacgcttctctagcatactggtacgtaatcaacgtacacacacatatacaaatatgcacatgtacacgcatttttattgttaatttataagttaagtttcatgattttccatttcaaaatcaatatcaaatgagtgtattgatccatatccacaatatattactttagggttcctctcattcagatgtaagattcctaacattacatgatacttgtaggtgactggtcatggtgagcacaaaggaaaagctagatggattccaacgaaaataaacgtagaagagcatgtcattgttccggatatagatcccaacattgagaatcctgatgagtttcttgaagattatacatcaaacatggctctttctccaatggatatgtccaaacctttatgggagtttcatttattgaaacttaaaacatcacatgcggaagctgtgaccgtggctaggttccatcattctttgggcgacggaatgtctcttatgtctcttttactcgcttgtactcggaaaacatgtgatcccgaggcattccccacttttgtggctccgaagaaaaacaaagcgaagaacgtttgtttttctttggtagcttggttatggttcatagtaagacttatgttccacacttgtgttgaagtcatcaagtctatagtttttatatgtcgtgcgagtgacacctcagctcatataatgggaaaaccaggagctacacttagcgctaataagttcattcatcgaatcattagtttagatgatgtcaaaatggtgaagaacgccatgaatatggtacgtttgcttaattagtttcctatttttttattttctatttcaagatgatttttatgttctttttttctctgtttctattagactgtaaatgatgttctttttgggatggtacaagctggtctttctcgatatttgaaccaaagatatggtaaatcatttactcttgttcaatatcataattaaataacatttgtaacatattcttacactttttctcgaatttgtgaacagatcttgaaacatcttcaaagtcaagaaaaaatctacacaatatcggtcttcatggtgttgttttctttaatctaaggccaaatagaaatattgaggtgccgaagaacatataccccaaatatataagtgcttcttattttatgttgtctttataaaaatagctagtaagaatctaacacataagtctatatgtaggatttggctaaaatgatggcaaaaggttcaaagtgtagatggggaaactcaataggttatgttctgattcctttggggatgaagccacaggatgatgtatttgaatatgttcgacaagccaaaactatcatggatggtaaaaaacattccctcgaacctctattttcttatggattgctcaaagtaacaatggaggttttcggattaagggtaagatactgaatcaaacatgattttaatattatttttttatatagtatgcgtgtctgatcgacatagatggatgtgtgggggtggaaaacagggactcaagactcttgtgaagagaatatttggtagcacaacaatgatattctcaaatgtggttggtccagacgaagaaattagcttttttggccatcgaatagcttacattgctgcaagtacctttggtgtcccacaggtactctcttacacataaacctgttctattcataatctattatagttggggaaccttgattgatgaaactaatttcgaatgtatttttctttctttaacaaaggcactcaatatctgtattcaaagctatgtggacaaacttataatcaacattggggttgatgtagacgtgattccagaccctcatcacctttgtgatctcatcattgaagctctccgcatgatgaattctgctgctccaaaaaaggtttttcatgcttcaaaggtttaaacgaaatgtttggcgtacaaaagaattgagcatggaattattttcaataccttgcctcctaccatctctttaatttttattggtctacgaccatctcatgatatatgagtttatcatctttctatgtactacactattactgtgtgagataatgagtttcggttcaatattttgtctttttcttgtactatgttctcgtctattttatatcgcagtccttatatgtgaaacacaacctctaacccaaaggccaaaagtgaagaaggcatgacctagcaaattacaaaatatgtatacattactaaatattacattcaacaaccagaagaaccctgataccgtgactggtaagtcagtaaacaacaacaacaagaacaacaacaaaaaagctaagttagggtttgggaccaaaagagacgtaaaagacaacaaaagcattgatcaacaagcggcgccgagtctctgaccgagataaacaaagtgccaggttagagacataagcgtcaatatattcaaccaagaggagtacgtgttgagcttgctcagcctctcactcagctgctccaatttccgccttagctcctgctcactcgtcctctctcctcctcttccttcttccttttcggccttcattctctcaaacatcgcctgcccacaacagtataacccaaccaacattgttttactagaagatcccatacaaaaacgacccatatgcatggtctataaacaaaagtagtataatagccagagaagtgtaaactgaccttcgtggcacgtggctcaacaaatgacttattagcctcgatcataaagaaagaggacaagaggttaaccccttgccacatctccgttgcatcggtaaggagtttcctccgcctgctaagcacgtgaccaaacaaacccacaaggattcccacagaggtcgccttgaagtaaacaggatacagcttactctgcacaacaccaaactgttgcctccccaacactgaggctaaaacgtagcttgacacaaacgtcacccacacggaagtcccaaatgctgccgctatccccgtcaaccccacaatgctcgctaccttagtcggactcaacgtcgctgctgtggctgacccgaactcacgcgccccattcttaactctctcccacgcgttcttagacttatgagtagccgtttccttcaattcttgtgccttctccctcactctatcttttgccctctctttcgattcatgggctttttgggctaccgtctccttcacatcatgagctttctctcttaccttctctttagcatcatgggctttctgagccacactctctttcgcatcatgggctttatcagccacactctctttcgcatcatgggctttatgggctacaccctctttcggatcatgggccttttctgttaccctacccttagcatactgggcttgatcagccaccgtgtcttccacgtcacgtgccgcatgtgtaaccgtttccttcacatcgtgagccttatgagcggcggcttctctgacatcagaagctgtctcgccgacggaatcaacggtgcggtctttagcccgacctaccacactcgcgatcttctgcctgcacttgccgaacgcatcgcatatgacttccccagccgtcgcgtggtgatcacgcgcctcgtctgtcatcaccggctgggagattccttggccgacgtgtggaagatacgacgccgtttctttagctttctctttaacatttctaaacatagaagttcccatctctacttcattctctttttcttctccttgatctgccgatggtggcgagatcgagactctggtattggttttcccgtcgcgatcgtactcaaccaccacaacgtggtgtccgtctttgacgatgacttctccctctgacgccaccgccgtgttgtgggtggtcatggctggactcggagaccatacctccgccgctagtaaagtgctcaagacaagacacaaggccaaaagattcgtcattacttacttatcggtgttgtttcctcctctcttcatatgtcatcaaatcttaaccagcacttagcataataaacactttgcgagggatgtggaaccgtaacatcagatttgtcatttttttcttttagcttctaattgacacgtatctccacgtatttgcacgtgtcgcctgtacgagaaaagtaacttctcgaatgctcgacgatgtttttgcacagcaaccgaaacggttgtacatgagggtagaagaaatcacataatgggcctgattttggtacattgaggcccagtatacaactatggactctctagatagttggtagaaacgaatcaaacattttgctgcaatacattctagtattctacatggttgattggtttccatcaaggtttgatttagtgagtacatcacggaatatttcttagacaagtaaaagacgaaaattattcgaaagactacattagtcggacacactgattcattaccgcagcaaaactctacatgcaatgctaatcaacaaaacaagaatggtgacagagcttacgaacactccacagacaagtgccttatcaatgaaaccccaatttgctacgctgcttcccggtacgacgacctcttgtacctccttctcttctttctttgactttcccttgttatcatcttgtcctgagatatttccagaaatgttacacgcctctcctgatctctcttctccacagctctcagcagagcaagtgcaagtctcacaagtgctaacattcgacgaacaaggcagctttgtttcctctcgggattttgtttctctatttgcagagctaaatgtctcaatcacttccccaaatactgaccatctccccacagatgttatcctcgccatagctgaagtcccaagcatactttctggtccagtaactaagacctgtacatatcccttcgtatgtccaacctacaaattcaatttataaatgaaacagtgttggcaatcaaagatataaaaaaaaatatagtagctttcagttttatttgatatgaagtatgggcttaccaaatgaattccatcagtagctacttcagttatccatatcctctcttctctgcactccattccggtgtaaggcgcaaaagcctcaaagacagaagtcaattcacggcttcgttgcttcactattttactttgtaccttcttcatctttgctgctggggtccctatattataaatggcacatccaaaataatgtttagacctatgaaacactcaccaattcacagattacatacgtaaccaaatccttgtgcttacctggtctggggtaaaactgagaaatatgaacttgaggaaacttgtaatccttgatgagttcaactgtctgagaaaaatcttcatcggtttcacctggaattgggaaagtgagaaacatatcttcaacacagcccaattatatgaacaataattatcctcaagtctttgttgaccatgtaactatccacatccaactaatacatgcgactaaagtgattttgcatggcggtatgatgttttttatgtctcaacacttaaatgaagaggaatatgttaattcgaagaaaataaaagaccaataatacagacttccatgtttatccagcactaaccaggaaaaccgcatattatatcagtagcaatttgcattcctggcacaagctctgttaaggtgtctaccacagtcctgaactcacttgctgtatattccctgttcatggcctgcaaaatatattcaggtaagactagaaaagaatttggcagtcgtaaacaactctggactcatgactcaccgtcaacacagaatcgctaccagattgcacagggacatgaagaaaggtgtagacacatgggtgacgtaacactgccgctatttctttcaaatgctctaaaataaagggaggattagtcatcccaatccttagcattgtgctttgatcagaaggaagttccttaacgatagcattaagcagtattggaagattaactcctatgtcacgacctgcaacattttgggggcattagcccaatgaaaaggaaatacaaaattatgtctttaactaaaggtttgaaaaggaaccatatgctccagtgtcctcgctgcttaaccaaatctccttgactccttcagagattacagttctcacccgctccacctgcaatttaggaatctcaataggcagaaaaaaaaaaaaagggggcaaaagctggatacaaattgaaaaaaactcttcgctgtgaagctgaatctgcttacaagactatcaactgtgtaacttcctaaatgaccacgggcatgcttggtcttgcagtaagtacaggcacccaaacagccaacattaatggggagaatttcgataaaattgttcctccgcacctgcagtggaaaataatgacttattagtccccattaatcgaacccaaatgaaatcgagcaagaaattgtgtaatgaaagactaagcaaaatttataggatcaaagaactgtctctgaaatcaagattttggcttctacttgtttggtactaggaatagccatactcagcattaaagtcaaaacaatcaaaagtttaaactctttttacccacctttgggagatcaagcgcaggcaaagtcttccgagtcagcaaccgtacttcatgacccttaagagtttcttcaacaatctcaacaacacgatcaatctgttggactccaactacactaacgccttccagttctttaagatcacgactgccctgaggaacacatcccgcaatcacaagaggctttttcccacttctacccctcgttatcaaagtagacatcgcagactggctaggggacttcacagtacagctgcatcaaccgcacatatagagtaaacacaaagtaaagctatatcgagcaaaatgctgcgccataaactataaatctacaatattagaccgtgaccaagtgaactatatctcaacagcaaaaacacatagccattgcatcgggtaaacagaatacgaggctgaagcttacgtgttaatgagccataaatcagcttcctccgggacttctgtcaacgcatagccaaatgcagaaagctgaccagccatatactcactatcactctgaacaataaccaagcaacgagacaagaccagatacgattagctaaaagatttcatctcaatcactagagtaacaaacattgtaagtgtatatgaggcatttagaaatctatcaacaccaaaacactaagaactacaaaatcagaatcaaagcacttaagattcataaaatgactcgcctgattatgagaacatccaaacgtcttgatgtatatcgtctgcgaaaaatcatcaagacgaaatgtaagtgcacgcaaaaacgttgatagatacagaaaccgaagcaaatgagaaaatgaaatcgagagaggagagtgacctgagttcctggaatcttcatcgatggtggagcaagcgagtcacgattcgaagcagtaatttgatccggtttcgagctaatacgtttgctcttattcgtcttcggattaattccgactgcattcaagggtaatcggaatcccggtggtgcaccaccgactcctccggccaacaaatcctcgatatcctccattctctcttctctctccacggcggcgagtttacgagtgacaatggagtgtgtgggggttttcgcaacgaagcaggagaggcatagtgagacttaatgggcctgggtcgggtcgaattcatgttccattacaatgacccgatagagctataacagactaaagcccaactagtagtactcttcaagtaaagcaaaaatagctagcaaataaatgcagtgaaaaaacaattatatgaattttaagttatattcaacgaaaattattcatagctttagtaaagtaattttatgatatatatagacaaaatctattttgtattttcttattgtaaattttaactggtcaacactacttgtaaaacaaaaattggaaataaattgatttcaccaatttttcataacaaatctgatgatgattgagatttttttggttattacaaaatatatttggatatttactatttgctaccaaacatattttacaattattattgacttttttcttattacaattatcattaattaaaacttattatgagttttctttaattggacatttgccttctttctttttcaattttaaaatatatcaccaaaaggagatgagaaacttccaaactgtgtattttgacatttatctttcttaattattattttctccaaatttagaagaaaatccaaagtcagaataggaatatgttcgaaatgtaagatttcaaaatttctcttttattttattttcattgatttaatatatatcatgtccctctctctatatatacattatcatttcatttcacaagcctcatattgaatctcagaccaaattgaaggaagaaaaactaattagtttgtgatatgtctaatccctcaaaccaatcttcccaggaacaaccacaacgatgtgtggtaagtcctagttttcattacaaattgtcaaactgtagaaaacattccgttggtttttatttttttagaaaaaatatatcatttgtgctgatgttgtttttcataggatgatatatttttttatgttgtttttgtttgtatgataatttatagatgtatcattgtatatgataatatatcttaagatcttatctgatttttaacacaatatgtaaaaacatataaaaaaacattgtttgcgagcgaaattttgaataagatgtttcattgtttgcgagcgtaacaatctaattttataatatgtctttatttgttattaatttaatgcatctgtttgtttatttaaaaacagtgtgatctaatcaaatattttaatgattaaatgaagaacatatatagattttgtttcaaatttttgcggaattgttttgcaagaaaaagatgttttcggtgtttgtgtataagaataatctataggttaataagactttacaatctaaaggatcatttagtaaaatagtacttgactttgttatgatttggttttagtgttaattgtttctcttctgtttggtatcttttaaagataatgtaatatatcaaagatttcgtgattgaatgaaactaactcataagtttcattttgaattctcccgcgaatattcagttgagatatctaaatttttcttgctcgaaagctaacaaatactaaattaggtgaaataaaaactttaaagatatttgattcctgctaataattttttgttcaaaaataaataggttcttgctcttcccgcaatctcaaacacttcgctgcgacatagatatggtttggtaagtagttaagtactgcatttttctttttcattaatttgattatggtttgtatacttcatgaggacgaagaaactttcagctttagagaatgtttaatttgtcgtatgaagtatataattggatagattcattaatagcgtacttagaaaattttaaaatcgttagtaagtatatgtatttgtatactatcgatcaatatcataaaatgcatgcttatgtgtacagggaagacgtggtggtaataatcgtaatcgtagtcgtggtcgtgatgataaccaaagccctagcaatggtgggcgtgggcgtggacgtggacgaagccgtaggcgtagtcgtagtcccagccatagcaatggtggtcgtgaaccaccctttgcaacaattaacacagaggtgcattacaaactcaaaagtctaatttaacatttttaatgtatatatccattattctacataaatttttgataaatattaagttatatattgtaaatatgcatgaaaatgtataacatgtatgttttcttcttttacaggaacatttgaccatgcaaattgaatcaccctctaccataattaacacagaggtgtttcattaacatagttctttgaaaattttaaatcctaagttagtatatgtgtatattatatcctaaaacccatgcttcggtgtacaggaaagacgtgctggtgatgatgatggtagtcgtagtcgtggtcgtggacgtgggcgtgggcgtggccgtggccgtggccgtggacgtgggcgtggacgtggacgtggacgaaatcgtagccgtagtcgtagtcccagccatagcaatggtggtcgtgaaccacccactacaacacttaacacagaggtgctttacaaactcaagagtttaatttaacatttttaatgtatatatccattactctatatatattttgataaatattaagctatatattgttaatatgcatgaaaatgtataacgtgtatgttttcttcttttacaggatcatttgaccatgcaaattgaaccaccatctaccataattaacagagaggtgctttacaaatgaaaataactaatttaatgttttcacgtatttatctacctaatatatttattattttcgataaatattaagatagtagtgtaaatatgcacatgaaaatatataatttgtatggataaaacttaattttttctttttttttctacagaatggtactgatgccaacgacaacgttgtggcagttaataacatagagagtgattgtaaaattgatgaaacaggtgagaacgttaaactatactatttttgttacttagcgtacttgacaaaaatgttattgtttgattctttattggtaaatcttcagttcctcctaaaactgacgaagagatcttagaagatgaggacgatatccgtagtttattggataaactcccaattccatcgatgttttatctcggttagtataaaccttaacttttatattcaaattattattatatgtaaaaacaacttgttatagtttgtgatcgtgacctataattttatgaatctttcaggcttctaaaacgggaggagcggacgacgatttcaacatgtttttagacaaaaaaaaagagtaccaatgttgtctttccttttttctctggataaaatttggaacaatgttggattatgcattttatttttcatttttttaaaagaataatgtgggattattgttatgaaattaacttctatatggcgaaatttcatataattgttttgttggaaattttataaatttggagaaaaatatctcatagttgtcacaattcacctcagcacatgtgcatattatcggtaaatttacttatggttattgtgagaaatacattaaaaaaaagggtgggtagattagagataattaatatcatgaagttgatttaagtatctcggattcaatctttttatgggacgaaatttaatttttaaatcagaatatagtttacacaaaacaatataggttttaacacatataatgttatatcgtcctagctagtaacaaaaccgagaacaaaggaacacataaatataaaaataaataaataaacaccgacatgacatcggaatgtgaatcggataataggatatccaatagaccataccgtcgggtacaagataaaaaagggtccttcaccaaagtcccacaaaaagggaaagaaaaaaagatttgttataaacctaaaatgtttggttggtgaagaagaagaagaagaaacgatgatacgaaatttccggttcaaagctccgacgaatcaccctggttccaccatccaaactgatagccgccggttaatccagtttccgacaagatgttgtttatcaccagatcttagccattacacggttcttggcttgactcctctcgcttcccaaaccgaagtcaaacgtgcctttaaacgtctcgctctaaaggttgttaattcttgtttgtcccttttgcgtcttattacgcttttaatttttttttaaaagaaagttcaaaaccttttgacgaatcaaatcaagaaaataaaaagaaggattataactaaataagacaaaatgagttattgcagtatcatccagatgttcacaagggtcaggacaaagatttcaaggagatcaaatccgcttacgaggtaaaacaaaaaaatgtttttctgatttcttgattttttttggattatttaagtttttttttggttttggacaaaaaatttctaagttaagaataaaaaatacaaacccgtattttgtttgcttttctgattttgattctttcttatctttaactttttgaatatgtggtgtttaatattagccatggtaaaacgtaattgaaaccattttccttatattaatcacattttcagtgtttgatgcaaaagtttaagaaagaagaagaagaaatggagattacagaaatgggtgaaatcgatgagtgggaggaatggatgggattcgaaggagggataccatcaggtatttcttactagatatatatcatttgctacaatggatagtagtagaatcagagagatggagagtacaatttttgggagcaagacaacagttgcatcttggaggaagcttgtcagcgccggaggaaggacatgtcatgtactctacttgtaagcaatagagaggacacgcgatcgctgtctttgttgtagtaactccagggattattcctcctaaaatagctcctagtggatttttcaaaacaatgaaacacaaaatttgattaaatttctgattgtgtaattgctaaccaaattgaggagaggaattccttttttataagttgaacctgctatgatgaaagacatcacccaaatcttgtatgtaaccatttctttcttggaagatttctgcttctcctgggttatatatagatgaagctactaaattcaaaaactagtgttttgaataactccgaccgttgactcttgattgggttgaagttgaacagtcaaagtcttgtttactttgactaaaccactaagagatcattatctcatccaaaagcttatcttgaaactgtaatgaaatgttatctcattacagtttgaatatgagacgcaaagagagacttgaatattggagtttatctcatcccataaagcttatcttcaaatgttgggttcaagacagtgttttcacgcccgacccgaaccgcccggtccgaccagttaactcgtgacccgaacacttttccggtttgggtttagtgctaaaacccgacaaattcaaaaccgaaaaaacccacaaaaattcgccattaatccatgacccggtgaatcggttgaaccggccggatgtgggttttaaaaaattctcttcattttggaataaaatgtgggattttaaactttcttcaattatttttataagtttttttagttcttaaactcatttgatgttttagattttggtgaagatttcacaatgcggccttaaaaatgaatcgaatggtgatatatgcaaatgagattagttgtttgaattcacgatatttcattaatttgtttctatcattagtgatcttctattatatttgttacgatgttagacatttagttgaatttaaaatttttaatcactttcttattattgtttgattttatatatatatatatatgtttttttggtgtaaatgattttatattttatcaaacataatatgattttatatttttttattaaacatgatatgattattttgttttctattaaacataatatgattattttgttttctatttataaaaattgtaaaatctctattaatatttacccaaaaggtagtccggttcactgtttgggtcagttttaaaaacattggttcaagacatcaaagccgtgggagataaaaaggttaaacgaacatagattataagcacaacattacttatatctcaaacgttgggttcaatacattaaagccgtgggagataaaaggttaaacgaacatagattctaagcacaacattacttatattactacctactattgtagttctatatttcttcctaccaacacacaaacaaaaagaactttacacaaaactacttcacttatcttaagacagaaaatataattaaggcttggacactactagcaagtttcgtgttcttctgcatcaaaccgaggaggcatgactctctttcgtaccagcatttccgcagtaacttgtttcctctttagtccacctctcggtcttgaagtgaaatcttcatcagtttcgacaaaatcaccctgaaaccacattcagttttacatgagattctagtcttttgagtttgtaagaaaaacacgatagtatgtaggttggatgaacttacgcaggtatatacgtgatacccggaattctcgtgcttgtttctgacatgtttgtaagcaaatctcatgccacaaccgggaaagccacagacaaagggacgtatatcatcgtgcactgctttcatgtgtttctgaagattagaagcctgagaaataatcgtaatgtaattagtgatgttgaataatctggaaacgaaacttgttttggactatataagtttgacgtagctcaggatgtttctttaccttggagaaagtcgaagagcaaccctcaacttcacacttgatttctcctggtgaggaatcttcatcatgagtccgtagatgtctcttgatgttctttttcaaatgcttagaaccacatatctcacagttgatgtgctgatgacaggatcttatgtgtgacttgaggcattcttcgttggtaaagtacttcatacacccaggctcggaacaaaatgcctccacagagtctaatttcactgcaaatgtaaatctaaaccttcagagattgaaaatctatcaagctttaacaaacaactgtctttaatttataacaaagcacatagagaggaaacgtagaaatcttcatatgcccaggatactaaactagagggaaagtaagggtaggaaggtgcacttaccatgagaatcctgatgcttttgaagctgtgaaggatacttaaaggcttttccacaaccaatttctttgcagacaacctgcttctgaccagttgaacactccgcaggctgagaatcgccattaccattattgtccttaccacttccgccattcccttcattttccttctcacaaccgccactaccagatttttccttatcatcatcccccttacaagtattgtccttatcaccatcgcccaaaccagtattgtccttatcacggttgtcattactatgatatttcttaacatgcctaccaacatttccctgtactgagaattcactcttgcagttctccttcggacacttaaagagcttccctttatgtgtaagaagatgcctattgagatgatccttcctcctatagctagcagcacaatcatccacatagcaagtaaaagatctctacacaccaaaagagtgaaaaccatcagaaacatagctcattggcgaaaagaaagtccaaagcaaagtgaaacaaaacaagctattgaacatcagacctcaaacattttgcgtgatcgaggcttacttgctggagcttctcaggaggtctcccaacctgatactagtccataacatgtagcctcgcattttggagttctctctttgggatccaatgcctcacgcaataacataggtaagaccttttgatttaaacaaaaggctatttatttcctgcaaatgtataaacttttagttcacaaccagaacaaaactcaacactaagcaaaatccacgagtatctctatgtatctccatctgtagctgcaacacacagaatgggaacaattcgacttctcatgacaagaggatgcataaatctacctcgagcgaatgactctgcatatgctgcttcaagtgagcaggtttcttaaactcagcaccacattcttgacaagtatgattacttgaagactcctcatcaacctcacaagcttcatcatctctttcctcttcaagttccatctaaacaaacgaatcatagaaactctcaattcaacaaaccatcgccgattctacagactcaactctcaatttcattgaaaacaaatcaagatgccacggatgagaaattggaatcgaattggaggaagatctcaaacctgatgatgagattggatgtgtttagtgatgagatagtttttagatctgctgattccgcaatactggcatagataattgcgtatatccttcttcgccgaagtcttcacatcaactttagcttcttccgccatgtctctcttattgtctacagaagaactagggtttatctcctccatcaagacgccgcacagtagaagctgaagtaacaatggccatttatatatcagcttcttttttccgggagtgagaaatctaacctagaacacttgggcttctaattgtataatgggcctttcaagcccatataacaaatttaaattagaattacaacaaatttgcaaaatcgagtagaaaatagacaagggatctttgcaaaacgaaaagttagacttgtgccaggaaaaaagggaacaaatttgaaacgtcacaatcggtccattaaatctaatgggccctgcatctgtaacatttttgaaaaatttacagtcgataagctcaattaggtcatcgttttaacaaagggtaggcccaaataaaaaaccagtccaattcaaaaacaagcgtttttttaaacaataaaaaaatgattatgtacttatttgttatccgcacgtgtcatgtgtgctacacaacttcgtaaagatgacaaataacacctcaaggacaggacacatcaccattttttaacattttttccccataacgatttattaaaaaacgtattaatcccataatcatatcttctaattaattaaataattaaccacaccacaaaattgaaattaatgattttaatcaataaaattaaaaaccctaaaacgcaactttctctcttcttcttcctctgtctttgcgccaaaccaaaacccacacaaaagccctcttttttgttatccccttctctctctgaaactagggtttctatttctctgagtgatgtgaaatgctcgtgtaaacggaaacgatgcagaagattctgtgcaaaagtaccacttcttcaacccctgttctctctacgccggtgaactctctcgccgccggttttatctctctagggtttaagacccccgttaaaaatctccctccttgttctactactaaacctctctccacttgtttcttctctacttccgctatgccgaccacaacggcttctgtttcttcaggcggtgttggtttctctgcttatctacagaggactgttcataaaccggcaccggcgtctgttcggttctcaacagctggttaccggacttgccggtgttcaattgacggtacgaaccgggcttgggttggtcgaactgggtcttggcgtgcgttgttttgttcagactctactggtggtttaaccccggttaatgctactgctggagcagtggttgaaagcgaggaagagtctgacggagaagatgaagacgaggagaaagatgagaagcctgtgaggatgaaccgtagaaaccggagctctagtggaagtggtgagtttgttggtaatccagatttgctgaagattcctggagttggtttaaggaatcagagaaagcttgttgataatgggattggtgatgttgcagagctcaagaagctttataaggataaggtacttttgaatcttcaatttttaacttgcgggttttgagacaagtattgaaagtttcaatctttatttttggttggttgatttgtaatctcagttttggaaggctagtcagaagatggttgattatcttaggagctctgttgggattatacatagaaaccatgcggagagtataacaacgtttattaaagagagtgtggatgatgagcttaaggattctggccctgaacctaatctaaatgtgaagaaacgtttgacgttttgtgttgaagggaacatcagtgttggtaaatcaacttttcttcagaggatagcgaatgagactgttgagttacaagaccttgttgagattgttcctgagccagttgataagtggcaagatgttggacctgaccatttcaatatattggatgctttctactctgagcctcagaggtatgcttatactttccagaactatgtgtttgtcactcggctgatgcaggagaaagagtctgcttctggggttaaacctctcaggttgatggaaaggagtgtcttcagtgaccgaatggtaattttaaagccaacgttattaaaatttatagtttgaaatgtgtgattggaaacttaatatgttgtggaatttggtgtttaggtgtttgtgcgtgcggttcatgaagcgaaatggatgaatgagatggagatcagcatttacgactcttggtttgatccggttgtctcttctttacctggacttgttcctgatgggtttatatacttaagggcgagtccagacacttgccacaagcgaatgatgctcaggaaacgagcagaagaaggcggagtctctctgaaatacctccaagatttgcacgagaagcacgagagctggctgcttccctttgagagcggaaaccatggtgtattgtctgttagtagaccatctttacacatggacaactctctgcatcctgatataaaggaccgtgtcttttacttggaaggaaatcatatgcattctagtatccagaaggtaaacttatctcttttttgcattctttgtgctaaaagtctgaagatagattttgcttagactggttcattggttgtaacaggtccctgctctggttttggactgtgaacccaatatcgacttcagccgggatattgaagcaaagacacagtaagtgctcacactactgtaatgtcaccataacttatttggaatcataaatctaatagatactttcttgattgatgttgttaaaaggtatgcacgccaggtcgctgagttctttgagtttgtgaagaagaagcaagaaacatctacagagaagagcaacagtcagtcgccggtactgctaccacatcagaatggaggtctctggatgggaccagcaggcaatcatgtcccgggattagatctcccgcctctagatctcaagtcactcctcactagaccgtctgcgtgactgtccattcactgactctgtttttgttggctccaagggagcgtgtcaggttattgaatgtcaatagtttcgatcggcttttatatcgtttatttaggaaaaaaacgtttgctgccgcttttgtccatcttagatgtagaaacaaaacatggtcgtgccaccgtttagtttaacccttttgtataaaagtttggtctctggataatttgtttcttgaaatcttgttggtcgtctaaaatttcagttcagttcatgtttctgcacatttactctgtatccaattagatggtagtgtgtttattgttttaaccaaaatgtacatgaagaaaacgcctaagaaaagcgtttactcataagaacgcgacgttttctgcctatccaagtagaggtccacaacgggtcagtctcgaccacactgtagccggcattcgagtaaagatttctagcagctgcatcgtcttcataagctcttagagcaagaagcttgaaaccccacaagtaacacaaaacatcacatgcctttaacaatgtacttgccatcttctttctcctttgagattttgagacagctaaacccgagacgtatagatattcttcgacgcccggaaaatagcgaagtactgaactttcagtttgagctgttacatcaactactccgacaacacttgagctcgacaaagtttcagtttcacttgtttgctccgccacgagacatgcatatctgccaaattcttaaaacttttataattaatcacatttaaaaactagtcttaaagaaattatgttatgttatttgttttacctgtcaggtggtgaattctttagtttgtaaagaagtgctgatagaacctctgcctgtattacatattatcaaaatcttcatatacatcaaaacaataatcttcaatgtaaatcatatatgagaatgaaaaataaacaaacctgaaaaaacatgaagaaaaaatcatcaaaaagagcaagagggatgtggaaagcttcggcttgaacaagagacactctcctgatctcatcctcgtcgtctctattcaatctcctcacgtcccacccgtgttgactcaccagatacttcaactctatctccgccgcattattctgagtcaaactcgttaacgactccgtcgacgcgcaccgtaggaacaccgggaagcggctccacgtcagcttccgttgatctactcctagaccggagcttccaggatatggaaactttggtccagcggcggagtagaggctctgtggcaagtgacccatgtttatttttctagcatttttcaaaaaaaaaaaagagaatctttattatgttcgttttcatgcgctttaatatgaaacgtagagataagatacgcttcttgcttccatcgtctgttttctgtggttaagaatcatcgctagctcatgaccatccagagatttttttggggttagaaaagataaaatagttcagctacgtggacaaatggtgactctacacgtggagatttgcaagcaaaaattagtatatttcatgttcatcaaagaaagtgacatgaatttttattttgacatgttatatgattcctaagaaaattcccaaagttttttttttctgaacatttttgtcagcttttacttaaaacaaaaatatttgaacaacacagttaaataaaggccttgtgtaagagtaaatgggcctggcccaaaagaagatgtcgctttgcacgtgtgatatcatctctcatttctcagtctcctctcctccccaaaacaaattcgccgtaaaatttccagagaagtcgttcatcatttgcaatttctcgattagttctgaatcatggcgttgagcaccagcatcagatctgtatctaagatcattgcttcttccgaagcatcagtctccagatctggtcagtaccaatagaagtatctgctgaattggttttgcatttctttgtttttccccttttttgttgtctagggttttgtttgatttcccaggaatcgattattctaaggttttgtttgattgcctagatatcaatgtttctgattagccgcggattgattccgatgcgattcttcgttgattgaattctgggatttgaaacttctctgctcgcgaatttgtcatagaaacacgctttaatggcgtgatgcgaaacagattgtttatgattaggctgaaaaattgtatcatgaaattagaaatgcatattttgatgtttccttgtttcatggaaattttccatgttcgtgttttgatagttttggttgatcagtgaaaggctccatgttcatgctatgatcagcttgttttgatgtatctcttgaaactaaatgggctataagatgatttatgagtgtttgattggtaatatttcaaaacttgctgaagatttctttgatatcatcaacaacagtgactagaagcttccactcgactggagttaagaagatgagcggaggaggacatggtggttacgatgaatactacctccacgcaaaacacatgtacaatttggaccgcatgaagtaccaagctctcaagatgtctctcggtgtattcaccgctttcagcatcggtgttggggttcctatcttcgcagtcgttttccagcagaggaagactcaatctggttaagtccctcaggatgctcttgttcacagcttgaataatttgtatgaattctcaaactctgcttttgcaagagagtttttctttctccctttggatcttagccacaagtcttatcgttatggttaagtcttctgtgtcttcctcttttgctggctgtttgatgctgtaataatgataatctgacagatatatttttttttactttgattggaagtgaaagttttgtttgagtatcgtagaacccaaaagccaagaaagatcaacatattcacaaatctattaataaaaaggtacaatcaaaaggagagatgaaatcaagaaaacacacataggcacacaaaaacccacaaatgatgtgacaaatctgttcaaaagcttaaaaccattatctgtttcaccatatttgtcattcaagcatggcagcattcaaccgccatcgccaaaacatgttttacaaatggagttgctaatagccaaaccgcagattgcgaatcttcaaactcgagtgtggtcattacaatgtcatgaggtggaactagagaaaaggattgatcactttttgtcatcaccaccattttcactagcttgactctggtttggctcttgatgttggagctgatgctgatgttgatctagagtcatggccaaaccatcgcctctactgccacgcattgcagccgccatgttgccctctgccactcctaatcctagctgttgacctcccaacatcattgaccccattggtgcagttactactcgtcctgtcccaactggataattccctggattaaacgcccacatttggtgaccaggctgctgctgcatctgctcccgcccacccgaaccgctcatcggaagcatccagaacgcactacctccattcgtagtccctggcgcaaccgcccacataggttgaggcaccacattagccgtcccacgaccctgagctaactcttgctcctgaaactgactcgctttctgagaactctcgcttggttccgctgcagaactcggctccttaaagtaatcttctctataaggtttcactaaagtgttcggatttctctccgtcgacattattggtggatacatctgatgatgaaaaccgaaaacagccgcgtttgcggctgaattcagtaacttcctagaaggatctaccgatgatccgttagtaccgttattgtcttcataaagagacattccagtgctatgaaacgagagtggcgaagaagaagatttcgacgcctgagaaaacaaggtggagccaccaccactgcgtaaagaagcgttaagtgttgagaaattcgccgggatcgtaccagtaccagtagaagcgatgatagctggctcagcttgttggagaagccactcgatggtttctccatcagatttatgacctaactctcttgttaactgaaaaactctagcggcgcacatcgccggcatacgaattcgccgtccacgaccatcgactttagtatgccgatctttagttggttttttcacggcggatttaactacggcaagagcactacctgagcttgtgcttgtcgaactcgtcgctgaagtgcttatgtttccgtgttgaccagaggagataaacggaatcgatcccggcgatggtttttcaccggaattaagctgaagcgtcgcctccgcaacagaggaattctgattcatcttcaaatccgtaaaaagatatgatttttatgatttttagacaaaacccatgtgaattctgtgtcttgacatcgaattctatataatctggggaaatctgaagcaaatcgattgaagaaacaaaagcagagaaagaagagaaagtgactgtggaaggaggagatctaagcttgctactaaaatggagtttgagaacagagagggagagagaagagagaatgattgagaaggataaaaacaagtggatatgaatggtgtgattgcaggaagaaactatccatctaaattctctattcaattcaacctttattgacttatttgtttcttacactgttcttctttcttgtcgaaaacccttcatttttttgctttgccatggttaaaattaaaattgacacagttaaaaaaaaaaaaatcatcattgttacttttggataattatgcaagctaattttcggatttgttttttaaatatataattaattagaatggaacatgaacattcttagagtatctaatcctatagatcagtgatgtaattaagaacctttataaaataaaaataaaattaggtgaatttttttaaccttgattttcccatctaagtttctttaaccgtgatcatcacctaattaactctttaatttaggtgtattatttctttaaccttaagagtgttttgataaagactacgtgatgtgtactgtttaagttaacgcgaaggagatatttagtgtgagatttgttggttgttcatacttgaaaagactacaatcatatctacttattttacgagagggattaattaatgtatagttaaaagaaattatatacagctaattagtttagttatcttattatagttaaatctatttggtggttgctaatactaatccactcaccatttttaaattgtttttttgtcgataaagacgttactggtgagcggtgattcatgttaatcactctcctcaacaacccgttttgcctcctttttattattcttattcccacatgaaaaaaagctagatcttgattattattattagttttggtctcaaaacaaatcattttagttaactgctaatttttcgtccaaactttatcactaatttttagatttcagctttcaagttttaagtccatgataatgtatatagataaaacagttcttactttaccagtaaaagaaaaaagtttttcccaccaaaagaatttaaagaaaagaaaaaaaagtaaatggccgaaaatctggaataaaacaaggacataaaagcaactcgttgaccctgtcaagcctaaagtatacaaagtgcgatccaatactctctcttttttagaatttgatcatgattttcagagaaaaatattattgtttacgaatcttttccctagtttttctatgaacttgaccgaagttgtacgatcagaaaccttaaatcaataggatttagggtttgctcattttgtatcacactatctaaagtgtctatggcctatggaattaatattttgtggataaagaatcacaaagtttatatattataggctcatagagtttcacctgcttttctattagtctacctatatgcacttaaaatggtatatgaaatcttgtattttgagattttcaatttgcttataaaagtaattgattcttgtatcatcttttagtttagtatagcacagaatttcaacctagtttctttttaaatgacatgtgacgtaggccgtagctttattttaactcaaatagacatattcgaaaatatccataacctcaagtatcacaaagtagttacataagagattatactgcgtttgacttggtaaagttaccaaaaattactggaagtgtagggttgtataagtacatgcatgatattaatcgaacggtcgtactctgttgtctttttcttctttttctaatttgtttctgtcggattgtgtcttgtaagacttttgattcgtcaatagtcaatgactccttctaaacccatgccttattacctggtggtccgtagtagaccatggtaccatagtgatcacaagacaaccattcttgattattccacatattaaagttaatttgggagctatgaatatttttgtttctgttaatggtaattataaaaggccctacaatgaagaaaaaaaaacacaaaacgaaattatataatttaagtccaagaagaagatcttctaagaggaggtttcatatgtttctcttcttccattgagatcattcccacatgcgttggatcatccatcatcatcttggcgaccaaatagccagcgattgaccatgtctgagatttcctagcctgttttccgatgaatcttccagactttccgtcgtagtactccggccatccatccttcaacagtcgtgcctccgccaactctatagcccgtcgtgctatttgtggccgtccagtctttatgcttgccgccgttagtaaccatagaagcactacattttgcatcagccacatgagtcaacaatattgattgaatgattatatttccaaacaaaaaacaaaattaatcaaatgtggcgttagaaatagaaaatagggttgaatgaaagtatttacgtggatcttgttttggttctaccattacaataaagatattataaaaacaaactctgcttattttttggacaaaccaaaaattcaaacagatttaagagttgaatattctttggccatcatagacggcaaacaaatccaagaattaatgtcggtttcggcatcggattccctaatcatatagtatatcttagtctactatactattactcttcaatcgctcatgtttagcatctatatcatatttatttgcattcgtttattttctcatgttttttatgaccttaaattatatttatataatgttttcggtaattttgacaacttaatgcccattagatcccattaactatctatcaatgacttgtaaaagaaggtaactcacctggccaagagcctccgttgtggtagctccaccttgtgttcttagggtcacagccagtgacaatcccccactcgtgactctccatcgccggataacatatcttcaacggcatctctcccacaagttcttcccaccgggcctcaatcaggtccatgatcgccatggactgctctggtgtggccaatgaggaaagaattgcgatacaatttcctaacgcaaaccacctgaagtccatgcgggcgggactgacatttccaacgaagtagccacctcggagaggcatgaagtcaaagatccaatcagggatggagtcagggattacgttgaacttgtttaccgcggtgtgagagtactcctccgtcttgtaacggtaaatgtcattgagctgctggaaatcgagccaaaagtagcttctcatatggaagcttagtgcgtgcagccgcttcactatcttttccatgaactctttaccctcagaatcatgtttcagcattgagagtgcggatcgaagagccatgaaaaagagggcttggatctcaatcggatagccgtaaatgccctgcacagtacatttcaaaaagagaacgttcaagaggttcattttcacttaggatatatatgtatatgaattgaggcctatatgttctttgagacggtcatattcaaaagtcaaaagttcgatgccaaaaaaagtattggtttcttgatttatggaattttatagtcaagaggatgagagcaagcttaccattctacgatcgaccatcgagcaaccatctgcgcaaagcaaagtcggaaaagtatcaaaaccctcagagagacacaaagaaagtatgagtctcattcccttttggcactctggtctctctgctagagaatgatctcctgtagacttagtgtaagctcggaggagaatgatccaccagaagccagagtcgactggagccactctcccgatggcgctttctccaaagtcagcgataatcgtatccgtcttcttgataggattatgtagaactttaaagcttgctggcattgcgccgtcaccaagcttgaacttgtcgatcattttgtcttgtccctgaatatgaagtgtcttcaggagaaagttcttcacaatttcaggctctccattcatcagaaatgctagagcactcggtacaaaatcacgtacgaacaccttaaaagttacaatagacaagaaaaattgtaatgaggcagaacaatcatagtttgtaatttgcttaaatgttctagttgacgtgcgattcactctaattttgttcttctcttttatgtcttaagagttcatcaaattcaccaaaaccaaaacagcaaaaacaaactagaaagaaacaaaacacaaccatacctgatcatagttcaagacctcttctgaagcatggtcgtaggcggcgatggttcctaccggttttccccggaagtagacctgagactggcagagagcctcccaagcttctgtgaccatcgggttacgatccattgagtctttcatggagaaaaccggagtatcccaaccagacttaccgtctagtgaatgtgcactgtcgtaaaggcttaaagacatttcctcgtatgatattttccgttcaagtttgagtcttggacggtcaagcagccgagacagtaggtcttcatccgtcagttcggatatcgagcacatcgagtttactgctcgaattccttccttttttttgccattctcgcatagagagctcatcgaattcaccgctcgtagtacgtcccgtttctttggtcggtccatggagatagctaatttgttcaacaaagctctttttattgattcacgaaaaatagcaaactatacaaaaactttaacaacactcgagagaagaaaaaatgatgttaagagaaggaaccaatatttatagagagacctagcaagctggcaaaacatgttgattggagcgtttgcttttttgcggatagaaacaatttcaagatatatatatcaccaatcatcatatctagtttgtttgcatttctgtttgatttctttcttcttatgcacttcttgtgcatatttgttatgtatatgatgg

SEQ ID NO: 1242 - DNA, 98874 bp, Arabidopsis thaliana
aagcttattaagcagcttactcatctatctgatcgatttggccactggaggagacgccggaaacagctggttcaacagtaatctgaacagagcccatctagattacttctattggttacttgcggttgttagtgccgttgggttctttacgttcttgttcatctccaagtcctatatatatcgccgggtggacgtagtgtagtttacgcatggaggaggaaatggagagtttctttttgtgatttttgatttttatggacgttacgattctaacgtaaaactcccacaaatgacaaaacagaccataaatatcatgattcttatgtgaatttgtaactatatttcaagtatgcaaatttgatattaaattgtgattccacgattctaacgtaaaaataacattatgcaaatatttatgtatgaatgtacggccagtgctataaagatcgttgaaacttgttgaattttaatccccatgcaagagtttaatacataaaaacaaaattaaaaaaataagacgtaagtggacaaggtatttaaaaaataaataaaattgatttatacatgtttataggttttcttcgttttccattcgtttaaaccattataaaatataactaacaacaaattttgtggtccattccccggttctttatcttcaatattcttaatcacatatgtgtcgtgcgtgagcacagcgacaataaacaattgattgtggtctccaaaattctagagattttttctttacaaaaacacctccaattttaaaaacttacaaataaaatcttttaaaaattttagaccctcgaaatttcaggccgacagtgcatatatgtaagctcaagaacacaaggaatcttaactagttgagcatgttccaacaactttcgaaatatacaaaacatatatatatatatatatggccctttcgggaacttctgctaataaaacaaagtccatacgaatcacgagttaagttaattgttatcgtggtcatcatttaatataacttgccttgtcagctaagccacttgcgtccacaccttcatcatataatcttcacctatatatactacagaaacaatataataaacattttgtttgtatattattttatcaagaccaatcaatcatacacattaatggctatcacctactcctccgccgacgagctcggaaacaccactgagggttttctggaaatccgagaaaatacctccggtggatggaaatcagcgaggctcatcatcggtaaataaacatgatatttacttttttagcaacaaaaaaattgatttagttccttacttcattattatttctcccgggaattttgctaatttctctttgtttttgtttctaaaaattttgtagttgtacaaatggcggagcgattcgcttactttggtatagcgtcaaacctaataatgtacttgacgggaccgttaggtgagtcaacagctgcagcggcagcgaatgtcaatgcttggactggaacggtggcgtttctgccgcttctcgggggctttctcgctgactcgtatctcggtcgtttccgtactataatcatctcatcttctctctatatcttggtagataaaaaaatttcctctctaacgtttctataatcagagtttcgttacagattttgatgattaacgaaaacaaaacaaacagggacttgggttgctgtctttttcaaccatgattccttctcatcagtccaaagattcgaatcagctgcaagagactatcttcttcttctctctttatcttgtagcaataggacaaggcggttacaacccgtgtattaaggtatttggagcggatcaattcgatggaaatgatcataaagaggcaagagacaagagttcattcttcaactggttgatgtttggaaactgtattagcatattgacgactcgtttggtctctacctacattcaagagaacctaagctggtcactagggtttggtattcctagtgtttccatgttgctttctctgtttctcttcctccttggaactacctcttaccgttttagtactgagagagtaggaaagaaaaacccttttgccagaatcagtcgtgtattcatggaggctttaaagaacagaagacaacccgatttagatattgctaacgcgaacgccaacgagactctccttctcctggctcaccagagttccaaacagttcaggtaacataattaacagcgatgttcttttgagaatcttcttgttcataccatcttggtttctattagtgaatccacgtcgatatattagagaagaaatgtatattgttccatctaggtttttatatataccaactgatatttagaaaaattattataagaaaacgaagtttatagtttcttttcttgtatactatgcagattcctagacagggcagctatttcttgtgaattggctgaaattgaagaagcaaaggcggttcttaggcttattcccatatggataacttctgtagtctacaccattgtacatgcacaatcccctactttttttacaaagcaaggagccacaatggacaggtcaatctcaccaggactcttagttcctgcagctacacttcaaagtttcataaacctctcagtagtcgttttcatcccaatctacgaccgcttactcgtcccattcgcaaggtccttcactcaaaactcatcaggtatcacaacgctacaaaggattggtacagggattttcctctccattcttgctatggtattagccgcattggtcgagacaaaaaggctccaagccgcccgggatgaactctccataccgatgagcgtgtggtggctgattccacagtatgttatctttggagtctcagatatgttcacaatggtgggtttacaagagttcttctacggccaagtccctagtgagcttaggagcgttggtatggctttgaacctaagcatatacggggcgggaaactacctaagcagctttatgatatcagtcattgataaaatcacgaaccagtatggtcaaaggagctggttcgataatgacttggaccaagctcatctagattacttctactggctactggcttgtctcggcttcattggtttcgccttctacttatggttcgccaagtcatatgtctacagcagatcaaacaccttttaaattgtctctcctctgttctgccaattaaattgggctgggatttcacaaccaaggaaataagaatttcctcaggcgaaagaaatttcgtgagtatatcaaaagcttataagatttctgttaaagaaatttgaaatttctaaggaaaaagataaaattcgacaagaatattttatgatctctattcagagccaacttgcttgtgacacactcttttaacttattgttgaatcactaatttttcaaagcaaaatattgaactggaatctctttatgggatttccttgaacttgataacatatctgaccggaccattaggggagtcaacagctgcagctgcagccaatgtcaacgcatggagtggggtgtcgtttcttccccttctcgggggctttatcgctgactcgtttcttggacgttttcgtacaatcgtgatcgcgtattctctttatatcatggtatataacaatctcctcttaaaaacatctctactaaaacatgttattgttgtttcttgaaatgatttaatgaaacaagcagggacttgggttgctgtctttttcagccatgacttcttctaactctaaagatccaaatcaactccaagtgattctcttcttctgctctctgtatcttatagcaataggacaaggcggttacaaaccatgtattaaggtatttggagcagatcaatttgatggaaatgatataaaagatgcaaaagacaagagttcttactttaattggttgatgtttggaagttgtgttagcatattgacctttcgtttggtctctagctacatacaagaggacctaagttggtccttaggatttggtattccaagtgttttcatgctacttgctctgtttctcttccttctcggcactaagacttaccgttttagcactgcaagagaagggaagaaaaatccttttgctagaatcagtcatgttttcatggcggctttaaagaatagaacacaaccagattcatatatagctaaccccaacgagacccttctcactcatcagagttccaagcagttcaggtaacataattacttatcttgaaaatctttcaagccacaattgttctataccatcttggttcgtgtccttatgtattgttgcagattcctcaacaaggcagcgatttcttgtagttttgctgaaattgaagaagcaaaagcggtgcttaagcttgtcccatgtggctgacttgcttagtctatgctattgtatgtgcacaatctcatactttcttcacaaagcaaggagccaaaatggacaggttaatgtgaccagggcaatgttaaataacaactcgagcgatacactgagactaacgcgacagcaagcactgttgattaacatttagcgctgaattttttcagcgaatatggcagctcaatttttggttgctgcgcctttatttttgaagtagaattttgaaacagctttacttatgactgttggtgtaggaaagcatttgggcctttcagtttcctagtcgctgtcgtttggttgaactactagaaaagaacaaccccacactataggggtaaaccaggctagcatgttatacaaaatggcataagctagctagaaaacacatatatttaaataaagtttagtaataaacggaaactttaaagatgagtaggttctctagttgccccccaaaaaaaatttaaaaaaatatgagtaggtctttcggatatatacacagcttgcccaaaaattgattgtctcacacagaacaacaccatgcacgttctctgccagctggacccgaaattaactacgtagcagcttactctctgtaactttcaaagttggttacatatttaagtaaccacacaaggcatgctacctgaccatcaccgttgtctgagtgatattaatttccgttttattaaaaagcttagatattactctacgataaaaccttattttataaaggttattagattgatctattaaccttggtgaaaagttcatattactttatagtaacaatttaaatataaaaaaatgacaattttttactttttaaaaggtttgaaatcgacatatctatcaaatttgataacttttccagggtattattattatttatattttaaattttttttggaaaacgggtttaattaacaagaaataattaatcaaacaaaaaggttcaatacgtctacaatgaaaacaaaaaaaaacaaagcaaaacaaatcaaaatttctacttaaatgataacatgcgaagatgacaatcatgtaacgtctaagatgaatcttgaataagtcctttaggccagccatgcatggatgggagatcggccgtatcatccacataatcgaaatctaatctttcatttatttttattaattatcttaaccaaccgattgtgacaatttctccttgttgccaaccactaagatacggtgtcattcctgacaacgaagacttttatcgcgtcgcatttatcaatcgattactcaatagcgttctcacttctcgtcgtgactcacgtgttaaaatctgtcatattataatatgaatttatattagattttggtcattgtgcatgaaataccaactatatatatacacatatataacctatagataaatacatctgaaacgaaataacaagaagcaatgtcgacatccatcggcgataatgagactggagctatagtttcaaacgagaatgtcgagttttccgtcgatttccgaggcaatccatctatcagatcctcttccggtgcatggaaatcttctggcttcaccatgtgtaagtcttgactcttttttttccatttcctcaatttaccaccaaattctcaaaaaagtgaatattccggcaggtgcggaagttgccgagaaattcgcctacttcggtatcgcctcgaatctgataacctacttcaccgaggcgttaggagagtcgacggctgttgcagcgtcaaacgttaacctctggcttgggacggcagctttcttgcctctcatatggggttctatcgccgactcttttcttggccgtttccgtacaatcctcttaacctcttctttctatatcatggtaataattcagctcaaagctttcatcttttgttaccttgtgtaaccttcttgatttttctagtgcgatcattaccaattaggcatgagttggatcttaggctacacatccattttcctataccctagaaacaagataagaatttgaatcaaaaaaaaaaaaattgattaaaaatttaatgatatatgcgactaaacccccaatccaaattgaaacagaaaccatacgtgcataccaaactattcatattattatataggttttaatttggatacttttttgtttctactacaaaaatcaaatgtgaatcaagatcttgaaaatctttgacctaataaaaaacgcgggatagttttggaaaaacctttaatataatttatgtgatgtgatcctgaattttagggacttgggctgcttacgttttcagcaacgattccttctctttgtaatgatcaagaaacacgtgagtcgtgcgtctctcaggtcaaagtaataatcttcttttgtgctctctacctaattgctttgggagaaggaggcttcaaggtatgtcttcgagcctttggagcagatcagtttgatgaacaagacccaaatgagtccaaagccaagagttcttactttaactggttgtattttgctatatcaatcggcatattgaccactcgtctggtcacaaattatgtccaagagaatctgagctgggctttaggatatgcgattccatgtctttctatgatgcttgctctattcttgttcttacttggaatcaaaacttaccgcttcagcaccggaggagaaggaagacagggcaaaaaacatgataacccttttgttagaattggccgtgtttttgtggctgcagctagaaaccggcgacaaactccttctgatacttgtcttcttctgcctaacgaaagcaccaagaaattcaggtattatatgttttgtttgtttggtcttttgttttcttttgtctttacactgtgtttttgtttacaaacaaaatcattttttagtcaagtttcttatctgaacttaggtaattagtaattttacatatattttttaatagtcctccaatagttaaaaagttgtaaatacataaatgaaaatacaaaattcttgaatcatctaactaaaaaaaggttggaacgacttataatctatagaatttaaagcatgtgttagcttcgataatttacatgcatgcttttgttagatataaaattaagtatgcatgtaatttttggtaacgacagattcttggacagagcggtgatttcatgcgattcatatgaagttgaggaagcaaaagctgtgttgagtctcattccaatttggttgtgtagtttggtgtttggcattgtgtttgcgcaatctcctactttctttacaaagcaaggatctacaatggatagatcaatctcatcaacactccaagtccctgcagctacactccaatgcttcataagcctagcaatcctcgtcttcatcccaatctacgaccgtttattcgtcccaatcgcacgatcaatcactcgtaaaccagcaggaattacaacccttcagagaatttccaccggcattttcctctcaattatttcaatggtaatagctgctttggtcgagatgaaaagactcaagactgctcgagatcatggattagttgattcgcctaaagccacggtcccgatgagcgtttgctggctgattccacaatacattctctttggagtctctgacgttttcactatggttggtttgcaagagtttttctacggagaagtcccgccacagcttaggagcatgggactggctctatatctaagcataatcggcataggaaacttcttgagtagcttcatggtatcagtcatcgaggaagccacaagccagtccggtcaagtgagctggttctctaataacctgaaccaggcacatcttgattacttctactggctacttgcttgtctcagctccctcgcctttatttttactgtctattttgccaagtcctatctctacaacagcccaaagtagtctctctagcgatcttgaggaataatgttatgttgagtgatatataaatatgtagtttttgataaagaagaaaaaaataaaaataaataagtactttgtaatccatacaacaaacagtagatatacatatatcccttaaatttgaaaaaaaaaaaaaaaaaaaaacatgtccgttatgagttagggcttttacctatttttaaagggattttttgttgacatgattattaatatgcaactctgaaaattcgagcaaaacactatcacaaaccaatagagtatatgtcatgctcatttcatttttcattggatttaacttactcgattttttttttgttcaatctgaatgttcaatcgagatctcgattcggttctgatttggtcttttcgattttttaaaaagttaatttttgattatttttttgttgggtttgattcgaattctaattctgtttttatgatataaaataaattgttgtaacttaattcagctcttttactctttgaggtcagtttcgtttcgtactctcttattctcagtgttaacataaatcattgagaggttgctctctcttactctcttgtcaatttttagtttcttgttctaacataaagacataaatgacaaaagagaaatgtttctttaattgtctacattgataaatattagattgctttcttctaagtaactacacacgcatacacacttttagacctctaatttaacaacaacgtatgctagtaggctctagataattgcttagttttacaagcaaatttaaactactatccttggacactaacaagatacaagcaaactccaactactaccacatctccacatttgggccttaatcaacttaatgacccaatatgctttaaacaaaacaacccaataaatgggcttgactaatggaccagtaatggccttcttgactttcttcttcttcttcgttgacgctggtttcttcttcatcttccttaatcttaaacctttgatgattgtgtttattctttgcaggcttaatcaaagtattcaattccaacataaacggatgcattaaaacgtatcacacgataaatatatacattcaaatcagatttggtttgtgatttaacattcctagccaaacacatacctcatattaggctcataatctcacatccctctctagtgcggccgtagtacggtgaccaagattatctaacttttacaattgggctgaacttggcattgttatttccataatgaggttgggcatataactgggcctaatatccaactaataaaattacacatactgtattagacaaaaaaaaaaaacacaagcagggaaaaaaagacaacctcctgatatgatttgttctgtcttcatctgttgatgcgagttcactatggaaaaaaagagaatatagtgcacataaaatatatatcagatttgtagtagttaaaagcaacctctaaatttaatctaatattgttcttagttgcatatatatacctcgtgttaacgtgaagtccaatattactaactaatcattttacatatttttccggaggtaacgttaattcgtttttttgtcgtcgttcttaacaagagaaacaaaaggaagttgtctcatcgtgtgctgtaaaaactatgatgtgaaaacggcaagtgttcgtttatttcgttttcatttttggtttctcctttttcttgttttatgtgaaaacggctagtgttctcacacacgttagacaaagaagtattcgtccttttccgaaatatttttgtccaaaattttacaaaattacttaataataattgtcggatacaaattccccaaaaaattctatttgcgtttttaccccaagttttttaaaaactttttaaatccacttttttaacgtctccgtgattgcttatgtgtagataaaataagaaaagtcagatacgatgatcttagcatctattaaaacaaagattaaaattgtcaaaataattttagcacctaaataaattcttacattatgaaactggttactacgatcaatcattgttaagaatggatataaaaataagaaagtgggtttatgaaacgaaaaagagaggaaaaacagctatacgatgataaataagatggcaccagcgaagaacaaaaccaaccaaaacagctttcttctttttcttttgacaaaagcaaccgatgaagggatttttaacggatcactcttgggtcccgcgcaattgtaccaactttacctttttcaaaaacacgatatttttccaataaatatacttatagtatttgcagaatctatttatatatattattaataaaaattgtaaatcctatttttctgtaatttatttaatataacactactcaactcgcataattattttttttgtgtggaaatttacatgaattttagggaaataaaactatcagaatttacttatccaattattccaaaagattagtctttaaactgtaacttgaattcatattaggtggcaaaaaaagtctggcgaccaatagataatagacacaataggatgtgaatggaatttatgtggtgtcatatatgagactatttggttaatgccaccatagggtttgactgctctagtctattggtaattttcccttaatctccgatttcacaatcagtgtacgtggaatcaataatccataacttgtagtaggttacaacaacgcatcaaacaacggttcatatagatgaacaaatataatcatttgattcattacgtgcaaagtagttactagtaccgtgagacttttgaaaatcaaaacttttcagttgttagataataaagttttcaaatgtactatcgttgttaatcatattaaatatttttcctctaaataccaatacattcttttcaaaaaccaagaaaccaatcttttctcgcatgtgttgatatgtcatagaagaatatatatatatatatatatatatatgatattaaattagtgtgtacatatagctagatatattatgtacacaaaaaaatttaaaataaaaagaatctatatgtaaatatgattctattcggagcataaaaaagtatccgaggttttcgttttggaaaatgcatgtgaatcttaagtaaattaaaacataggtgtcattggttatagaggtaaaagacaaattctaacgtttatatacgtcaacaacttgaaaaagagggtaagaatgacatgcgtttaaagattcgtattgtttttttttttatcaactaatattttaaacaaattggattgtgtactatactcatggtatactggtatccaaaaatttataagattatctatattacaggaaaaaaatatcatctttgctaacgtcagaaaaaaacagttattaaatttgtttctgatttcggttaaaactatatatttagattattttgtgaataataaaaggatcatttgcaatggtatcttttttatataaaaaaggaacttaagtgtagtgataatggtgatgtaacaaaaataaatcactactatatactcttttaatttaatacgaatgcgaagatataacatgatgtcatgatttgaaaacacactttactttaaaaataaaaattattaaaaacatgactagcatgctactgctttctctttccgtttcgcaaatgattccacttttttgttgccttctctatcctaatttgaaaattttcactatttaattgtaaagatttgatatttatgcaaacgactaaataaacattaattacgcacatagaagaaagaatcttgacgacttattatgggagaaaaaagctgtagaatatcttcaaaatttcaaaatcaaggagaatcattaagaatgctataatcagaattttatgaatatacgatgatatatatattaaaaaaagtgtcgattatgggatatataaaaatagatatagtaactaatataatgttaaattggtaaaaatggttagaaaaggaagttttaaattggtggaagcaaaaaagacggccgttgggagaaaagaaagagagaggaccccactgagaaaagaggtgtttcgaatgagctgtcaaaacagctccgaccagtctgttcccttcttccaaattcctctgttttcttcttttaaaagcctcctcttcttcctcttctctctcctcacaactcaaaactctctccatctctcttctaaaatcagacaagaaagatggctcaagaggaagtacagaaatcggctgatgtcgctgctgctccggtggtgaaggagaaacctattaccgataaggaggttactattcctacccctgtggcagagaaagaggaagttgctgctcctgtctctgatgagaaggcggttccagagaaggaggtgactccggagaaggaagccccagcggcggaagcggagaaatctgtttcggtgaaggaggaagagacggttgttgtagctgagaaggttgttgttttaactgctgaggaagttcagaagaaggcacttgaggagtttaaggagcttgtaagggaggctttgaacaaacgtgaattcactgctccggtgacgccggttaaggaagagaaaacagaggagaagaaaacagaggaggaaactaaagaggaagagaaaacagaggagaagaaagaagagacaacgactgaggttaaggttgaagaagagaaaccggcggttccagcggcggaggaggagaaatcatcagaggctgctccggttgagaccaaatctgaggagaaacctgaagagaaagcagaggtaacaaccgagaaagcatccagtgccgaagaagatggaaccaagaccgtggaagcaatcgaagaatctatcgtctctgtttcaccacctgaatccgccgtagcacctgtcgtggtagagactgtcgccgttgctgaggcagagccagtggagccggaagaagtctcgatctggggagttccactactccaagacgagagatctgacgtgatcctcacgaaattcctccgtgcaagagactttaaggtcaaagaagctttaaccatgcttaaaaacaccgtccagtggcgtaaagaaaacaaaatcgacgaactcgttgaatccggagaagaagtgagtgagttcgagaagatggtgtttgctcacggtgttgacaaagaaggacacgtcgtgatctacagttcttacggtgagtttcagaacaaggagcttttctccgacaaggagaagcttaacaagttcctcagctggaggattcagctacaagagaagtgtgtgagagctattgatttcagcaaccctgaagcgaagtcttcgtttgtgttcgtcagcgacttcaggaacgctccaggacttggtaaaagagccttgtggcaattcatcagacgcgctgttaaacaattcgaggacaattatcctgaattcgccgctaaagaggtattaaactttatacgacgatactaacacaaaccactagtctagttaataatgttcaaagataattattctcttaaacttagaattagaactacaattaaatattattataatccacttaaagatgatttcttctttaattacattttttatttttttataaatcttctttttttactttttttgcagctattcatcaatgtcccatggtggtacattccatactacaaaacattcggatctatcatcacatccccaaggactaggagcaagatggtccttgctggtccatccaaatctgccgatactattttcaagtaattaaccattaaatcactttaaccatttcataattgtatatttgtatgtttgcatgtttctcactaaggcttattatataatcagatacatagctcctgaacaagttcccgttaaatacggtggacttagcaaagatactcctttgaccgaagaaaccataacggaagccatcgttaaaccggcagcaaactacactattgaattgcctgcttctgaggtataaatacatttaaatctcgatggctaataagctcatattgtaacaatgttgttgatcaagaaggttaatgttgattgtgttgatttgtggtaggcttgcacgctttcatgggagcttagggttttgggtgctgatgtgagctacggagctcagtttgagccaaccaccgaaggaagctatgctgtgatcgtctctaagacacggaagattggatcaaccgatgaaccggtgataaccgattcttttaaggtgggtgaaccgggaaagattgtgatcacaatcgacaaccagacttccaagaagaagaaagtgctctacaggttcaaaactcaataaaaggtctgatctttgaaatccaaatccaaggaagaagcaaaaaaaatgttattttgttatttgggggaaacaaattttaattaattaatttagtttgttatttattatgtaattttgaaatctcaagatgtggttgtgtttttgctttgttttggtattgggggttgttttcgtgtgtggagaatatgtgattaaaattcaaaagaaagtaaagaacactttgtttcatgatttcttacctttaacttttttttgttcctacttttatttgtaaaattgtgtaaatcttattgtatttattacttatacttatctttatgtttctattatctttacttcttgttcatgaacttgattctgaaacaaatgttttcttagtaaagcatttggaaaaatagagttgaaagttacactagatagtgatcataccaagtgttataagtctaatgtattatcatcatcaaagatataaagataatgttcagtggatatttatagttttaagagataaggagaagagacgtgtcaaggctgattgtagatttgttgttatatcaatattgatagagagatatgaatttaaatatgaaaaaggtccatctgtatataatagattgaagtggataacactgaatgagacattaaggacgagatattatgagaatggaccctatttgttgattgatatatggactaataagtcgtggataagagaaggatcacggaatcaagcaacgattatatttgacattaagagaaaaaaaaaattcggcagagaaaaaaagaacatatttaaccgcaaactcgattttgcgaaatctaattctcttgggagggccaagaccaaatgacaatgtctttgaagtgttatttgatttttggattctaagctatcgtagtaaagattggaataggttgaaatttgcggattaacccataaaatcggattagaatgaataattagtctattagtaattagactcattttttgaacatatactctgttcagaaaattcacctctagattgacttcaacatgtttatatggattagctcaacataaacaatggtccgtattctgacaattttagaattttagtttacgttcgtaataaatgaatattttgatttatgttcgagttgacataaacataaatatcttattgaatgttatggttttaatggttgatgcagacgggactaaagtcggactcgcatttacttaattttccattcaaaaaaaaaaaaaaaaaacagcggggataggtgtgaatgttgacaaatgaaaactaataatggctaattggatatggcctactcattaatccaataagtctaaagttaacatcaagtgacttgtcatggctaatccgcatgtttatcaaactacggcccttaccatgatgatcaaaacatacaaattcatcttaaattatatactaactgtatacatgtcaatgtcctttgttttcttttcttcattaacttaagtcattcattttgaaaatgatagtattagtaatatactcatattttgaaactcaggtgagaatgtgcaaatgagattggagtacactggccattttttcttagtgagaaacattattaatcgaatttcatactagtttcgaaactttaattttcttttgtagataaaaagaacgtgtttataccaaaaatagatttgttacttcaccataaatgccaacatcgtgtaattagaatatggactttttaacaagatccaccaacaattttgaaagttgaaaacagctcaagttgaggttttttttttagtacagagtatgaattttgtaatggttacatgaatgaagtaatatgtaaaagaatgggagtgatcataatgtctggtccgaagacagttcggagtttttataagaaaatggcagaaataatcaaacaatagaaaaggaagggacatgcgtggaccgacacaacacaaacagccatgaatgcaatttgaacatattcactactgccctagtcgtcgcatgtgcttcttcatcaattcttcattcactttctatttgctttctccttgtataaattcttaaagaaaataataataaaatatcactttcacaataattgttgttggttgatcacttcacttccataaatagagaggtaggtatttacatatacatttgtgtgaatgtgaaacagggtttgtatatacgcttatagatttgttcatttgactatttttagtgttagcagtttgtatatttcaaaaccatttacttgttaaccaaatgggtggtggtctagtggtaatacaaatggattagttttttcgtgttccaagttcaatcatatccttctatgatacggaagattgtttttaaaatcagaatatctaaatctaactccggatgttggaagtgattgtggatcaaaagcccataaacgaccgatcttagacctaaaaatcaagtcaaagtatgaactaatttgagtatatttacatttttttattcctctaaatagtacaacaaaagtagtagacaactagacaaggataactgaatataaacaagctgagaacaatttttcattaccggtctttcgtttttttattcgtaacaaaaaaaaaggaaaaaaaactcatacaaaagggttatcacagccaagaatcaagtcaggaaatagttggcatttgaatgatgcaagagccaacagattttgggttaaacaagacacaaattgaacctcttccacctactccagtcttgagacaacaacattatgtcagtgtcgagaagttgttccaacgtgtaaatcaacagccttacgaatcttttttcattgaatattaataaaacttgtgatttatatacttcgatgttgcacgacacctaataagtcgtataaacatgatttcataaacagacacaatcaataaattggttgagatttaaagatctttatttcataaagtcatgtagtaatatattctccacaaatgattgattacaagagcaaaataaaccacacataatttatatgatatgataaagtaaacactcacatatacaaacacacataagatatctcacttctgtttcaagaaaaacaaaagtctagaaacaacattttttgtaaaataaaacaaagtttggaaacatttttcatttggttcttaaaacttagagaggtttgacattgaacctgtaaacgagcttcttcttcttagaggttgggttgtctactgtgagtaaaaccttgccaagctcattcactttgaagctatgggttaacaccggttcatcggatggtctcatcttcctcggtttttgtataaccaccgtgtaagcatctttctcttccggcacaaattcagccttgtagctcacttcccatccagttacccttatctcccacacaagttcacatttctacgccaacaaaaaaaaacttgaaatcaaacattcatagagttgtaataaatatcatgactaaccaaccttggatgtcacctttcacataatgacagagttaaatatgtgaatgctctaacctcatagattatgatctcaacagtttgttttgttccgggcttaacagtgatctcagaggctgaatcttccaacgaaaagtctggattgcagtcgcaaggatcaacactcaatccaccatattgtactggaacttgctcgggtgatatgtatctatagtccacatttttcaaacagagttaagagactaaacataaatggtttcaagaaacaaaacaaacggactcaatgttacttgaatagggtttcagctgaacgcgaaggaccagcaaacacaagcttgctctttgatcttggtgtcatgaacggaccaatcacagtataaaacacaaggtaccaccaaggaacattgataaaagcctgaaaatattgatcaacaaaacattcaacacgaacatgtcttaatgctaagaaacctaaaacagatatctactctagtttagagctaaaggtccacaggaaaatgttacctgtttgaagacaaactcagggtaattgtcctgaagcaactcaacagcttgcttagtagctgatctaagctctttcttccctaaccccggagaattcttcatatcattaacctgaaaaatagtagaaaccccaccagagctaaaatctagcttccttatactcctctccaagaactgaatcctagtcctcaagaaatgtttcctcttttcctcatcagaaaacgtcttattataaagctccttgttctgaaactcaccatagacattgtaacaaacagggtgaccttctcggtcatgtccatgcataaacacaaccttgtcaagatcatccacaagatcttcctcgaccaattcatcgatcttgaactcctttctccacttgattgtgttcttgagcatagcaaacgaatctttcaccttgaactccctagctcttaggaattttaacaaaacgacgtcgcttctatcgtcttcaagtaatggaatcccccaaatcttgacttcttctggtgtgttggtgaattggtgattgtctagagcttctcgaactagatgttttagttcatcgagtgatttcttctcggaattagatagatcagaaagtttgctgctttcttctttgaatgaaccaagattctgtggaatcatactctttttctcttcagctacttctttctgcgatgcttcgtctttaacctcttgtttctccgtcgatgcagtttctgtttccgtcactgtcggtggatgatgctctgccgcggtttcttcttctggcttggtggtggtatctgcagtttccggtggattagtctcagtcactttctccagagtttctgtctctgtcggtagggcatcttgagtagattcagatacttcagaaggcgtgaggctcggagaaggtagcttttccggtgtaacgagagtggtagtagtaggttcttcagccattttttacttgtgccgtcttgttctgtgattgttgttcctaaattgggcaaaagtgaattttgggtttatagaaagaaagaaagaaagtggagacaaaaaaatacgttgagacgtcgtcgtaagtacaaaagggtatattggtaatgccaatcgaaccggtttttttattttattttatttttgttgtaaaaagattaatatattttctcgttttagcatcaattccaaattatatatcaggatttttggtgtgacaaaaaagacaaaacaatcgtgaaattggatccaatgacatttgaagtatacatttttatctttcaattttgaataataataaaaaaaaaaaagtaaaaacagaagagatccacgtgaaaaatcatatgtttgatttttttattcctttgttttttgtttctttttttggcgtcctgacaccttcactgctctacgaatccaaccaacactgtaaaaattctattttgtctcagttaaaattctaatataatccagttgttggttacagtattttccaaaacaatacttttagaaccatataacaataatctaaaccaaacagaaaactcaaaactcgatcagtttttttttttgttttaaacagccttagtggccaatgtttacggcccatcataacaacatattgggcctaagttaaggccacgtttattgtgggctctatagatcggtaaagtcaagaaaaggaaatcacgaacaacggaagaacaaaactctgagcgaatcaatcaatcggaaaaaggagataggtttcgcgaaaatggcggagaaaaaggatagtgtgccaccggaatacgatgtgaatgctaagtgggacgcatgtctcgatctcactgtccgccgcttcgtttactcttccctcggcggcgcatttgccggtcttctgttcttcagttcggtgtttctatatctccctactcgattctcgttttcttattacttgcttgtagctgttttatgatagatgtgtagtgttattacgagaatcactatgaattagggttttagagtgtttaatttctccaatttgaatcatatattgttccagttcttgaattattacttgccttgagattgtttttgtgcataatttagtttctgattttgtatagggagtcctgttacaagatgggcatcgattgctttaggtgctggaattggtattggctctgcatattcagattgttctcgtgcttttgattcaccttcttcatcttcagctaatttagcagctcccaagaataatattacagagacttctcctgtatctcaggttagttggaatctcttttggtaaatgcatttgtttgggggaagcaatgcattagtttggtacaaaattgatactagggagaagatgttaaactttagaaaggttatcgtttagctgatggatataagaagttaagaaccaacttctttgcagatgattaaaagtaaattgagaaagttaagcatggcatttgttaaactttatagttcactagacatcttgagaattgtcttaagataacatatacatgtttgttagcgtcgtagtgattgctaatgaactacgaattgttaaataacgactcatagagtactagatatctatccttctttcatagcatagttccctcttgcaacttccattgtttgtagtgttcaatataagcagagtaacacaagtaaaaagcaggaaaaagttataattgcaaatacgagtgatggttagttcatgagtgatcattgtctatgagtactaaagatatatgtcgttcgcctggtttacctctgacgaatcgatcatcttaaacccatgagaatgtaaaagaacataaggttgaatattttctttattcttcttatttttgcaggctgcagacgagtagacaatgtcgataaagtggaagttagtaacacatccaatgatcggggtgttcagaaacagagctattatcatgcaatgctttgttgaattgtttcctaaacctgcaaagacaagagtctattgagataatgtcaaatgtaaaaacctttttttattcgctctatctctctcccagtggttttgaacaagtgaatacaaaaatgttgcatcaatcacccattctattttttcaacctcaacaaggatcatcatgccaacgacgtcgttttcatgtgttgaaaattttcaaaccggaaataaccgagagggtcccacaagagcaataataatattaaaaaaatatcgaaccaatcagagttccgatggaccgccatagtcaccgactaaaaaaaccagcgaccacgtaaatctttgacgacgaggaggaggaggaggagaagaataaacggaagaaactaagagatgaatagtccaccggagaacgatctttgttcgatatgtcattcccacttcaccgctccttgtcaagccaattgttcccattggttctgcggtttacctctctctatctctctcaatcctttcgagtctttgattcgtttctcttgtctcttcgctaactctgttcaatgagatcggaaattttttgcctgaatttgtgcccatttgttttcctttttgtcattgactgttattgcctacgagcctcctgaatcttgatcgttagcttttggttaaagattaaattttgcctttagaatccaatcagcataagtttgtaatctcaaagttccaaacttgaacaattttgtttaccctctctctgctttcactaccgattacagattcttggatttggttgagttcggtgattacttgcttagaacatatagatttcttggcttactagttttttcaagtccactggtctaattacgaagtttgcgtggtttcattgcaacgaaagattctgccttttctgtgatctgtcgctctaactcttcttttcactttgcttttagggaactgcattatgctggtgtggaggcatggatctacattacagccatgtaaatgccctttgtgtcgtcgtcatattagtttgttggttccttcagaggacacaatcagagaccgtaatgacgctacagttaaggaggttcttggtaatcttgaaacttacaaccgactctttggcgggcgttcaagtagtttagttcaggtatgtgttctatctctgtgttttaagttgcttgtttggtcttttgtggaaaaagtgaatgtgttttagtttttgagatatataagacttccatgaatccccccataagtaggattgtaatgtcaaatcgctcataaggaaattcttattcccttggcagaggatgcaagacctgcccttcttactacggaggttgttgcgggaaatgatggatccacaaagaacgcttccacttgtcattagggctcgggtttatatcgcagttaagttcgatgacatcttgatctctctgtttatacatagattagtcatgttatgggtagttactgttccatttggtgtcaaacatgacgcagtttctttgtattggatgcagatgattctcagtgctgtttacataatcagtccaatagatatcattccagaaggtgattttttttttaatcctatgaatcttttctttgtctccctgtcttctcacaaatcctttcttaactaatttttcttaggagttctgggggtagtcggtttgcttgatgatctactcatagcactgatttgtttcctccatgttgctgctctgtaccgctcggttctctatttccgtcatgccggttcgtgaatcaatgagtgtctttgacattatacgttgcagttcaagaactagagatgtgtgcttaccttttcttctgtctttgatcctttccctttacaaatacacaattgttctgtttagctaaggaaaactgaaatgtgtgatgataaagatcacagcacaaaaagcttggaagtacatatcaatcatcttcctaccacttcctatacgctagtctttttgacccttccactcaaatttatcaattatggtttcgaccgttgactcgagaaactctgagatgggtcatggtgatgggaacaaaaactttacttcagtctctgttctctcagctacaaatcaaatattgagtggtcctcttctggaaaccttgataggtcttactcttacctcagtagctgctgaatagtcttcacaggtttttacgatcttagtatccgtttattggccataaccgatacggtgtagtagatttaagaagttctttcggaagtctcacacgctaaaggaataactttgcaatttactctagtttatcgatatttcaagaatcaaaagattactactcgatgtctagaagtttccgctatgtagaaaacttggttgtttcaaaatgtcgttttgatggtttggcctaaaatttaaagtggtttatccactagtagtctctaagtgttgaaccgtagaacagattttccatttatagagagacaatacaatgtgtcatagatgagtggaccacaagatagaaccacaaaaaaaaatttgtctcaacatggtcacacgtgcatagtacacgtacagctttcgtggattctattcacatggtatcaatcaaaaacacatacgcgtgatagactcatctttttcatgtgcatgtcccgaaagtgacgttgctccactggaactcaccgcctaaaaatcccatcttcaaaacgtttctcttggccctcgatataaatgcattggttaccaaattgtcgatattattgcttcaatcatgattcggcttcattggtatatccgtatatatcccttgtcacgtaaggcaaacacataaaatatatgataaaaacaaaaattaatggagttgaatttagtgttacctataacgggtattaattatacaaaagtatgtaaattagtaaaatagtgaatcgcccatgaagttgcataatcttgtcttgtaaacaaatgtattgtaatgacgtgacgttgtgttagtagaggtatggagacagatatgctcttctgatcagtttctcgtccgatcaatattattatcattgtgggacggtcctactcgacaaattatagagacacccacgtttacattattgtaaatatttatatttttagctaacttcgggcctactgtcactatttgctagctatattttcttcaaaatgaaaccgtcatctatattcaatgtcctgtttcaaataagctcaaaatattttggtcaaaattacctttacttgatggaattttgcaatgcttgatacattatgtttatgcaattttatggtgcattattatatgtatgtaaagtatctaatttttaagtatactcaacaacgaataactaaaacatagatcatatctaacactagtgtttgtctctagcgataataaaactttaaattctctaatgtctctaccaatagaatatttttgtgtgatatatatgtatatatagagcaaacaatgtggaaagcgactgggaaaataaaggaaccaaatgagaaagggaagggatacagctggggaagtcaacatccaaatcaaagatcttttgattctcactcacatatccctttattaaaccgtatctcttcccatttaaaccgacacaagaaaatttattaggtatcacggttaatactttattattcagtagaaagtattagtatttaaacaactaaagagaagttttttttttttcttgcaatagctaaaattccattttgtatactcttaaaaaaactatgttagtattattgattttggccaaatgtatggggggattttttttttatagtattctcatctactttttgtttttgttattgactgtctctgatttctttctcgtgtattgtctcactttttaaatcattatcttagatttttcttaataaaataaagaagcaacatactatatactattctaacatgtaggatgataaccttgtaagggccataactttatggaatttcatttgtaagtttgaataattaccaatcgagtgaagtgagcatgaaaacaaagtgattcagtgaaaggggtacatttataaccacataatcatcatatactaaccatttcactatctattaccgtttctaaatattttactgtattatggtcctttaatttgtgttttaacttttagtggctaaacgatgccataggacccaaggccatcacacattgatatcaatcagaaagagaataagcaattataagttttcataataaatatgtgatataaaacttggagataaatcagaatgggattcggagcataaggggataacattagagagatggatgtagaaagaaaaggacattgagtaggttagacgattcttatcaaacttcacttaaaagggtaatcgacccaacaacattttagttctctctttcttttttggttctttaattttaatttattttccagactgtaaacgaatattaacactacagaagaaaccaaaaatgttttttttttcggcctaactatttgggatcaatacgattcgttgcttatttttttctagtaaccttcataggtttctccaagctttcattatttattgtaattgatctccactttaaaagtaaaatccaataaatcagcatttcctaattatatactagtaatattttttcacttttatttttatcatcttatatataggaactatatgaatgtaaatgttttcacgtaacgttttggacatatacaactagtagttgctactaattccaataggaacaattatcgctatgacaaaaacaaatatcaaataagattattttccagacaatgacgtatcattataataataaattttaaaatgttttattacaatgaatctccacttattatcaatccatctagaaacattaaccgaaagatgaatgtttttctacatccatgaaactaattttttaggtcaatgtctgttgttgatcctcttttatatattagaaaactatataagcaccgttggattttcttaacctgagagcgacgctaactataaagaaagatcatcataacatattatatgtcaaaatcagtatagtcagatgatttttattaactttaaaagtttttacaactttcacgaacatgaattgtatggtgagagaagctagctagagaaatagttgattttttgataaatgatttaacctttttggctccaagtctcgacgacaactttctcttgtctcttctcacttctctttcctctctcctctcttctcaaatctctctctctttcgtatttcttggagacatctttctctggaactgttcttcatcgaattctatcttttgagagaaactaaattaagttgataatcgaagaacttcctcgaaattaggacttcttctgctttttgttgtttcctagagattttcctagaacgtggtccaagaaaatcacacaaaaaggttcattccttttttcttaccagaaaccacaaatcaaaatcatctcccctgtctttgtttgaaatctctcaaatttaagaaggatcatccattcactaacctgagattttggataggtttcatctatttcaggtacgataattcttcattatattttgtttaatcccgttgcttttcttggttttaagttttgaatctttaagcctcacatatttgttttctttactcaatctaaggttgttttatttccaaagatttaaaggatagattctgtgaaaaagtttctataaatttcaaattttcaaatgtgtaggttactagctctactaataacataattactttatccactaactacaatctgcatgactcatttttaacttgattgtttatttaattacctttttaatcattaatccttgatagatactcaattctcaatgttgtgttgttcttttttcattaaaattcaatgcttttaaagtttatattcacagatttagaaggagagagagagagtaaagatagatcatttgctttactttcaaacaaaataattaagaaactgaaaatttaggagaaggataataaactttctgcactgtaatgagtacctttaaagctcacttttggagtttgtgtacttaagcaagcttaatatgtccatctaccatacatgatgtataaatgtatcacaactaatttatgatttatacaaaactgttcacaaatcacatgcacccattcttcttacaaaatctttgctatgattgattttttatatatatagtaatatacgtgcatagaatataataataataaacagtaaacacaattggaaaaccataatactatgaaaatcccatacattaaaatatcaaatttattttgagtggattattaattgtatagtggttagtttgttgatttcatatctttatttttctatgtaggtgggaattccagtgcatcgaccatgatcaacacctaaactacaaattgaccgttttgcccttgggaatcactataaatgtcgagaagaccagacctcctacgtggcagcgtggtcgccaccgtggctgccacgtttctcctcttcattttcccgccgaatgttgaatcgaccgttgagaaacaagctctgtttcgcttcaaaaaccgcctcgacgactctcacaacattctacaatcttggaagccttccgattcaccatgcgtgtttcgcggcatcacatgcgacccgttatccggcgaagtcatcggtatttctctaggaaacgtaaatctctccggcaccatttctccatcaatctcagctctcacaaagctctctacgctatcgcttccatctaacttcatctccggaagaatcccgccagagatagtcaactgcaaaaaccttaaagttctcaatctcacctccaacagactctccggaacaatcccaaacctttctcctctaaagtccctagaaattctcgacatctccgggaattttcttaacggagagtttcaaagctggattgggaatatgaatcagttggtttctctcggtcttggcaacaatcactacgaagaaggtataattcctgagagtattggaggtttaaagaaacttacttggctgttcttagctcgctccaacttgaccgggaagattccaaactcgatctttgatctgaatgctctcgacactttcgacatcgcgaacaacgcaatctccgatgatttcccaatcttaatctcaagattggtaaatctcaccaagattgagttgttcaacaacagcttaacaggtaaaatccctccggagataaagaacttgactcgtttacgcgaattcgacatctcttcgaatcagttgagcggggttttacctgaagaactcggagttttgaaggagctcagagttttccactgtcatgaaaacaacttcaccggcgaatttccttctggtttcggcgatctaagtcacctcacttctctttcgatttatagaaacaacttctccggtgaatttccggttaacatcggccggttctcgccgctcgacacggttgatatatctgaaaacgagtttactggtccatttccaagattcttatgccaaaacaagaaactacaattcttgctcgccttgcagaacgagttttccggcgagattccgagatcttacggcgagtgcaaatctctattgagactaaggattaacaacaaccgtctaagtggtcaagttgttgaaggattctggtctctaccgcttgctaagatgattgatctcagcgataacgaactcaccggagaggtttctcctcagattggactttcaacagaactgagtcagctcattttacagaacaacagattttccggcaagattcctcgtgagctcggaagattgactaatatagagaggatttatctgagcaacaacaatctttccggcgaaattccgatggaagttggagatttgaaagagttatcatctctgcatcttgaaaacaattcattaacaggatttatccctaaggaattgaagaattgtgtcaaacttgttgatctgaatctcgctaagaacttcttgaccggagaaatccctaacagtttatctcagattgcttctttaaactcgttggatttctcagggaataggctaacaggtgaaatcccggcgagtcttgtgaagttgaagctgagtttcattgacttgtctggaaatcaactttcaggaagaataccaccggatcttttagcggtgggaggatccaccgcgttctcacgtaacgagaagctctgtgttgataaagagaacgctaaaacaaatcagaacttggggttgagtatttgcagtggctaccaaaacgtgaagaggaatagttcactcgatggaacactcttgttcttggctcttgcaattgttgtggtagtactagtgagtggtttgttcgcgttgcgttacagagttgtgaagatacgtgagcttgattcggaaaacagagatatcaacaaggcggatgcgaagtggaaaatcgcgtcttttcatcaaatggagttggacgttgatgagatttgtagattggatgaagatcatgtgattggatctggaagtgcaggaaaagtgtaccgtgttgatttgaaaaaaggtggcgggacagtggcggttaagtggttgaagagaggaggaggagaagaaggtgatggaacagaggtctctgttgcggagatggagattcttggaaagattagacacagaaacgtgttgaaactctacgcttgtttggttggaagaggttctagatatttggtgtttgagttcatggagaatgggaacttgtatcaagctcttggcaacaatattaaaggcggtctaccagaactggattggctcaaaaggtactctctagtcaataagaaccagtttcaaaatggttaatcatggatccaagattataagaaagaaaagtgattaatttgtccctttttgttggataaacagatataaaattgcggtgggagcggcaaaaggaatcgcatatttgcatcatgattgttgtccacccatcattcacagagatataaagtcaagcaacattttacttgacggagattatgagtcgaaaatcgcagattttggagttgcaaaagttgcagacaaaggatatgaatggagctgcgttgctggaactcatggctatatggctcctggtgagtttccaacttaactataaactttggttcacaagatgaaaactgggaactgattcttttttgttgtaattgtgtgatatgatcactgcagagctggcttactccttcaaggcaacggaaaagagtgatgtgtacagcttcggtgtggttcttctagagctagttaccggtcttcggcctatggaagacgagtttggagaggggaaagacattgttgactatgtctactctcagattcaacaagatccgaggaaccttcaaaatgttttggacaagcaagttttgtccacttatatagaagaaagcatgattagagttctgaagatgggtcttctctgcactacgaagctcccgaatctcagaccgagtatgagagaggtcgtgagaaagcttgacgacgctgatccctgtgtctccaattctcaagacacaactggaaagattacagtatagattgatgattcacctaccacgttttagttatggttaagactagtcactggtcaaagaagtatcagtttgttcgagacttgagtaaaagtacgagagattggtttttgcttatttactaatccgttgtactaaaaagtttgcagtgaaaggtcggagttatcagaaagagacttggattaatttatattaactactgtgggtgtgtgttacaggatattattcttgtgacgataatacacgaaaatgttacctcttaattgacgaattcgattccggtgagaggaagtccttcatgcaactgaagcgcgaggtctccgacaatctacatttaacaacagtaagagtttagaatccatttccaaccaaatgcagaagacatatcagaaagagtgaatcttccttggatgagtttaccttggccatggacctatatgaatattcggtaactccagcgacatgaggggttattataacgtttttgaacttcaaaataggatcatttggatcaaacggctcagaccacgccacatcaatcccaaggcctcctagatgaccggactccagattctggaaagctgattcatagttaataagaccacctcgggcaatatttacaagaagagcaccctgaaacaaccaaagagaagtcaacagtcaccagtaatcacaaaataattcaactccgttgacgacaaaaaaaaaaaaaaaaaattcaactcggtttttccaaatatgaatagccccggtaatcacctttttcattgagcatatgaactccttattcactatttcagcctgaaaatgtcatcatgtagaagaaacaatagccatattatctaaattgcagatatatttttcactgccaagaacaactcttcatattcatttgcttgacaagtttatgatgaaggagaagtggaaatattaccgtttctttgttgagcctcaaacaaacaacgactatatcggctttgccagcgaatgtgtaaatgtcttcatggctacctttctcatcaactagcctggctgaagatataagttaacaaattactagacctcaggatggtttgtcaaggcaaacagaggagttaaaagagaacccatacagtctgagtcgacgatagaagcaggccagaatcttttcgtggctattactctcgacccaaatggcttcaaccgtttagccagctctattccgatgtttccatatcctaagataaatacctgtataatagaaagaaagaaaaacaaacaaactttgtttagggatataagccaaaagatatctaatgcagatttaagatcactctaagactcacagttttaccaagaagcgtgtcaccggttggttctccaagtagtctatttctcagagatatttgcatttcgttctgcaacatgtcgtacgaattacctttagctaagaaagaaatatcagaactagcacttgagacacttaagagttatactaatggaaccatacagaggcaaatcaaataaacacctgtttcttaagaagtcccagcattagatatatagccatctcagagcaagatgcagcatttccagtaccctcactaggaattctagcgaccttaatcccatgtttagtagcagcatcaatgtcaacaccttcacaagtaaatgacttgaaatagttaagtaaaattgcagcttaagatgagtccatttatgctctatcgagtattaatgcataagaaaactgagacagataccgtcgagaccaacaccgtactgcataataagctttatgttgcttgcacgagatataacatttgaatccatttgcatagtcattgccacacatatatgatagttcttaataacctcagggacatcgcggtaatggacaacatcaacctatatgaaccaaaaccatacaaaacaaacaataaccatctcaaaaataagaactttttactgatagtgaaaactagtaacaccaccacatgatttatacacagtttaaaaccaaaactcaaacactagcatctacacaacaataaactagtctaggagagtcaagttttcaactttactcattggtagaagtaaagttatcaactttactaaattggtagaagaaatcaaatagcttttgtaccttaataaaagggtaaggttgcaagtattctctggtgaaattgtaggaatcagggaagtgaggaccgcagaatagaacacgagttacatgcatgtcttctttctcaactattctctcaatcttaaccactttactttgcctaaccaacatccaattgaaatttgactcagacactcgactttgtacaaaacacaggttcccagagaggacatagatctacaaattcgtatgtataagaatctggaacaaaggatgaattttttattcacctggagatagagcgagcttggatagagtagaagagcgaagcgacgcttgagtttctgcttcgtaacgtagcttttgcgattttaaacattatcgtcatcactcagatcaacattagcagcaacggttgatgttttttcttacttgattcaggacttttcataattcaatacgtatcccgtataaatatctttatttataatttatccccaaaatttcataaatgtcgtattaaaccataattcgtatgttcgattgttccgggacattataattgaaactgaaaaatgcagaaagaaaataaagatatgtacagagacactttctcaataaccaaattatacagtatttgacggagtagcatcacaggaacgaaggtgatccgaagaattttccccgacgttgttgttctttccaagaaataatcgatcgaacggcgatcgcatagctagaagcaaacttttgggtgaactagcacgcaccttatcaccaccactgccacctggagacatgtgattgatcgaacttgtccggtacggaggagttatggagaatggtcttcgatctaaccggccatcttggtcgaaccgttcataataaaaataatttctctcactccctaagctcccggttctatatcctctcgttgaactcatcacctgaggtaaggccacatgaacttttgaaaggttgggattcactaacttattatgtatgtcttgtggtaatctaagcgtgaaccggtcgagattctctgaatgttgaccggtccggtcagaattcgtgaacattccagctaaattccatccggtcgacatagacctacgtggcatgctctggttacaagttaacgccactgactcaatcaatcgcgcatcaggagaacctaaagatctaatccgatcaccgttcggatcagaaccaggaggatcgttaactaaaccaggtatttgaatagagactatggattcacccggtacggggataagatcagcgcggcaaagaggacacgtggtgtgagagcggagccaagcgtcaatgcaaccaggatggaacacgtggcagcatttaggaattaaacgcagcgtttcatcgtcttcgaactcgtttaagcaaacagaacactcgagtgcttctttgccgatcctaagcgtcttcacggtggagtattggaaagttggaaaagtctcgatgatcgacgcgtcgagcccacgcgcctgttgccggttcgtggcaagccagtttccggcgtcgttggggtttccatagtccatccccatgactcgctcgagacatcttcggatatagactgagaaaaacccaagaaagaagaaaacactgacgaggacgatcatgagtattgccatggttgggtcaaaccgagagctatctccggaaacgtctgaaccaccgtgagtggcttgacccgcgacgaatttaaatccaccgtggctggagaggagtagcagaaagaggagtagttgtagaatcgagccatgatcatgaccaccgatgattgaacggttgagattggttctacctttggggttcatgaggaccaaactttcgtcagtttggctctccggtccatgcaatgaaaaacaataacttgtctatatttctgttttcttttgaagaaaataaaataaaatatggtgtgtggaggaacattaagagactacgatttgaggttgctcaatggttacaaagagtttgtggttggtaggttgactttgaagtttgaacaatagcactatttaaagatgttgcatcataattaatgaatatgtttttgtttatttggttgacagcataactaattaataatttagatataacatttttgtataaaatactatatgatatgattgttatgtttccgtcaagaagttgggatgtatttatcaatgaagcaaccggttagtgcaaatatcgccaagatttcttaatgtgatggttctataattgtttagtttcttcgtaaatcgtaaccatgcaattccaatattccagccttatcacactttaacgctaatgccttttgtttcactactaaaatttgtaaacaatcaatatgagtgaatcaacttatcgaattaaaaaccataattttttttttttacaaagattttgatgtatcatagaaccactatggtaacctctggaaaaaccagtggggtgtgtgagatggtggctatttggtcaagtaagatttaaaaagttgcatgtctgtcagaggaaaatgcagtttgtacaatggaattgtaacgcaattacgcatgaacgtttcacgttgactaacaaaattaattaaattagtgaaagtgatcactaatttgtctttgcatcgtgcttcatcccatgtcgtcatcacgtcgttgtccaattatgggttatgttcttatatacagaataggactataggttgcatccatgctatcgtgtaattatctttaaaaataattaggttttggttagtcttttagagcctctatttgatcatatcctttgggataatgattggatatgggatgtagtgacttttacgacgggctgaaaataatatatacatgtataaagtaagaatgaaatgaacataatttgatgaccaaaaatatgaatatataaagttttatttatcggatcacttaaataactataaggtaccgtctgcaatgtcttcttcctgtattttattaacaaaactgtatacttaattttatacaatattatcttttgttgaatacgttatagatttatgtataagataataacacattaattatgatgtgatatggatctgaatttggatggtgacacaacagttagcaacacttgtatatatataacacaaaccattagattacaattatggataattttattttaaattttaaattttttgaattatataatatacaagtccttgctaatcttttgttgatttgaaaatccgactgtttaaacataagaatatgtggatgtaagtagaactgtgaaagtgtgcaaaaattattataactagttaacaacaaatatgtataaggaaatttggaattcaaattttatgcatgttgctgaatatatggcagattagtgatggtccgaagacccatctgggtaatacgaaaggcccgtaaagtttatatgcatcagtgtaggctcattaggctattacttaatcgtgagcctcaaatagcgtctatgactagcagtcgcatggattgatatgtctggtgtacattgtgcactgttatcaatcctctgacgaacagtgtctttttttttttgaacctctgcctctcattttaatttgcactattattttctaatgaaatggagaaagatcgttgaaattaatggagaaagtttggacaacaaatatttaaatgttcccatcatttgatttgctatattcttttgggagacaaaagccgaaagagaagatttaatagcaaaagaaaatgccggttcttgtcatatggttttgcttacagcgtagatatatattttttccttatattttcgaatgaagtgaaaaatatattataacactatattatgactactatttgtaaacaccttgaggattaattaggattgtaagtttaacaatcaaatgagttggtaatgcatgaaaggattaggctatgaggcaatgggccgggttcaagactccaaaccgtgttttcttcaacaaaaacaaaattagtataaaaagtgagttttatgagctaatccagctgcagcaagccatgatctcaaactaaatactatcgctaatattctttctttctttttatcaaaaaatattcttgttgttctccttttgttttgagcttatattgtgaatgaaatatattaaacaagactccaaatatagattgtggttttctaaaatctagatattaaaaacaatcactctagtacgtatgcgccacaggaaattatgagtttaaaccgacgatgcatgtctatcgctatctacaaaaaattatataataactaagtttagaatattagttaattgctcaagaaaaacatatacagtataagtttagaatatgaacacattacacatgcttcgaacaagtacagtcctcgaattagaatttcaggtagcggagtttccgcttaaaccacatgctagctaatcttagagatttgttttaaaatgtagattaggctgtttgttgccaggatgcttcgttgtaattagctatttcgttttttaaattatcaccaaagaataatgtatcctccgatattaataatagcaaacggcaaattcacgcattttcgtgaatatgacgtggcaagagttctcttgctatatatagataacaaaactttgaatggaaaatctagtctacgttagcgattaatctcagaacgtctctgtagatttatgtagtccgagttcatacttggtttaattgtcgcttttcaaaaacaattaatgttattttgattactaatcagactaattttccgaatccgaacgttgaaataagatgtgttagaaatcatcctttttctaattacacgaattatagcattaggtgggatttgcttcctgcatgcgttaaagatcgttattttcttgatagagaaacgtgtgtttttaattctttttttcacttaaatctaaatctgaaagtgaattatgtatacgtttctattaagaaatatataacgataactttaaaaatgtatcagtattcagtaaccatgaaacgtatttttcatccttataaatgctactaaattgtaaaattagctccttcgaagtcgtaaacccaaatcttgattcatgttgataggccattggtgtataaatatataatcttcctacttcactaaggctcatagtgtagatacgagttttgcacgtaagaagttttatgaaaatgcacgtagatagcatttatcagactagtgtattatttgacttttagcagatcatttcacttttttttttacaagtgcaataagaccgtaaaaagtaaaagaaaagaaagcatatgtagtctttttttttcggctaaacaaggtatagtcagactcaataaatatataatgagtgccataataatccgacgaagatatggccagggcatcaagatccattagtcattactataagtgaagacatttcactaataagacatgagaaatttgcagaagagcgtgcatctaaactacatacgacaaaggaaatcttgggacgtgttatttgagtatgtctttgaataaataaagaattacaagatcgctgttaccctagattatttttggttaaatcatagtttaacaagttggataggatgatctgataaatttgcataaataaaccctttaacaaaaaataaaataaaattgcataaataaataatctccacatacagaaattattacattctccaagaaaaaacctcttcgtccttggtgtaaaaagtgcatggaaattgtatataaatattaaaatcatcagaaaaccaaaaaaacgtatggaatgtcttgctggaaattagagtaattatcgaacatttcaattttattgagtcgatagaaaacgatatttggagtattcaatacgtgtaatatatttacgctgtcgggtgacgatttatatgtactgaagacaaaacaaaaagaagacgatttacatgaactttagataacttgtaatcttgtatgtttgtccaagaaaaaaaaaaaaaaaaaaacttgtatgtattctgtttttctttttccgtatagtatcttactacaataattccagtaaaattagatatatatttttttctttcatgctttctaatactttcacactagctttcatttttaatgtatgtgaactaaaattttacttataacagaatgatataactcatcaagatttgatcaaaggatgagataaaaggtaaatgggaaacaaagacattggaaatggtactgctgcagaaagctactcaactttttgatcggaaatagagagaaagagagagagcgctttggactgtgttattgggaagtcctctcgggaaaagagagaagccaatgcttgagatcattagagagagacaaaagaagagcattgtgaggtcacatggctcactctcctctcattgttgtttcaattttacttctttgcccccgcccccaatttatttttacagtagctaaatttaattttgttaaaaacaaagagcttatattgatgcattgatttgatatttttaaagcatcactttatagttcaaattgattcagtatactttaattctaattataattaagtaaattgatttttgtttcaattcgataatgctaaattgtaagtaaccgagtaattctggactagtaggactcgaacctaaaacaatagaactgtcaacacatggtaacaaattttagggtactcttataaatgaagtttattacgtaaataggaattgttctaagcttttgaacaacaaaaagagaaaagaaaaaatagtttaagtttggttgaaaataatataagaaaaaattgatctaagcttttgtcgttttaggatacttaatccaacaatatatagttaatagatattttaacttttaatgtataagaaaatactaaaacgacaattactttaactgattgtgacacaaagacatcacaaaaaacaattatgtcatgtcttgatcaattaataatacttatatctagttaaattcatcacaaattaattaaatttttgaaaataaatttaaaacaataaaatttataatacagtatataaatcgattgaaatattcaatgcatgtaggaagacaaatctctcactatatatgtaaactaatttaaaatacattattttctcatcaaaaaatactattttatttggacctataatagtttataaatttaaatattttcaatgattattgtttaaattttgtaatttattagcattaaataatttaaaaaatgtatggaaaatcaatattttagaaacaaatggaatatatgtaatggttttaggtggtttattgtcattgtgtcatgatttcgcatagggcccttttagatcttacattgttggatcgtttacgtggataactctgtgcatctgttgttaacagtaaaccgtttatgcataaaaatattatgtcgggagtgatcattatattagatggcataaagttgatacttgataaagatcgaattgtcgcgaaaacaatcttaagaatagttcatattcaaaatatacttagtggttgcataataatgagtttgatgggacaaaattttaccagttgtgttactcagatattaatcaagacatgtagtataattaagtagtatattgtgttagtgtagttatgatataccaaactttaaatccgctcaatgcatattcttcatatcaaatagtgtaatttcgaccaaattggtatcttgaaaatcattaaaaaaaatgctaaaatattttttttaactaactaaatgtttctcttcataaacttataacataaatttaaaaatgtattaaattagtaattgaatttgtatttactaaattatttttataattattaaattaacttatggtaactaatataacgatattgaatagttggatatttagaaaaagaagatgaggggaaaataattcttatactattttctcataacattgtttaagtaatattaaggaagactatctttatagtacatatgttattgtttttgaaacattggactgataaaatcattattttttttctttagccatatatatttgattaattgatctatttttagaaggagatccaattatctgaaaatactattgtaacatgtttcttctttattattgttgaatcattgacattctttttgttttcaaactaactttgcactaattcttgtaacaatctctatgtttgatcaattataacttcggcgatccttgaaaaaaatatctaaattatttagctaggagcctaggactatatattatttttgcctactatagtactacttggatggttttgaaattatggtatctttttatgtcgcaaataaaaactagaggtacacggacttaaaggagacaagagtatcatagccttagatttattttccaccgtgtttctaaatagtgggattctttcgagtttcgatcaaatgatttttcgcttagatttcgttttgcatcacatatttaagttgttgcttccctctattggttaaagcgaccaaacaactttgttacacagcaaccctaagtcgtgtcatagccatctaattctcacatcttctataccgcataaaagttcgataattattaattagactaatggaaagatgccacctagttaatatacaaattaagttgggatatcgtctcttattcttacatatgtcaacatcaagaatactttgttttaagcatgacatgattacattaataaagcattaccccacacgccgaaatgttattcttatttttatccgtgaattttttctatgatcaaatttgtccgtctaagtggattgaatgcaaatgtgagtgtttaattcccatcatcagttggaagatcagggattctttttgtacaagattggaagatcaggtttttgagttgaatatggtttgatcatcatcattttacgaacattcgaaacttgcatagtcgagtaatttttatctctcaatttctgtttcttaatcaatatccacgtaagttttttttttttttttttttaaacagttgtttttaagtatcaaagacatgggaaccagacagttgaaaatatatttttaagacaaatttacatattttaaatgtcttctaatcttaatattttaaatgttttctaatattatcttgttttaaaaaaagaacacatattttcaaattatatgatattgttgttactattatttctttttttactataaattttgtgacaatatatatatatatatatatatatattaaccatttttcggcggtataaaatagtttaccaccgagtaattgcattcaatcgcacgaccaacaagttatagtattattcactttgccccaaactaaaagtttattttagaaaattcattaacagtaaatttcatttccttcaaaatacatttttgttctgtttttatttatttatttaatatattaacatttatcatgtatgatgattgatgaagatgattttctcaacatttctctccttttttttttgtctctcaacatttctctcctatataaaatttaaactattgaacgaatgttactgctacgaaattataatatttactctaagttgtcatcaggattctattactttaaaagccaaaatttactaatcaaaaactagttgatagattgtaaaattaattaagcacatttattgatttaaaatttattttttactctacaaatcgtgatttccaagagttgtatctatataaaggcaatatgctttcggacccatgcatggtcttgatgtttttttacggttattccattacgggtagggttatgtgataaacgatatgatttcatataaaaagaataaatcagcggtcattgtctccgcatggttcggggaaaaaatactcgtataaataagcctttagatttcgaatttataaagctttgacgtcggctgatacatagaaacaaaaaaaaactttgatgtcaagctctctttcctcttcctgtccatcaatacgcgttacacacgcacaatagaagcaaattattgtttgaatacctaaaagaggatagacgacataattatcaccgcaaacactctaaattttgggatatagctttcattagattacattttgactcacatggtatacggcaaaaaaatattaaattcatggcaacgtataaagttgatatttcaacatgttataatttctctctcttcgaacatgagtgtaacaagacgaaccccaaagcctgcaaaaacacacagaatcttttctttggttttgtggaccggtctacaatctcacgtgcaaaaccaaacatacacgatctctctctctctatatctctactttttctgaactcagttggtttcgattttcttcggaccttctattgttaaatcagctttataacctcacaagcttctcctctattccatagatcaaaccacaactttgtttgacctttttttgagtacttctcttgtcttttcttcttcaagtttacttagttctttgagaacaaatttctgttgattttttttctttcttgtagagggataattacaagtttaatttccctagagtgtctttaccttttgccttgtctccctctcgagacaaaaagagaaagagaaacactttctgtcctctttttttttcctctctttttctctctcgctggaaaccttttcatattcaagtgtaattttaatatttcaagcaattttctagctaattatggccttggaggctgtagtttacccgcaagatccgttctcctacatctcttgcaaagattttccgttttacgacttatactttcaagaagaagaagatcaagatccacaagatactaagaacaacattaagctagggcaaggacaaggacatggttttgcgagtaataattacaacggtagaaccggagattatagtgatgattataattacaacgaagaggatctccaatggccacgagaccttccttatggatctgccgtcgacaccgagagccagcctccaccgtcggatgtggcggcgggaggagggaggaggaaaaggaggaggacgaggagtagcaagaacaaagaagagatcgagaaccagaggatgactcacatcgccgttgaaagaaatcgccggaaacagatgaacgagtacctcgccgttctccggtctctcatgccaccttattatgctcaaagggttagtctctacatacaacagttatatgtatatgtgagtgtgagcgcgtgaaatattcagtcctttagctgtatttcttgacgtgtcaaaaaaaaaaaaaaaaagcaaagcctatgttctaggctttcagctaattaggacatgcataggctatacatagatatgtcatatgcatgtatgtttatatgttttgaaatataaatttgagaatgatgatagatgaatgaaagccgttatatatattgacaaaaaataaaaactaaacgaaagtcgttatttctttttttcataattttattagatcatgtagtctctaaatgaaaattttgttagtggaattgtgggagcataaataaagtcttgaacatcattgcacccaaaaaggactatacatattatagatttataatgagatggtgacataatatattttttaaaaaattaaggtacgaaatatagacatgtttgattgtttttgcaaaaccttttgcaatttctatgtgctagactaacataaggttggtggtggttaaagggagatcaagcatcgatagtaggcggagccattaactacttaaaggagcttgagcatcatttacaatcaatggaacctccggttaagaccgccacagaagacaccggagccggccacgaccagaccaaaacaacctcggctagttcgtcgggaccattctcggatttctttgcatttcctcagtactcgaaccggcctacctctgcggcggcggctgaggggatggcggagatagaggtaacgatggtagagagccatgcgagtctgaaaatacttgcgaaaaagagaccgagacagcttcttaaactggtctcatcgatacagagcctaaggctcactcttctccatctaaacgtcacaactcgagacgactccgtcctctattccatcagcgtcaaggtacatttttttctctctttttcaccattttttgttttttttttcctaaccagattagagtgatcatgttatataataccgttgtttagggttagtgggttgaatttgcaaattcaaattaaattggtatctaataattaatgggtgactaatcattactcccattgttggttttggttcaatgattattcattgattgtttttccaatcacaaatgttttgtgcatttaatgtgtctcttattagtacatgttgtgaattatttgtctgggccaaaaaaggttttccaagaacaaaaataaaaatcgttccttttttctcgttcttttttacttggttagggctggcctcaattattggggggtcaaaatcatcatttcttatttattaaaaaagacaaaattttgagtactatcataatattgattcttgtaagaatcagggaccaaaaagatgacatatgcctacacatgtgtgaatgtgtgtatatatatatgtgtactgggcatgtttggtggtcacaacactgtggatgcactgtgcacggcagaacgaaatgacgccacttgtttcaggacacattcataagcttcttcctcgaaatataaacattttctttaatcatctttttaccttttcaatgactatatatcaatctttttcatgtaacttaaaagaaaatattaaaataatgggtttattcaggttgaagaagggagccaattgaatacagtagaagatattgcagcagctgtgaatcaaatcctaaggaggatcgaagaagagtcatcctttagctagtattgttgaattttagttatggcacatttagaggagctctaatttttcatgtgtgatcttttgctctctctttttcatatattaaataatataaatttcctttttctttttgttaacgttaattctaatgcattatatattggagtttttgtgtgattgaccttttagacctgatcacaaaagaggaactagcttttaagagctctatacgagaatagtaattataagcttgagcaattgaattttcccacacataaaaaaaaggcttgaacaatttgactggttatgagatagctgaaaaaaattcaaccacacttatataaatataccggtatgagtcatgtgaaggcgtccctaaaagactcggtatatcgtgaataaccggctttgcacggttcgtttaagaaggaattagttagaatagtatattttgtgaagtaatgtctaaatatgcgctaattaagaaaaaagtttgatgagactctcatggtctgaatcagatgttttgaacacccatgacatctaagacacccgcaaagggccacatatacgatcgtaaataataatctagtctggggtcggagaacacttaagttctaatcggagagacttttcagactcaatccaccactagtttttgggtaagcaaacatagtttaaaactatatttgcacattcgcaaaagggagatccctttccaaagaaacacattgaaaattctctttagcttattcataattattattctgagaatatattaaaagaatgaatgtgatatgtatatgctttctcatgaaaaaatgacttcaacctttctcatgattgtttactgaacgaatgggttgaattcgctttaacgataattctactttgacattttctgcctcacttgagttttcaaactgatattgttcgagaaaatgtatttacgaaacaaacaaagggagttttatataaatatataccaacggagccatgcgagtactaaatgtcaaattttggggtatattacatatttggaaaagcttggtagatgaattattgacctcttttctcttatatccaaaaacaattattgtcagcaaagttgtctcaaattatcgttttgcatcaacatatgaaaacaccacttacagtccaaattcacaccatatttacatatgggattatataatccgagaaagatacgaacaaattaagagacagaagaagttaagaaaatgattgaataaaggtagagcttttttttcttgaaaacttggaggcgtactgaatcagcagtacatgggattcatgcaagaagacgatgatgattgtcttatcatgaagacatatcaaagatctttcgaatctctgtttttttttcacttttagggttaaagccagaaaaagtaaaaagtaaagcctatcgatgtgattacaccaaaatcaaaattttattccctctatttttatcaataacaaggacctctattatatagctaactgttagattttagcatctttttcatgattgagacttagaatcatcaacttttccttaactttgcttttagtaaatttttggttttagatgtgattgaagtggatatttatatttctccaccgctagtttatatgatcttaatggaataaatgttttcacataaaagtgaaaaacaaatttgaacaccattgctttttcatgtctatatatcactttcgccgccataccttataggaggtttttaaacctcatagataaacgacgccgtttaaagtatccgattgggttaaaatgttaggccatttatggatttgggcttttctgtattaaagttatgggcccacattttcctctgttgctacataatattctcatttaccataactccttttttatttatacataactccttttctttctttaatttttttttttttttgcaagaaatggtttaaaagtatattttgacttttaattaaacggactatatgtgaatctttaagttaaccatgcttgaatgaactatgaactatgaagtcttccgatttttgaattagtcatgctaggtataattgaacacttgtgcattactctttttacattcgaaaaaatgcttttcgtagagacgctttactacagcggaaaaaccgaactcttgtttttgttgaaacatgaaacagaggaggagcttccatttgtcttcaacgtactcgacgaaatgtctgactgacttttcccttcatctccggttgtttcgccgttcaattcaccagaatcacaacttctccgtaattggttgctgccaccaccgttttcctcagagcagcttgcttcatcttctccgttatgtctagtgaattcctcactctgattctcgcatgatttccccggaaaatctacactttctacatgggttttcgtatgcgagagagagtttactgaatctcctccatttggatccatacactccttcaaaaccctaactctctctttcgtctctgtttcagatccatcaccgtctgaatcaaatctataaatctcaattcttatgtctgaatcatcactctctttaaaatcagaatcaactctgttttcaatctctccatgatcttcttcatcaactccatcgttctccaaatgtgaacctgatcctccgggagttacttcaaccggaccagaataccgtggagtggtgacactaatcatcgcaataccagcacgacacagaggacaattggtgtgagaactaagccaagtatcaatacaagagatgtgaaaagcgtggttacatttaggcaataacctaagactctcatcttcttcaaactcgtttaaacaaactggacaatctgttctctcgattaaaccatctcctctcttgtaattacagattgtaatcgagttaatgatcgattgttgtagacctgttgttcttattaaccatattgggtgatccacttgttccctatcttgaaactcttcctccattaccgtgtcgttgtcttcgttatcggattgatatgttccttggttgacacggtttacgctgtctgaaaagaatttcgctacaagaaagaatccggttaaaaggatggctaagaccgcaccggttatggtgatgatggatatggcgtctaaggaagatgaagagtcttgagatggtagataaacggctgagatagatggagatggacatggagatggttgtggtgacgatgaccatggaggtagctgtggtgatatggtgtagtaatcgggttctggatagcaattgtaagggcaaatcgggtcgcagactccgttcgagcagtctaacgttttgtttgtctctgatgctaaggtagggaagagctttcgatgcttcttcctcgccattaaagagaacactcaaaacaccaagtcgttgcttggaatacaagaattttaaatcaagagaaatttcatttgagtttttttggtgttatttttgtttaggttttgatcatgaagaagaagatttgatattatctttgggtttctctttcatattaaacatagagaaagatgaaaatttcttctcatcttagttgttgacttgttctgtgagagaagttgaagcgtcttctaattgtttaattggtgaagagtcgtagtcatgaaagccatattttacctttgagcttttgactctttggctttcgaagatttaagtaaagtttatgtttctgttggccttggccatcgagcttcggtagacttataatataaaatttatattgagactgcaaaagaaaaaaataagactttaactagatttcttagatctgaaaaaaaaatgttttcttaagatcacacattagtggtgacacaaacatgctgtatatagtacatagcatgtaacagacacgaaactagaatatgattaaaaaaatttccctttgaaccgttgagttatatttgttcttacaaacaatattgagattatttttaagtcttacatggctataatagtgttcatatattgagaataaagacttattaataataaggttttatgttgtaaatattgagaaataatatctactcatagtcaattagttttgaccacataagcatgtaaaaactaaaaagtaagaactctaatttcctcaacatttcatcaatagggcaatagataaaacttaaaagagaactatatcacatttcgtcacgtaattttgtttttgtttttgtttttgttgacgcataacattttaaccttttaaacaagtttgttacttttacttcatatgcaatagacgtgataccattttaggaagttctttgtacacaacaaagactctataatggtttgccaagaattgtgtgcagtcaaagttaactatttagttattactggtgtgcaattgtttcttttaattttcaggaagcttctttatcaattgggctgattatgaaaaagatattacatgttttatggacctaaatcaaaatacccatttttgctgtttaaaccggcctattataatagtctacagtagaacctctataagttaatactcgataaattaataacctctataaattaataaattgttccggttccgagttgggacagtgtaaaaagtgatacaaatcgataaattaataagataataatttttttgaaaatcctatgtaaacatatggtctcattaatatcataaattaataattgtattaaaatatcaaatatatatatatatattatacttatatataaaacttcaatgaaatataattttagtattgtttctttttacttcaatttgcataagtttttttgtttaattttaatatttttaatatatcaaaaacttttcttattgttttctagacatgataattatttctatttgtaattggttctaaaaatatattttagatattgaaatgaatcttacattttcataaaaattaaaaaaatgttaccatatttgaaaaatctctctataaattaataaatattaatttatcgataaattaatacctctagaaattaataaaattttgggatcccaacattattaatttatagaggttttactgtattaaaaatattatattattttgagatttctatatatcttgcaaatgccgaagacaaatcaatgaataatggtcaacattaacataatttagttaatacatattgcttttatgtgggctgatgaccagcagaattagttgcaccgtctctatcatatcatgtgcatgctttgttttgcacctttcggtgagataattttttttttttcaaactaattactcaactatcacctttttagtaacttagattctaaatttagtatgactgaagcattaatattgtacaattttaataactctggtttctacatatatgtttcgcagaaaattgattttgaaaggagaaacctccaattggtttgttgtttttaccatactaaatattaattaaaaatgttatagatcgcggtctaggacatgcatggtcacatatccactaacatttgttagtgttattattattttttattttaaattaatctacgtcacatactcgattttagttgtgagctgcaaaagtctcagtgattgctagtaagaaaaagtttgttcatctgcttttggtttggtccattatattgaatcattaagcgaattttgatgatacattgtgactactttgggttacatcatcatttatcttttacaaagggtttttgagtgtgactttatgatgtgtcaccaaacctcttatgacccattcttacggtgtagcaacatttcatttgttgagtatgtctaaagttagagcagaagaggaacaagtccttatctccaaatatgaaaaaaagttttgaaaacttaaatgatgagagagctttagttggagggtaagtggacctaactctactaactccaacatacccttttgtttccaatctctatatatctgctcacaactcacaaggaattcccttagttacacaattttaaaataaatataccgttacacaaaatacacaaaaatggcaaacttgtgtacacttgttggttttcttgtcatcatcttcttcaatgtgtttgcacctgcctcttctgccagtcaccccgtcgaatggtcgctcgggaaagactatagctcgttggctaccggaaagtccttcgcggtcggcgataccatcggtatgtacatatacgttgtctgtcctatacgtagtctgaaattgtttcaaccactaatacatgcttttgattttacatgtaaatttttttacattttttttaaaaaaatgattttttgataatattgtgttgtaaagtacgtataatctgtttgtgtttgccattaacaaaatgcttttatactttgcttgcaaacgaacaatttcgaagtcatagttgtaatatagatctatatgaatgtttacattatgttgcatatagtgttcaactacggtgcgggtcacacggtggacgaagtgagcgaaagtgactacaagagttgcacattggggaacgcaatttcttcggacagtagtggaaccacaagtatagctctcaagacacctggtcctcactacttcatctgcggtatccccggccactgcactggcgggatgaagctctctgtcattgttccagcagcttcatcaggcggcagtactggagacggtaccactgacaaaaatacacccgtacaagacggaaaaactacaccctcagaaggtaaaaaggctagtccttctgcttcggccacggccgtgttgaagccgttggatgctttggttgtgacttgtgtagttgcattgatgtacactttggctctcccttaattagttggtttcttttgttttcctgtggtttgactcgtttgaaggaccaggctagaggcagtgctgttatatgcttcttataattaattatctctcatgatttttcctatgttttgtctcgtatttatcaattttttttgttcgctttcttaaaaaaaaaaaaaaaaagtaaattaaaatacgaagcaccatccataatgattaacattttttaatttgatgatgatgcaaaagtcaattttacccttttagaattttgtgtatgattgcaaaagttctaacattgttcacattttcgtctgaattttgtgtatgatttacaacataagataatgaatttgatctttcttacaaaatataatcactgtagaaagttggagacagaatattttttatcaataatttaggattgttaaattatgaatataaaagaaaattctacatgggtttgaatgttgatcatgaaagacttgaaagtctagagactagcgaaagcagagacaagtgtaatgagcaactgccagatgggcattgacctcggaggaaatttgagtataaaggcccaataacaccggcccaccgacttacctaattaggtggacccgacttgagatcttactacatctaagccgtccatttataaaatacaacacagtaaccactccagatctcataactaaaaccaacaaaaagtttggtataaatttaataatgtttgcatctaccctaccaacttttttcattcacacataaacaaaatgtctacttatctactgatgctgaaaaatggttttatatcaaaattagcttattagtcacgacgactaatcataaacgaacaagtgttaattaaaattcgataataaacattttgaaaacaaataaatataaaattgtgggcctatcttcttttaaaaatgaaaaacaaagaagtgaaggatcccggaaacatcatggaaatttaaaaccagctttgcattaattacacgacacacttataaatacaaacatgagatgttgaaaaggaaaagacaaatacaattcaaaaccaaagctcacgacagtctcttatttatcaatggcgaattttctcatcaacagaagaacaagaagaacaatgaaatcaaagaaagctgaagaagggaagagatcggattcaaattctaattcagacaataacttctcatgcaagaagcacacgaaacatagacagtctcctggaatctgttctctctgtctcaccgagaggctctctaagctatctctggagtactacgattacactaagaaggcagttgaaacggcgacgtattgcggctcaacatcaacatcttcttcctcgtcggtctcgtcttgttactcttcttcttctgtctcttcttgttcgtctcctttgcaatatcggtatagagaaaagaagaaggatgggaagaaacaaagcttcttgttcagattattgctcggatccatcgtagactagttcttttctttccgtagtttttaattcattatactactttttatgaattcattattcttcgatatcttttcattcggaaaatgcagagaatcagcaaaataattgcaagaagattttataccaacaaatttgtattttaatcttgtttgtgacaaaataaaagaagttaaaatccgatatacaatacattacaaggctatgacacatctaactcaaataatttacccaaaaaccattagttgacgtggttaaaataaccgttttccaatcaaatttaaattcacccttggtacgtgttacatcaagtaaaacatatataatttcatgataaaatacttgatatggtccttggtccaaaatttgtgtggacatactttcttggacattaaatttatgtggactaaataccactaaaatgcgtaaaacaaccaccatctttaatgcatttagaaattcagtattacaaatttttatgctaagctagatagatatgtgactaaataaagaattctaaattaattgattataaacagatcaaatgaatggcataacatgaagatatttatagaattaaagatgtacatgtacattttcatataaaaagcttacaatttttctcttaattcttggcttaacaattaatgtatgatagaaaaagaaagagaagagaatgcacaagacataagccgggccatggcatgataagctggcacatgactattagtagttgccagagtgaaatgtaatgtacggttagaggacaaagacgtgttgtgtactttccatattattatatgattcacttcacagctgttcagattttataataggccgtaccactaatgcttgatacatccagtcagataattgcatgtgtgtgtgtgttgcgcgtctttgaacttagaagatactgtatgatcgatcaccgatgaaatgtcccgtgaaacttctttgaacattagtaaactgtttttaatttatctgcaatcattgattgatgaattgattttagcttatgttcaaactgaagaattattattaattccccattaaattatagttcaattacaggcatcaacaagtttaagtgtcccaaaaaaaaaaaaggttttaagggtccaaattaaataatttttttgtaagccaattttgatcctaaatgtagctttctcttgtgacgaatgatgcaaaacgagacagtttcaactttcacggaccaactattttcatggcgcctcgatatttcaggtaacttgtgtaataacgatagtgaatcacaactagtttcaaggaccaacaacgcaagtgaacttatcccgacactcacttcagtattagatcacaccactaaggcactatacaaacattagcccaaagaccaaattttacatatataagaggtctcttcatatcatctatttgtgtttctctttgaaaatcgatacaataatttgttgtaatttttgaataatgtctttttaaaaacaaaaaaacttatatatttaaataacaaaacataaagtatacatgcataaatttagattgctaagtcaatacgtgagtgattacataattactctccttagatgcataagctttccattattattgatagaaaaactcgttttcgaacctttgaggttgcttgagttgaaaatcatttacctattttcctagaattgatttttttttctgtccattttgttctctctatatttaatgacttggttagctaacatttatactcatttttagatgaaatttctcttgattcaaatataatgcagccaaagaaaaatagaattgagaattgtactatctcatggcctttagcctaaaatgaatctttcacatattgatattaatttcatattacataataaaaaattcgtatttcaacaattcaacctcatcttgcagtatgcaggatagtgaatttgaatttgtactacttttcacaaaactatttagactaatcattagggcactcttaataaatatcatttgattcggttatctccggttatgtctgcttggattcggttcaaacggcacgtgtcagtacagtgcccctgcccgaaaaagaggtcaatcattgcccggctgcccgggaaatcaatttcaaatttcaaagttagtaaaaaagatcaacggtcgtctaataacgttaaagtaaccgcaacggaaaaagagaatccgattcttattaccttaaaccacaaatattctctcttcttccccaaatttgaaatctcttcgcgtctctatacttgtttctctctttatccttctcatcatcttcttcattttcctgcgaaatttttgttaatggaggattgttgtgatccacttctcgcaactgatgcttctccgcgacctgaaagcttctctcgctgtgagattttcaatttgatcttagacgattgtttttggttctccttcaattttcttacttttttttttcatcagcagctgaaaaggatatagcatcgcgctcaaggactgtggcaatggcagatctggattcaaattgcgaattgagtaacggtaagtcattcattcattttaagaagagttcttaatttatctcttgctttactgattctagatttgaatttagatgttgatatggaacaatcaagcccagatttgatgaaattggaacaatctagtgatcccgtagcgttagatggtaaccgaacctttccttttttctcttctgtcaaatcaaattcgcctttgtctagagatttatggagtagcattgggtttgatttcaggaaaagttgtattagggttttcattagcatctccagatctagtaaattgtggcgcttcacctgatttacctagaggtagctatgaagattcaccagaattttctaagaaaagaagattttctactgagctttctctagagaatggaattgatggttctactactactacaagacttggccgtaaaagccaagttgtgaaattctcagcaatctgtcagacatttggctatgagttgtctcctgagtcttcttttgagttaccttctccacctggagactttcgggagagtatgactcctgttataagtatcaactctggttctataagcacggatgtgactgtggaggatgtaactttcttgaaggatgagttttttagtggaggtgaaagtattacaactgatgctgttgttggcaatgaagatgagattttgttgtatcaaacagctcgtcttggtaatttcgcttacaagtttcagtcactggatcctggggactacttcatcgatttgcattttgctgaaatcgagttcactaagggtccaccgggagttagagtttttgatatattcattcaaggagcaaaggcaagacatcatcaccgaaattgagcttttattttcttcttattcatcacatgtcatttatgattcgagtggaaaactattgcaggtcatatccggccttgatttgttttcgcaagtaggagcaaatacacctcttgtgatagaggatctaaggatgctcgtaggtagggaaggagagttatctatacgattagaaggagtgacaggagctgcaattctatgtggcatttctattaggaaagagacaacggctacctgtatgttgctttctaacctttttgtgtcttggacaattctacctaactttttcacaactctgatcacagcttttgttttttagatgttgaagaaactggaatgctagcggtgaaaggttcaactgacactgttctgtcccagcaaactcaagtgagagttattccacaatcttagtgtttctagttgaggttggggtggttacaaaagttgcaaatagttaaactgtcatcctctttttaggaaaatcttgtctgcagggcagaagaagaggctgaagggatgagaagtgactgtgagcagcagaggaaagagatggaggatatgaagagaatggttgaggaacttaaactggagaaccaacaaaagactagagaatgcgaagaagcattgaattctctcagtgagattcaaaatgaactaatgcgcaagtcgatgcatgttggttctttgggtatgtacatctctctccttcatatttcgccttccttgttatcgttaaagttgacatatatgtacttgttcataaatagcgtttgctgtcgagggacaagtcaaagagaagagcagatggttctcttcattaagagatttgacaagaaaattgaaggtacacagaagcaaacttaaagtacgatcagcaactgcaagctcttatgcctcattttaacgaacgcggatttgtagatcatgaaagtggagcaaattaagctgttggaggaggcaacaacatacaaacacctagtccaagatatcaacgagttcagttctcacatccagtctagaggtgagtctttgtcttcctatcattttgacatgcaactagcacttcaaagatatagtaatattgtgtttctgtgaattttgatgagttaaatttttttttcaacagtgaagcaggacgcagaattgcatgaaaatctcaaagtcaaatttgtagcaggagaaaaagagaggaaagaactatataacaagatactagaactaaaaggttggtgtctttatccaatataacttgtagatggacccccttgactaaacttggcagcctaacaacttacagtgatcatttcttcgtacaggtaacatcagggtcttttgcaggtgtcgaccactaaactttgaagaaactgaagcaggagtatcaatgggaattgatgttgagtcaaccaaaaatggagaggtcatagtgatgtcaaatggttttcccaaaaaaagcttcaagttcgattctgtttttggtcctaacgcttcccaaggtgatttttggcatcaatgaccatttcctacttgctttctatgaaatctcatctcaccaatcgacatgttgtttcctatacttttacagctgatgtttttgaagatactgctccctttgctacgtcagtcattgatggatacaacgtttgcatcttcgcctatggccagactggtactgggaaaacttttaccatggagggaactcaacatgaccgtggtgtaaactatagaacactggaaaatctgtttcgaataatcaaagcacgagaacaccgctacaattatgagatctcggtcagtgtattggaagtttacaatgagcagataagagatttgttggttccagcttcacagagtgcatctgcacccaaaaggtactacataagttttgtatacctttctccttgatgtgctccatggttctttagtctcattatttgtagtgtttcagtaagaactgtaataagtaacttcttgctgtaggcaaataaaattggtttctgatatcactaacagtagctccatactcctttgcagatttgagataaggcaactgagtgaaggaaaccaccacgtaccaggattggttgaagcacctgtgaaaagcatagaagaggtttgggatgtgttgaaaacaggaagtaatgcaagggctgttgggaaaacgacggctaatgagcacagtagccgatctcactggtctgtttacctgatctgtattagtctcctttttttcagaaaatgaatagctaactgaatgtatattctcttattttctttgcacagcattcactgcgtgatggtaaaaggtgagaatttgttgaatggtgaatgcacaaagagcaaactatggttagttgatttagcaggaagcgaacgggttgctaagacagaagtacaaggagaacggctgaaggagactcaaaacatcaacaaatcattatctgctcttggtgatgtcatattcgctcttgccaacaaaagctctcacattcctttcaggtcaatatgatacatctatttttctctaaagaaggttacagtcaccatttttcatctaactttatgtttggcttgcatactgataagatcaaatacctttgcagaaactcaaaactcacgcacttgcttcaggattctctaggtattgaattttcttcttgaagctgcaaccactttctttgtttacatatgtttcactgacaaattctgtttatctgttataaagcttacgatgaaaatttactggtatatgacaggaggagattcaaaaaccctcatgtttgtacaaatcagtcctaacgagaatgatcaaagtgagacactatgctcactgaattttgctagcagagtgagagggatagagttgggacctgcaaagaagcagctagacaatactgaactcttgaaatacaagcaaatggtaagctacatgtccacaggtgtgtttatcgtatcattcatgtattgttctgagctgtgttaattctttatcaggttgagaaatggaagcaagatatgaaaggaaaagacgaacagattaggaaaatggaggaaacgatgtatggtttagaagcaaagattaaggaacgagacactaagaacaaaaccctccaagacaaggtaaacgatactcaccataaccacgaaaacaacgtggaatataacattttcagattgctgaaatcattacatatcaccttctttgttaggttaaagaacttgaatcacaactactggtggagaggaagcttgctcgtcaacatgtagacaccaagattgctgaacagcagacaaaacagcagactgaagatgaaaacaacacatcaaagaggccgccactgacaaatatactgttgggatcagcttcgaaagaaatggtgaatctaacacgtccatcactcttggagagcacgaccagctatgatctagctcctttacctagtggtgtccccaagtataatgatctctctgagaaggagaacaatccagaaatggctgatcaagtgcatctacctaataaaacaggaagattctctatctgtgcaaaacgtattccatcagctccagctccaagaaggagttctcttgccccaaccacatcaacttcgagagaaatggtatatctaacccgaccaccactctcagagagcacgaccagctatgatctacctcctttacccaatggtggcctcaagtacagtgacctcattgagaaggtgaacaatcaagaaatggctgagcaagtgcaaattcccaagagaataggagcaggaagatcctccatctgcgcaaaacgtattccaccagctccaagaaggaagagttttgcgccaatgccattcattccaatcacatcaacattaacttctcctgatgaaaagagtggcgctaaccaagtgctctgcaccagtcctaagctacatagaagtaatgggaagacgttgaccagcatactgagacgaagcatacaaaagagaatgcaaatgaaaccttccccgaggcagcaaccaatgagaagaggtggcggcattaatgtagggatggagagagttaggctgtctataggaaacagaggaaggttagctcatagagttctgctaaccaatgctcgtaaggcaggtctgaaggagacaccgcagaaacaagagcgatggatctgaaactattaaaaactgatgttttctctgacctttgatgacttaacttctcaatattcattatgattttttaggatgattgatattttatcatccttcggtttcgtgtgtgtttgtggatttggtttgaccctattgtatagatggttttggcttttgtgcactcctgtttcttttgttttcatagaaaagttccaagaacctatttattaaacccccaaacatcagcagcaccatcaattgtatagatggttttggcttttgaatgtttgtcgttattttctctattgaaaattatgtttattacatgaaaaatctatcagcaaaagtcataatctttgtcgtgtaagatctctctcatactctcttctttgtagcattttaagtccgagtttctggatccttaagttcgttacatatcgtcagtcttaacactgttgctaagtcgcatctgtgtcacgatatgagctgcttataaaagaccattccgttcaaagcaaatgaaaatggtcgagagaagaggaaggtcaataaaagacacgtacgtttaactctttatttaggttataggaagtagagggcatgtacaatctagtgatcgaacaaaccttctacgacacatgcacacacacacacacaaaccagaatagcaagagtctagcatttgttttttcacatatacgaccattacaacagtttaggcggcccaggtgggactacatagctcttggtacagaaaatagaacatcccttggcacattgttccgacgctccattcacaatttcacttgcatctagtcaccgaaacaaacattagaatatattctaacaaaataatgataaaaatgagacttaaggagttcgctttaccagagttctggagagtgttcatggcaccacacacagaagtttcacaccctaacttgcagtgctcattggtagcatcagctgagtttttttttaaagtattaaaatcttgatcgatcttttaacaaataacatcaaagacattttcctatttacctgagttttcgagaatggcgtttacccaacctcgagggcatgtatcagagttttggcatccactcacttgcatacaccttcccttggaaaaccttatacggcatacactatagccatttctagcttggttggaagggcagcagatctttgcttctacttgaacttgtgccatgaccagactcattatgagcaaactcaaaatcaaaattcttcctttcatcttttgaatggtttacttgtttgatcacaagggatgttattatacgtataaagaatacactactaagtttgtattgatgaagttgtcttgaaaccagacttgctttaaatactaggaaacattcggactagattttagttagttactcatggcaaaaaaaaattccaagtagttacaaacgtgatttttgtgtttcttcgttttaacggctaaccaacttatctaagtggtcatgggagttttcattttcactttgaatattataaattacgtttattactatactatgtaagaattattataaactgtaaatatgccccttgatattacataaaaaatcaagtgccgtaggccaacgtttaaagttttctttactaggcacgggcctgctcaccattatcatcagcttcacaaccattcacacattcctccagtgaatcatcacccgaatcggtgaacgagagtatcgtaggaagcaccgtgagcgagatggaagattgtggcagcaaaggaaggaagcgaagaagaggaaatgatagagaagagactgaagaaggtggattttgacattcggaaacaaagacaccagcgaggacctttgtcgtcttctcaaataaacaaacctctttcccattcaaatacactagacatgtcaaaactttcaccaagcaacaacgtctgttgagattcccgtggcgtttctcgaagcatatccgaaaatatcagcaaaagctcttggcacgcatagagttcatcaatctctttcggatctgtggcgcgttcagatggaagatcctgatgatatgacctatatggagaagggttcaggttaaggttttgagtggtaaacaattcaaagctttggaatgacgaccaaacacaatatataaattaatcgtttaccatctccagaccggaatagcctcagtaggactactaattctagaacacaaagatctgatgaccttgtaaccaccttctgactcggtacctaggcaggaaaacagagaaagatttagattcacacctacaaaacaaacctgtctaattctttagtttcagcagatatcattctaaccaactgaaaatcaaagcagcaagcttgatttatcaataaaggccaagtaatccgggaaacactagcatacctgtagtctcgaggccattgcgaagaaccatgagagaaagtgcaaatacaacagagggaagaagaaccccgtagtttctacacagcagatgcttttggagatacacgattacttcccctattatgtgctccgaatttgtcacgctgccttggagattccttttcttcaagtattctaacaatgttggcaaagtttctggctttgtttcgctcaagactatctggtccgaatcattagcttcagagtaaagcttcccaagaatcactgaagccaacagccaccgtagaaactttgctaccatagtctcttcagtgtgtgttttagtatcttgatgacactcaccaggcttagatccctttttaaggtcactcttcaaggctgtggaggatccccacaaaagaaaccttctcagcctgtgcacgtcctgaaaagatattgtatgatacaaaaacattttaaactgttcaaaacaaatttggatggacgctcaatagtcaaagaaaggggaagagagattataccatgcatataatctcaactggcggtgtgctcattaatatagtatcaagcctaccctctgcactagcttcgacttgaggagaatcgcagttagcagcagcctcaaagagttgaaatatcccctcgattgtgatggtgaaatgtggctggttcttttttcgtttatgtgatatctttagagtagcagatagtatctgcaaaatcaaatcaaccgaagtaccattttcttgcattgatactaatccatcacccaaaagtgtgtataaacgagatgatatttccattagcccttctagggcagatctttgcgaccactctgtatcgtttctggaggcgagtgcatcagttatgacctgatacaacgatatcacatagcaaattcaattaaggagtacagtattctacacaaaggactcttgatgcaaaccagacaaacaaatatggttgattattgaggaatactgtacacacctccaagacaactacgaagcgcgaatcttcatctccagtgggctttgtagtcaacattgagaaaaatgacgaacaccatgacaacagaccacagttttcaactagatgtcgggccatcttatgcaatttgacggactttctcacaacctgaaaagtgaatgaaagacagatttttgtctgtgttggtctacgagcacaaatgtgaagtaaagataccccattatatattctcacaactggaacttaatattataaataatgaagagacaactgcataaggtgcaagataaacacaaagtggcattaaggaaagaaagtatcacctgcaggattagtcctttagtttcatcatcggcaagaggagatgagaaaaaacccatcactgtctcaaggatggagtttctaatgtaaatttgagcatcctcttctgattccaagcctacaaacactaggcgaagtacccaaagcctctgtgatctaaagttaacagtgctactcccgaaaaaatcatgaaacaaaggtattccctagcgaagagaaaaaaaaaaaaaacagttcaatgcagggaaattgtaaaggtttaaagacaagagtttgtcagttttcagagaataagtaccctcagcttcagtgttgatgacctcttcaaaagtttaattatgggaacataatgttcgtgagaagaatccagcaatatcagagatgcttcagcggaaaaaacagcagacacagttgggattctttgccattgttcctcaactccattttgcacatacgtaagcagaagcctaagcaccgttacatgcatattcttcctacaactctacatcaaaaagttttagttaaacaaagaaattctaacccgtttcctcagaagcagatttgaccaatgagcctttgcaaagacagacccggcatagagatacatgaaaacataaaataactatcacctcaaggacatccacaaatatcccgagagtttcgtagcccagttttctgatcccaagatctgctgaagacatactcgcaaatgccactgcaagcaagcctaaactggcgaactccacaggttcaatgtataccatggacaataattgtactgagactcgcaggatgaaaacaggatcatatcgttcaatagcaggtgagcatttctatacaaggaggagggattagtttgaaaatgcaagtacacggaacttttaactgaaaattaaaatgaaagacaagggtacctcgcttattggatcatcatatatgtaagtgttatctgatgcctctgcagttcgcccataaggaaaatacaaaacagtttgagcacatcttttgggatcaagacaaagattctctttgaaaagactctgcctgagatcttccactatatcagaataactaccgtcggaaggcagtccctctcttattttcaaggctgcattaccccacaaataatcttcagaatcattcagcgtgtgttcgccaacaatcaacttgatatcatgcatcagcttgtagctctgcaagtcgatttcgctcggagttgcaccataagaacacaaaagacgaaagtgcaaatctttcaaaaagattcctgaatcttttccacatttgcagagcagcactccgagaattttgagaatttctatctgactcaaataatactcaggtgcttcgagactacaattttcaactctgacggaatttagatttgggatgataagaagttttagaatgctggagacaggcctgatgacttcaccagtatgtgaggatgaaatggaaagagaactgatactctctgtaaactgagagtgcgatactaaatcttggaaatgatacgagtactttcctctagacaagaaggagaaaatttccctcagtatcttcaatgtcttcgagtccttaaatctataccgaagaattaagttcatcagcctctccaggaaaggaagggaatccaagtgagcaagctcctcacacatgccttccaaaaactttagaatacttctcaaaatgaagtattcaaggcttttgcacaggaaccaatatttgtcttgctcctccctttcggaattccctttataataaccatcagatctctcgacaacgcattgccaagtattaacgaaagcatttagtaacgggtttaataaactctctctgttggatcccatttctggagaactttccttcacacaaccacctgcttgacgttttaaatgatgcatacagctatcctcgggaaacaaacagatccttgaaagctctacttttgcaactaaacggttagtaatattaaacatttggtctactgacttaacgtccacttcttttatctcgtaatccaacatctctttgccagcactagtgtgaggaaacatggaatagaataccttcaagagatcgtctgttttagttggactttcagtcaaggcaaagtgatactgaaacatacgtactgccttcccaagaagactcgcattaaacatagtttcgatatcctcactcgtcgacagaagaatctcttcatacttctcttcaaagatgcagccagaacaaaacttgggccactgaagaaaaccttttattagtatatttgaataaagtgaagttatatccaaacatttactacatgacttctcgagttttgcaaaaactgatgccaggaacaatagcacaggaggcagaagcatgacaaactgatcatctgtaataagcgcagagtcaccctgtagtttacttagcatactaaagaaaatgtgtccaaagactgacagatgcaagggactggactccacaagatagaacaatatcttggccctgctcatgcttgcctggttaatgcaatggataataaggtctttagaagttctcccaacaatctgtgacattatcaccgtcaactggtgaacactacaatgctgactatttccccccctgaaaatgccactaacgactttaagcaaacaagtatctgccgaagccaaaccaaaagaggtagaaaacctgcatgccaggctatacacttgctcaataattctactgtcataattcttgtcttctaattcccacagaaaatcatagacccttctcttagcagcaggctggcgtgaatacaatataagcatttcaaaagctccgccagcaatatccaacccgaaactgagaatcgggctcgccaattcttcctcgtaagttttactcagcatggaatgtgcaagatataaaagtttaaaaggtgatataaatttcaacaaagcctgaattaattgtggatgttggagaagcggagcgtaactttgagaaccaacacaaagctcaaacttgtctctgaataccaagagaagcctttcaaccaagaccttaaaagccataattgacttatctgccctgaggtcccctttccgctcaatatgactctcctcaaacaaaaagttctcacaagtagaagccaagagatcaaggatgtgttgatctatttcactaatacctagcctgcccgctgtcagcaacgtttctgaaaaaacctcaacattctgcactcgaggtaatgtgtcacaatcagcgggactctccaacagtgccatcacaactgggtgggaaagaactgtctggggcacttgatgcttcaacttatctgcagaaggtccagaaacaaggtcaagctttgatatttgagagaacaagtgcctcattagacgtaagcagatctcagattgttgacagagtaccgggtgtggttgaaccttgtacaatgatcgtatttggaagagccagaatagtattaatcggatatctgattcaatactatcacttttaggttgcgaaactttaagcagtagtagctctgttaatcttggaaactctggtaagcaagatatatccatgctcataatttcattaagtaatactggaaaaggagtctgctctaagaatacagagaatgcaagagattcaatatcaggaatgtccatcttactcttgattttttcagttgtggatgagtggtcagcaaaatcaatctcactatctactgttccttcacggagattccttgacacagtaagttccaaccctcgcataaataagtcaggtgatagctttgaaaggtttccgaggaagtttttctctaaaaagatgatggacagtaaaaatgagaatgatgttccgtagagatcccaagaaactgccatcacagaagcaaaattcttcaaaattgattcaggcgttgcacatatcaatgcagaagaaaacgcattaacgactcctccaacttcatccggagtaatacttctcatcagtccttttatctcatcaagagtggcagcaaaagaagtgtcagcaagtcgacatgttgtccttccggaatgcaagatgaaaggttctgacaaagattgtgtaaaaagcagcaacactctcaatggcaaccattcacataaagaatccttagatccatcaaccacctcagacaaaactgactggaccaaacatgagagtggtctgggatctacctacaatattcaattaacagaaaaggtattggtatcgtaagcggtgtaaaatagaacataaacatatcgcatggtgagttatacatatatatatttatttataaaatatgcagacgtatgtacctgagtttgcaaaatatatttcaatgagctgtagacgtacagagatactgctgacttgtttggtaaagaatatgcttgagattcagaatttagtagcttcacacacttctgcagaatacaaacaattagggggctaaaaccaattgatacacctgcaacaaacacagaaaagatacgccagtcaataaccttgtatgagattaagttgatttaaaacattgccatagttgcagagacattagataatcatctttgtgcagataatgaatctaaaaacagaaatggaaaataatgtatacctgaatcaacatatataggagcaagatattatatattcatctataccgaatcattgattttgagggcacaaaatacatataccttttaaatgggacaaggagcttctgacaattgcacattgctggaataaagtatttccaacagccgtaactgcatcacataaaaaggagatgacaaatgatgatatgctctgagccttaagaggtagtttaatctttccaacaattggtagaaacaggaaccatgcctcaatttcacttggatttatgtcaaatgcaccggtgctgctcatagatacccgtgctaaattatatgatagaaccttcacctcgttgtgtgatgaaaaaagtaacaaatttataaatacatgcaaatgcttgaacataagtggtggaatttttctaggaactctctcaaattgagactttggcctccaaaagatgtactcattcagtaaagacaacagagctctctgcaattcagctggcatacttgaagaactgctcagaaatttcatgaagacatcaaacaaccctttaggcacattaggcacagaacgctgcaaggatgaaaaacatctagtcgtcaagtacagatgaggaggaacgtccaagcctactactaatgccaagacatattagcaataataaaataaagtaaatcaaattgacaaaagaaactgggttagtaaagcaaaaccatttcctcgaaaatcaaaactaagattctgacacggagggtttaaacaataagacaccctgttattagttattactaaacacaacaaaatgtaatctattaacaacaacacaacaaaattaataatatgacagatcaacgtaccacataaatcccgagggtatccaggagctttatctgaaagaacatctctgcttcatcgaccgaagcgataggcttagaacaaaactctgaaccccaaatttctgaaacgatcccaagatattcgttttcagcatcttcctgatctgtcaactgagcatccccagtatcctcttccaaaaagatatttgtatcagaacctagcccaccaatgaccatatcactagccaattcttccaaaacagccatctcagatgtctttaaacgcttttttctatctactaatccaatatccaactctgcttttctcttcaaagatagcttttgagacacctttagtacggtccataacacctggaaatctgggaaaaaacttatcacctcacctatgatatcccgctcaagagaagcctgaatttggtcaacagagcaaagtttccaagcagtaacaaaagaatcccacagcctcagcgtctcccagagaaatctcaaagtcccatgtttcacaaggaaaacagaatggtgcatccctctagcgatcaacgactggctaaatggtcgggggcatatgcatttcatgatagtatggacctctgaaccaccagaaggaggtttatctgggttgagaaagtcaaaagaagatgacattcttacagacgataccaaatctgctgccagggaaatagatgaaaacctgcaaagacttgagttactatccagaaaaaaaagaatgaaaaataacactcttgtactctgacgaggactaaccagtaaggtgatgtaaaatcttccacattgtatggaaattcatcaaagaaagcagaagctaaagacggtctacccctaataatggctaaaagcaaatccctgggataaccagtttctgtagctttcaagctcttcatgagggcaagtagtcgttttatattgccttttctgtatgcatctggcatcaatccattagaggggtctgtacaaactttaacaagaacatcataggccaactcattcacaatcccaccatcctctctttctgaaatgatgactagctgctctagtgttttgggtccaaagagagcactcataagccgaggactaagcgatgattcttgaacaaggatcttgtctttcaaggtagacaagacagaagccagagtgtcgtcatcgtcttcctcaaggccttgtaggagttgagaatagagttgcttcttctctaagatagactttaataaggaaggcttcccaacttgaaggaatgatattgcaaattcaacaaaagcccgcctcggtgcctgttttgggaaaccatgaaaatcaaatgtcctagccatttctgatgccatgcctggaccacgtctaacgatagaagccaagagtgaaagtgcggcattctgtaaacgttttgtgttggataatgctttgtaaatgtctaacagttttttttcgataagtaacctacaaaactggtcaagagctcttccaatatcagaagattttccctctggatgactcaaaatggtctggataagcgagaatatataggaaagtccttgttttccatgatgaagattccatgcctcgagaagctcagtaaagttgggtgagctctggaaataaagacgcaacaaatcgctgccagtttctccctttaataacttaacaaaatcttttgcagtatcagagcaaagcttaaactcatgtaagcaaatattatgcaacaattgcctgagtttagcttcaagggatggtctgaaagccatcacagggaccttaagataactattcagagcatcatcagcatacttgtgctcctggaaaaactcattacctgcaacagaattcagaaacacagcagacaaattattcaatccagcccacactgtcacgttgaggattaaaactacccacacaaacaagagcaaatatactaaaggaataatcaagctcagtcatcagctagaaaagataataattgacccagagattccaccaaataacggtttttcttctcggtaggaaaaaacaaacagaaatcttctaaacatcttaattcgtaccttgatcttccaagtctgatgttgattccaccattaaaaggagcttcctctaggacaagaagtcgggtacttgtgtcgtgtcagagctgaacgtagtaggtcatatatgtatgccattcaatttattttgcctccaaccggtttgacattaaccgagtgctctcacaatgggccgagccgaaaccttttgtgattgggccatgtgaactgtgaagtccaaatcacaatacactttaattattcctttcatttttgctattctttggacaaagtattcgtctcattgaaacaaaacaagaaaatgtacttaaaaaccgcgtaagtcaaattcatgatcaaaatccaaagcaaaagattgagaatagaagagagtaatccaatacctgaagtgaacagctacaaaaaattatacgttcatattaaattatctggttcacattctaagccgtaaactgcatactgaaacagatgtacattgtacacacaaaagaaaacagcagaaaccacaatttacaagataaggctaaaacaaacaaacaaaaacgcttcttgcaacttttcgatttcatcttagtgaactcactcggcttaggttctcagcgatagcatctctgatcctcttcgactctctatatgcttctccttcgaaactccgagtctcctcctccttatcatcatcttttctcatctcaccattatcaccagcttcacaaccattcacacattcctccactgaatcatcatcatcaccagaattcacaagaaaattatgcaacaagcaacccgtagttatgacaaacggcataaactcgattgtctctggtttccatttcttatcaagaatccgccaccgagctcgaaccttagcaaacgcaatctcaacactatgcaatccagtgtgtactacattgttgaattcttctctaaaactctcctcgtctgaagtcaaatcataaggtgtaacaagccacggcaataaaggaagacaagaatctcccaatatgtaacgaggaaccaatactccatttccaagtttagtcggagctccactgagaacttcctctgcaattgaaaaaagcttcgtctgtctaaaaatagcttctggtttcatagtacttggccaaccagctgagatatcaacgaatctgccattggaatcaaccaatgcttgaaccaagatcgaacctttagcaccaagaagctttcctttaacctcaaacctcccgaatccgacaacaccgtagcaattcggaagcagattaggtgaaaaatcgggtttaggatcatcaagttgttgacttaatttctcattgatgagtttgcagacagtgaagaaagagcgtgaagcttgggaagtggaatcaaacccgaatctgtgaacgagacactcgtaagaagcaccgtgagcgagacggaagattgtggcagcgaaggaaggaagcgaagaatgggagaggatagagtagagactgaagaaggtggattttgacattcggaaataaagacaccagcgaggatcatcttcgtcttctgtggcggaggttaagaagcggttgaaccacgtggtggtggtgatggcggaggaggaggaagaaggggaaggtgagattgggagagatgagattagggattcaaggcggagggtctgtgatggtgagaggaagagatcgttggcttggagaaaagagtttgttacggcggcagcggaagagagacggcgcagtaatgggtcttttagaccaagtttgtcggatacatttgttgggtttctgtcggattttcgttttccggctaccatagctttctccgattagtgagactgagatcaattagtttggaaaggcagcagttttagacaaaagatggactgaccaatttcgttaatagtgcatttgggttgttcggtttggttcgatccaaatcggaattttagaattttgggttatttcaaaggatgttaaaatgggctgaagatttagggccgggccaagtccgttaaaacactaattaaagcaaaggagtggattttgggctaagaaacggttttgcttaaaaggtttcgggctaaagtataattaaagatggacggaccaatttagttaagagtgcactctctttctgaccaatttagttaagtgggcttttgggattcgatccaaatcggaaatttttatgtttagtggtatgtccccaatgcagagagagagcttcttttatgtttgcttgctactagtttcttcttcattatgcattttcagttgatgatttttcaaaatcaaaagatttatgcagtcaagaaacttttgtccaaggtatgccactatatgttgattcttcaaacaagtttttacactataaaactttgctgttgattcttcaaactttgcttgactgaactaatagtatgttatctttcacggcgatacggaagaggcgttgggctcaacagacaacagacatggtcagggatcatcaaaagctttgtttcatgaatatcaaggcatcaatgaaatggtatgattgtatgaattttttcttctgtgtcagtatagattagttacctcaagaatctctatttcttttatctgttttacaaaaaatcttttctctataatgatttttttttccttaattcgttacaacaatgactatccatcctaggcttgtatagattgaccatgaatgcctaaaagctggatagttcgttgtgtaactcaccagaatgagacagctaaatcccatattcttcttaatcttgcaggtttagctgatactttggctatctgatcctccattagccgctccacgtcaggactcatatcgtggaccattttaaccgactcggagagacggttgagcaaattcaccagtgcaatcacctcattccgttgcagttgcagctgaaaaacatgaaaataatctcaggtcagtgacacctccatacaaaactacgcagatagatgtttgagaaactcactgtttggtcaccaatgtcttgatttccaacagagaagagaattttcaatgctgtcccaagaccctgaacctgaagtttcccccaaagtcggcatttttcacaacctacgcaatccattagtgcactgtaacacatacattactaagatgtattactactaccgctctctctacatttgccaaaagaacatattcaaattttcgagaaaaaaatgaggtgaaccttatatttctgaattgtttctgaatctgctgtttcagttctggtccactttgaccttgccacagtttagcttcatcaaacggaacaggacaagctgtttggagtttcggactatacaacaactgtttgatcaaggattgtgttttcagatcttcagcatggtttcctgtgtcatactctgcctgctccaagtatgctgttgcctgaataaaacattgtaagaagtcagtcctaaagactaatagattgattattcagagacacatgtcagtcctaaagactaatagactaagaagttgctcactttagtaacagcacgtagcacaaagagatacgtgaagtacatatttctgacacgatctggatgtctaagaatacgatcgtacatcagctcaatgttctgtccccactgtatttcaaaagaaattacatgtcaaccaagaccataatacattcatgtagagagacttgtcaatcttttgctcagaaacacaaacctggtttctagactcatcaagaagataatcagcagctatgtgcatcgagattgaagaatgaagaccggatatcaatttgtacaaaacttttttctctggacaagtctccccagatgaatctacaaaaaccacttacatttcaacatacaacataatacaagtctttgttcacaatatggtactgaaggaaaaacttacattttggacagttctctgaatatatggagtcccaaatccttctagctgaaggtccagtataaccagtataccgttcggggtttaactgaagattaacataactcatctcacctgtacataagtgtcaattcaaatcatcaaattctctttctataagcattcgctatagcatatatccaaagaagaactccctagagcattgttttggtaactacataccactatctgtgtcatcgtcatgcgtccatggattcttggtttcgacccatcctctgaatgctctgttatctatagtacggtcaacagctccctgaggttttccctcttgacacttgagatcatcagaaggaagacctgggacaaatggctttttaaatggttctggaaactcattctctggacattcacagacactgcaatcacgcaaacgacacattccatcgtctggccagaatgggcagtcacaccatagtttaacctacccaacatttaaaaaaaaaacagccagccaaaagtcactaactacactacagaacacaacttcatagtttttcgacataatcggattctaaagcatctcactgaccttatagtaccggaaaaatggagttgtgacgagatcttgaagcaaaggattcaaaacctcagtgttgagattgtcaactgtttcataatcacagcaacagtcctcaatcatacctttgtatttacctgttttctgtataatatcccaaaggaaaatcagaaagacgaaaaaatcaaatcctgatcaatacaattaagtccactgaaagagtgaatcttacaacaacattgataatcacacatcctgcaataaatcagtggcacatttcagggacaacgattcaaagctttcgctcaacaatgtcatcaaaagattcaatttttattaccctgaatccattggctaaacaatgtgatcaaaaagattcaatatttattatcatgaatccataagataacaaatatccacaatttttctcaatacccaacaaacttaacatcacgaaaatgtacttgagaatcttaaagtcaaattctttcatctgtgatcaaagcaaaaagattgagaatttaagagagtagaatcaaaaacctgaagtgaacagctacaagaatttcgatcgctgaagaagaaaccgacattggaattcgtcctagagctcacagcaactgccaaaaacacgacaaccaaagtcgctaaaggccatcgccatgtttttctcttcttttcgctctcttcttctttgattgcgccttttcccattatgacaaattacaaaaatggaaattgaaatgggacaaataaatccttttacaaataaatataaaaacacgttttttgagtcttccggaatttctcaaaaccccattgttgtgtttgttgtgtctgaagttcgtcttaagcaagcaatgaatgtcatgtaaatgcgttactttcaatgctgtatttttgacatttcagcgcgacgtgggttttgtataacacgcgcgtgttggagcagtttgttatggtctcgtgacgtgcattaaccaataggatccatttgttctcgtagtaattaacacgttgccttttcaacgcttcccagtcaacgaccattcgtttgactaaacgcctcttcggtccacgctgtcgttttattgaaggaattatattttattttaattgggcctgcaggctaaactataagtccgtctgatatgggtcgggttgggcttatgagttatgggtctggtaggggtcaattagcttaatttcgatatgtgccctactctcgacctaacgttttgaacacgtaagagagagtttctaatattgagttgtctaattaactcgataggcttatacaaagtgtttccgcattttaccttcttaataactcatcattcactaactaagaaaagttttactcagaccatatcttccgcttcttgattattgtcaatttgttgtcactcaatttatctcttgcaaaatttagttgaaatcatttggtttcatctttggctcttgaatagttgcatgtgtgtatttagtaagttcttttcaattaagaaggaagaataaaacaaattgtggccagaaacaattatgttgagttttatctcatacgttggctcattcatccccatctctctgcttttgaatcattctactcctcccattttttgatcgtcctttttcctgcttctgaacatggatcattgtgcatgttcggatgttcctcgatcgtgctgaaactcaaagtctgaatcgattaccatagactctcaacccatctttgatatataaaaaagagccttaacccatctcttctactctccctctctagaaacaaacacatcacgtgatgatctgtttccccccatacttacgggatgatcagaatgtggcatgaggaaaaagccaagaaataagttgataaatttaaggtttaatttaacaaaaatgagagattaatcttttcattttagggtcgcacgcggtgttttgtgcaaccgcagaaacttcctataaataccgatacaatgtgcatgctttctacaactcaactcactcaaaccaaaaaaagaaacatcaaaccctaaaacacacataacaatcacaaatgaagaatccttcagtgatctcttttctcatcattctcctgtttgctgcaactatttgcacccacggaaatgaaccggtgaaggatacagccggaaatccacttaacacccgcgaacaatacttcatccagccggttaagaccgagagtaaaaacggaggtggtcttgtcccagccgccattacagtacttcccttttgtccacttggcatcacccaaacacttcttccctaccaacccggcctaccggttagcttcgtattagcacttggcgtaggatcaaccgttatgacatcttcggctgtaaacatcgagttcaagtccaacatctggccgttttgcaaggagttttccaagttttgggaagttgatgattcctcatcagctcccaaggagccttcaattctcatcggtggtaaaatgggggaccgaaatagctcgtttaagattgagaaagctggagaaggagctagagcaaacgtttataagttgaccaccttttacggaaccgttggagccatcccaggggtttggttaagcgcaccacaactaattatcaccaaggatacggctaagaccttactcgtcaaattcaaaaaggttgatgatgctactacggctactagcaacttatacttcccgggttgataatttaggtctaaggatgttcccgttctactaatcaactggtaaaaattattgtaatattaagcctgagactcgtccatggcctaaaataatgagttattttcaaatttcaattaataagaaagaaaaatgtggccagatccagatacatagatgttgagaatcattcataggcattgctgttgaatctgtttaaggcatgaaatagttttcttcttcattctactttgtatccgaaaattttctctcctcttgtaaagatcttgagcttgagaaaacattgatcattcatagtataacttgctggacagaatctagctccggacgtggatctcgtgacatcgactaatcaaaccggataaataaacgtgtatgtctcttgcttaattgagagattaagatatttgaggagtatctcaaggttttatcaacaaagaaacgtaacactattcttttgatcacgatagggtttctttttttggcgttactctatatagcttattttcccaaaaacactcaaaacgacgacgtttagcaagacatatattatccaataagttttaaaagtctaaatcaaaagctttcgtttcacaaaaacctctctctttttttctctctctctctctgtctctgaatcttccattgatgtttaggtatgtctcagtttctcagattctcatgctttgtcttctttcgcgcgtcatacgactctttcttttcactcaatgtctctttggtaactatgcacaccaaatgttcgattaaatgccgcttacagaccccacttgagttattctgttagcatcacagatttttttgttttcttagacctcttaagaacggagaaatttcatggaagccaaagttggtttgatcatacgatacattccagatttctaatcaaatccttttataaaaatctgcttttgatcatgttaaagccaaagggttttacatagctagagagctacatgtatatagaaatcgtttgaatgtcacgagctgcataaattcctgttctttacatcatcaaagcttctattaccatcaaaattataatttacatggaaatgatggttaacatatgcaattgacaagaaaaatatgtgtatatttacttatgcagatatttgaatctggtcacaatgatgaatgtagggaaggaaggcacacacacagttacgtctcttcttcttcttcaggttcttctctgttattttggtttttctccgcttctatattctttagccagtctacaacttgttgaatgtttggtcttttcattggattttggttcacacacatgcaggctatgtcaagcacacgaagcatcgcttcttcatttccactttctctcagcaatgtatcaaacacttcctctggtttcccatctcttttcatagtatgcacccatgcgaccaattctcttgacatctttggcctgaaaacctccattggtcttttccctgtgagaagctcgagcatgactacaccaaaactgtacacgtcacctctcaaagtggctacccaagcttgtccatactctgggggaatgtaacccaatgtgcccactagctcagttgttacatgggtgcgatatggaaggatcaatcttgacaacccgaaatctgctacatatgccttgaaatttccatccaaaaggatgttgctggacttgatgtctcggtgtactatgtgtggttcacatatctggtgcatgtatgctagtccactacttgctcctctcataatgttgagtctttttggccaatccagctgagctggaccctcaggattttcgtgcagccaataatccagactaccattctccatgaacgagtaaattagtatccgggcactatcatggacgcaataaccttgtagagcgaccaggttctcatgtttcgccctggacagaacttctacctctgccttgaattccttttccatcataccatagtctcctgtgagtttcttaaccgccagtttcgttccattatccaaggtagccttatagacaaggccaaacccgccgcagccaattatattagcttgactgaagttgtcggtagctttcaagagctcaaatatggtcaggtcttttacttcatatctactgtttccaaacaacagtacaagacttatgtctttatccgaccctggagggacttcagaatacgagccattggaatttatctccagttcagcattctcagagtctcctggatttactctccttttagaaagcaccaacagagctagcagcaccaaaatcaaactgacgccaaaaaaaagcccaaggacaagccccaaaacaagcgttctgttgacctttcctttacccatctttgtagtagagtgctgagttggatcgcaggaggttagcagtacaccaccgcacagcaaggggtttccttcaaaatttgcttttgggaaggtatcaaactgggtccctgtgggtatcggcccactgagagtgttgtttgcaacattgaaatatgacaggaaatggagtccagtgagtgaccatggaattctaccggagagattgttgttggacaggtccagcctctctaagttagtgaggtttgacaattcatctgggatgctgccagaaaaattattacctagaagctccaggatatggagaacctttagctgcccaacctcgactggtatagtcccagtcaagttgttcctcttgatgtatatcgtaggtgggaggctggaaagctgattgtattgctgattagtggtgacattattgggattgacaaaaaccggcagctccagatagttccgctctgttgcatcgtatgccttttgcgacatcagagctctcagctgaaacagttcctttggaagctctcctgttagaaagttatcggaaagatccaagtagaaaaggtctggaagagttcctagccaaccaggaattgtccccacgaatcggttcatggacaggtccataacttctaccctctggagcttgatcagccaagctggtatttcacctgtcaatctgcacgcaccgataccaaaaatttggaggcttggaaatccatctgaccgaagaaagtctttgttgcttggtaccgtttcgtcgtaaaaattctttgccataatgagagtagaaagcttcttgcagccttgtagaatgctgagagcccctgtaaggttcgtcattttattgtctgaaaaagtaaagaacgacagggattccaattccagtacttgaggagatatctgtcccgttaacttgttgcctgcaaacctcattgctgtcatcattttgcatgagtaaaccgtggagggaaattcgccggtgaagctattgtttccgaggtccagaatgctgaggctctgaaaccgggaaaagtctatcgccgataaagttcctcccagctgattaacccgtaaattcaacttcacgagttttgtgcaattggcgagagaaaccgggatagaacccatgaggttattgacatggagttggaggctactcagtttcgaaagcttacctatatccttgggtatttctccttcgatgtgattagagtaaagctcaagcaatgtcagtttggtgagacgagtaatcccattatcaattttgccagaaagacggttgactggtaaaaagagttgctcgagctcaggaagattgtagatttctttggggatttcaccagagagattgttgaagcctgctcgaagaacacttagcctcgagcatctgcttaattcttgagagagatcaccgctgaaatcattgtaggagaaatccagtttggtgagctgcggcgaagctgtgcacatgaaggaagggatagaacccgtgaagctgttgttgctgacattgaaactggttaaattgaaagcaccctgaagaaaaacagaactactgagaatttctccctcaagaagattgctggagagatcaacggtctgaattgggaagattccgttgcttccattgccaaatgattgttgaagtggcaattcacctttgaaactgttgtaactaagatcaagaaccaagagctgatcaagggcagagaggaaaccaggtgggagtggaccagagagacggttatgagaaaggtcgagacgagagagacgctggagatccaaaacagacgacggaagattgccagagagtcctctagaggacaaaataatcgaagtaacacgattttcaggagacttatcacaagagattccttcccaggagcaacaatcaatggacgaattccaatgcaaaggagagactggagatgatacgttgccagagaaccaaaggagagaatctcgatcctgaagattacaaacagcctctgaaactgtaagaaagaagacagaaatggaaagaacgtagagaaggacaaagagaaccatgtgaggactcaaaggttttacttgtctcacaaaaggaccaatggatttagatctcatcttctcgtcaatcatggcgagaacaaaagaagaagaagaagaagctgagaaagattaagaaagcttgaaaaagaagaagaagaaggagagggaaaagaagaaacaaaagacatgattatccaatctgggtttctctgtccgaagcttgtaaatggctctcaataccatcgttgaccaaagggaatagtcagaccaaacagaagaaaacttcttgtcacacccaaagttcacttttaaattttattttattttatcatgttatctttctgccctgattgtggttgtgggtatgctgtttttatgtaaagtttttttttgattaaaaagttatatatatatatatatatatatatatatatataaattattattcctttttgtaataaaagctcaagtacaactctctgaatagctctggtaattattaaagtcagccctatatatccttacttatatgaaccaatgaaaaatgttttacttatttcatttgtctggttttgttctgtcatttattcatgattaagaaagattaaaaaacgttttatgtgatttattttgaaattgggtcatttcaatctttggaggtgggaggtgcatgcgtgcgtgctatgatgttgatcatgaaattgaatttgatcataaaataataatgatgggtacaaacattatgatatgaaatcaaaataaataaataaaaaagaagaagttgaagaatagtattatgatgattattttttgtggtagaggcgtttaccttttggggcggctggtttagtagtagtggctcgtagtggtggtggtgttacacaacttttttctatatcctctaaaattgtagaatatgtaattcatctttatttatttttgtccatttctttctttacttttttgccttatggaggatctttttatgtttaattatgccaagtggaagccacatttaacattagatagtggtcataaagaacgaaaagtagataaagaagatcatatgataactattttttttttgtaaaggatactatttattttgtttgactttttgatttcttagggttataaaaatccttcaagctgttcatgtgtgtgtttcttttcgtaatttataatgagcaaatggcgtatatgatagctaacaagttactttaaacaataccgtattaaattaactgtcttagacttttcagaaattgtacttattaaatggctataacccaaaaaaaaacattagtatagattttgtgtgatattatatttatcactttcatacgattagaataagtcataagaagttacttaattttaaaaccgaaattgtgtttttgtgaattattgacgatcaaaaacagttatttggagtgatgttttaaaaagagagttcttcgaagtccaattaaatagaatctatcatgattaatgcgtttaatactttaactagtgtttaggagcagtaagtaatgatggtgtgaatttgtttttctatctaaatattatttaacatgatagagcttacgaagacatggtaagaatagttatctctttagtggaatcgaatataaagatttgacattaaataataccgaacaatcttttggagttgtgttggacctcctttatgtatgctttatttatctctctatcatctaaaataaagaaggaaatttagaattctgaggctcagattgttgagaataaaccgtaaaataaactcttgtgactttatacaacgataatatattattagcttttcgataaaagacgatcacatctattttaatgtttttccactgaatttttattatgttcaatcaaatttatagaatctctaataattttattttccacctaatatatttcttatacttatagagattcatgtacctcaaaatccaggtttaataaagcttgtcgttttctggcctagaatagaataaggaaaagccaataaatattgtattcatttatttattttacttataagttattaacttcttaattattattttgctattttctaatatgaatccatttcaaaacacagcacatcggcatatctgtttatctatcttgaaaagaactcgtcctaatttgtttttttttcgtctgacaatttcttcttctttttaaattgagaaaatgattttgtaaaaacaaataaaatgggcgactttttttttttttttggggataaaatttggcaattggacgacttggattaggatattccattttttatatatacaattcaactgaaagataacatgtatcatgatcctgatttaatgtatattttgtgtttggcatttttctatattttgtaatatattacttgtccttttataaactgtatacagctattttaatttttcctgctcccagatacagctatttagatttttcgtaccatttgcaaatattttaagaacaactagttgaaatttttaaataatcaacagaaaataacagtcaagtgataataacataaacactattttttgttctacaggtgtgaataagcatatgttaaatgtattctattttctgacgaccctaaatctaggctctcctcgtgaattttcatttaattaagggagagaaaacgtttgactttaaaagaacaaatagtatttaattcaatacatgttattatatatatgtaattttattttgggagatagcttatcttctatattggtcgtcaaaaagatataacctatattgagttggaccggtaagctcatgcaaaaagaacaaaatctaaccacttgctttttacaattacctatttatgtgtgtgatgagttaagttatgactttgaacagatgatatcttttacatgtgtttttgatttaagttatgactttgaatagttgatatcttttgcatgtgttttttggtctttgtattccaataacccatttgatcattcaatcaactttttaacaataatcataaaaactagggaagcaagcaaattgtctttatatttttaaacttttactagttttatgcaacaaaaaataaaaataaaactaactcatatttcggttttcaaattagtagtactgcattaatagacttgagaattaaaatcctttcgatctcccgacaaaacctagcacaaaaatctcacctaaacaataaacccattcaaagtatatgtaatcaaaattgtttttaataaagattctgtatgcaagattcaatatactttcatttttttggtatacttggcaactagttgttggtatacccaaaacaaatcatgagatgtttgagtaaagtcaaagcaaaaattagccatatatagtgttactctcgaaagagccaaaaatgagagacaaacccggtccgacccttttgagtgcaaattgacccccgaaaacataaacgggtcagtttgagacccgacccgttttatcgcattagaactcatttgggccataagttgatacggcccagccctaacccgtttcctcttctcttttcctattcttctgttatcagacttctcagaaccaattgccacttgcatgaattactcagccatggtccatttaataaagcccacacacaaaaaaaaaatccaactcgagtttaaagtatgtactataggttgttaaaattgtagtgcccgtaataattagtttaagaaaattgtgtcatggtctatggaatgcatgaatgaaagtggttacatgtttactttgttttatgaaaacttctttgtaaccaaaaccaaaatattgtttttttcttttcttttctcaaggtttgaataaatttgaatattcgtctagtaattatgttagccttaggatttaggaatctagagagaatgatttaaagattaaagaagataatatgttagagagtgaagaagatcatcattcaactctcatcattttgcctagtaaccatatttttataacttttaagacaaacagaaaaaagttacggcattcttttcaggacttggaaaactttttcaaatactaaaatattgtttcttaacaacaaaaagtttttgagtcttacggtctttacttggtttcaaaataggctaatgtgtataatgtattaagtcttggtggaaccacaaattcaggtcggagtcgtctgactttccacaaatattgactctgtgtttaatttgttgccgatttgcggattatactaagttaataatgtgaatggaacagtttaaatttcacatagagatgttaaaattactagtaacatcggataactaaaaaaaaaactcaaggttccacttgatgaaaagacaagatccttaaacctaggcctcgaccaggaggattctttttttcacatcctttgatgatgaaagaataaaaagctcttcatttgctcaatgtagtacatatactattgaaatatattaagaattttatcatctaattattccaaattagtgcatgacaaattgtcatccattagttaccattgacatgctttttacttttcttgttatattaaattttcataacacaattaagagggtcgatttcgaaaaggttaaaaatagtggagagttaccaatatcttgaaaagactaaagaatcttaaaagatgtgtaaatcagtgcacaccatcattttagactataatgtactccatatccttagaaattactactatttgcaaaatataattttattaattcatgtttgtttcattaacaatttgtactattattgtgaaacacctaaacctatagtaattagtcatacaaaacaaaaaaaaagaacaaaatgtagttagtatttttgtaatggagaggaggaagcattaccagaaaaactgagtaatggaaaacgatgacgacgaatttacgcactaacaaagaaaatttggtcgactaaagttaggaagagagtaggggagctactctaatttcaatacactgggctccactctattcttccttcttcttcttcttatgccttccttcgtcttctttccatggcagagacacagattgatacaattcactcctttctttctgttttttcctttccctttctctcatctctctctttagctacttcctcctcccataaaccctctaccaagtaaactctcagctccaccattaacacatctcggtctcaattccgagctctgtattccaatcctttgttgcatttactttctgggtttttgtttattttgattttcttccatttgggtacccacccaaagagtaaagtttcaagctttcgtggtacttgctatgctttccctcacaaaaccctaatttcatatccttatccaattccatgttttgctctgctcaactctctgtttctacttctgaatcgtcgttttccttcatataaccaaaccaattctgttgaatcatcttggcacattcattgttttgagaaggaacagaaaaagttctgatcttgtccctattcgcacatcaatggacgataatagatctactcatagctcaatgttcggtgacctatcaacagaagaggtcacaagtaagatcattctcacagcaatcattgttctattcatggcggttctgttcgtccttatcctccatctatacgccaaactctactggtggagaatagatcagctccaacagcaacagcaacaacaacagcaagagcaagagcaagaagaagaccaatcatccattgctccacctgtagtcactcgccgtcagcgacgtcgtttcatcttcgtcccaggccaagacgctctaagcaacactggactaacctcttttgaacttagttccttaccaattgtgtttttcagacaagatagttgcaaagatggtttggaatgctctatttgtttgtctgagcttgttaaaggagataaagctaggctgcttccaaagtgtaaccatagcttccatgttgagtgtattgacatgtggtttcagtctcactctacttgtccgatttgtagaaacactgttcttggtcctgagcaagctagctcaaagagagttgaacaagttccagacaatgcagaaaatgctggtaccaccaataacaaccatgatgctttgtctcaactttcaacttcttctccagaatttcccaccaatgtcttggtatggggtcgtcaggatcaagttagtaccggaaacaccaatgttgggactcaagaagacggtgctgctggtaatggtgcttctcagagtcaagaagctgttgttctggatatcagcgattcttccagtagaaatcataatgtatcatcttcgtcgtcatctatgaggtttattgttgaggaggaagaagcaaaatctccaatgacaacgaggttgaggtccttaaggaggtttctgagcagagacaagagagtgggttgtagcaatagtagtactagtaatagtagcagctccaatgctgttgcttctgttgatccttgaagattgtaattagcttagctgagtgagattgcctgaagatgtcaaactgtgtgtatgtggtctcggctctttattggctgtgtttgagagctttctttgtcatccaagtaaatcatttatctattccacgggtaattgaaatctaaagcttttgtttactcagatcaaacacaagagtcctacattgttctctacatttaacttatggaatcatcatgttaaaccatcagatcttaagctaaaacaagaagcaaaactctagaacaacaatgagctttacttaccataaactagacgcgccactggtttcgataaacagaaaaaaccaatttagaaaacacatttaggtctgttgtactgtctacttaaaccggtaagcacaagggtaatccctctctactgtttttctttcctcttcaaagattgcaattaaaaagaaaaaaagagttggtgattatcatcgtgaccatgagctgtgttaatctgcaacgtttcttttcatggagttggacttaacttaacactattagaatagaaacagcatcagtattcagtaaccacgtggcctatcacatgatccgcatcttaatcacatatatcttcatggctaataatacgtgtgaatgaatgtgtatcagtgtacgcctatgtgaggactaatgaccagtgaatgatctagaaactattagattaatagtaaacatctgcatcatctgaaacacaattgggaaaacaataaggaaattattggcacagcagtcaaactagatcacgtgattagatcccaaaaagtttcatgaatcgataatataatctacaaagcaacaaagattctcgctctttaactcaaacataagctcgctaccctaaagttttctcaatagcagtctcaaggaacacaacaacctaagaccacaacagatcaaaaagaaatttcacaatgaagagattccatacatcggcatcgatctcagcagctctctgtctgttacttctagctttgtttagcagcaagtataatgtagagtgtcgtcagatggcgccagcttccatggatttagcttctagtaaaggtgtgagagatttgaagataagccaggagatgaaaggagagtctctaagaggtgaaaaagatagcttccgaagaatcccaaggactggctccagccctatacagaacaagtaaagacaaaccacaccactcaattttctttcaatctttatgtattccaaagggtatgattgacaccaagagtgtgtatttttgtaccaggattgatcccctaacagatgtaagaggaagtaggaaacaacatatcacagcaagaaaaccatagatttcatatatttttcgcttggatctgtttttttttttgggtagtatagcgtctttgcacttatttctggatgctgtaagctttgctactgttaacagttcctagagtgtgcttagacctctataagttcttttgtagtgttatatgaaaagactttttattagcattcttgtaaatgtgtcacagagatgaggaaaaaagaactgtgtcacagagatgaggaaaatacagcttgactagatatgacaagagtaaggagtctaaccttcaaattctcattttatttgaatgccgattctttccagtcatctcaccagaaaggaaaggtcttttgctgccagctagttttggtttatctgttgcttcactagttttattcttcttctgtttcgatcttttttcacctgcaaaaggttcatccttatcctttgcatgtttttctcggtgacgcttaaacccggaagtaggatgatggtcaatctctttccttgtattctttacttctatttcctgagctgcatcctcagatgcgtcagagacaaaggtgttctttggaaaatttgatttgttggacccaaatgcagagcaaaattcgttatatgttgattgcttagcttcttgtcttgatttccactgatcaggtctgctggcataactgcaacaaataaatgattccatatcatatcaaatcatgaataaggaggtaaaagatgcaagagaatacatgcatgccatcaatgctacagttatgccacctttcagtggcactatggtcacttaatctcctagactttttctctaagaaattttactctttttttccatctcacaggacgaatatgttagtgataccagtctttctgatgtgttacagcttccgtcaaacaaagcaaggtaagtttgtgaataagatcttacccatcgatatcaagtttcctaagcagataaggcccttgctttgttttcgagagatcaactttcacatccaacagttcagatgctatggcttcccttagtgtcaaattacatgcatcgaagcacttctcaactgtaaatgaaccagacgtgtgtaatgagagctcgccaaaatgtccacgtaatctgtgacgaaatcattggtgaaaagaaacatcatcaaaatatgaagaattgcttgaaaaaaaaaactgacaagcagcctaagagactgaatgaagaaaaaacagaatgaaggaaatcatataaacaagctactgtggaatctatcggtcttgagataaacatatccccatataaaatcaagaagcagtgcatactttataattagtctacgtttctgttttgtagcagcatctgaggcaagaaaggcctcgatgacacgtgctccactggaatcttttgccgtttcagtgatatactcagctttcatagaagttaagcttgttatgtatggctgtatatgatcctgtgaaattgagaaaaagttgggagttactgtgaatgcacatgaaaagccaaaaatttggaagttaaaagcactgaagctatttttgtcaacacaagaagagaaggaaacatacactagaaaacttaaaaatcccctgaagtatcaaacaacccatgacatgcatctttgcaccaggtgcccactcccatgtagacttatctcgacaaccaaagtagtaatcaagaaacagcaaccgtggaagaatggagatacgggattcatttgtggagcatactgcaccaacaagggcctcacaacactgtcaaatcagtaaaaatcagctgtataagaacacaattttgaaactagaaaagaaataaattttcatctaaatttagaaaacatagaaaccttattttcatgactttgaagcctttggctaactgctatcagagaagccacaacacctgacttcccttgctcaagaagatccttgaatcttggagctaattcttcccacataatacccatcttgtaaacaaaatcaattgaacgtaagtttactggcttcacggaaatagcacaaataaattcgaagttaagaagacctggaatgaaattttgatgtcacagaaaaagatgaagtgtatgataaagatacctgctcttggtctcttgcatgggagattaatgcttgaataacaaaatttgcacaccgatcaactgaaagctcaaataaagaattcttgaaaactttgttgaacatttcgttatacaaactttcaggggccacttccaaaataacctgaaaatggcatgcaaacgcatttaaagagatgactaagaaaattaacactccaattacagcatggaatcaaacagagaactagcaatccttatagataatattttgcatggtctaaagcaggcaatacgtccatcatcaattgttttatgcaaggtacagaatcttggtataaacaactcagtcagagcagccagaggttagactcagttacctccaccagatgactgaatgaattatccttcatcgactctaaaatttctttggcaacattagtctctatatgaaacccttctacttttttattagtagagttgcagcgcagaataagcggaatgatttcaagcaactgctcatcttgtttcagcattagtctgagagccgtctgtcaagagaagattagttagaatcaccgtgaatcagggagagagactaaataacagtcaatactaaagaaattgcttgaaaatgacataaacgattagacagggacataaaacctacctgtaagaccaaactgctatactgatcgacttgaagatacttcatgtcctctctgctacaacttaatagcccagataaaaggtacgtgagcatacctggaaacccttgatgagggatttctaaattattgtcatctagctgagacatcttcagattcaaacgtttggccagagcttttgatgattttgcgccataaagctcaggggaatctaaagagactcctttgcaaagacaaagaagccttcgtagtacatgcgaaccatagcagttgcacatcatatcaagaggattatccacaatcacctgaccaggggaaatatttcaccatcaaaattgaggtcaattactagactagaagcaataatctggataccttaatatgattgtcaaagccagtaaaaattgtataaagtaccttgcatatagaatgcaaagcctcctcaataacagaataggcgtctggattttctagatgtgtggccaaggatttgagagcagactctgcgacatgagaaccagatctatccattgcaatggctgggaacacactagcagaatttcgtatgaaactgcagagttggtcaagttcacatccctcaagtagagtttgcaagacatgacttatgatatagtctgtagcaatttcatactccctccctcttgtttcttcaagggcatttccacatattactgaacgttcctctaattcaacttcattactatcaaagagattggcaatctcagagaaatactttgaagtctctggatcaatctctttcctgaaaaagatacacccaaatcactaccacttctcacaacaacaaaatttcgactataaattagagcaaaggcccttggttaaaaatctcctttacctgacaaattgattctgatgttcgaattcggagtgtttctttgatgctggctttacattgggggcaccaccggattggttcttcttgctgctatctacatcaaatccacggttacccttatggtccttcctacgcattcccttattcctttcactgtgattgttactagactttcctcgttcacccatcaagctatcttcctcaatggtcctgtgcctcctagatggcaatgatttagaaccaacagaaaccatgaaaattcctagccccaactatgttaaaccctacaaaatttacacacaaaaaaactcagcttcgaagaactattagtcccaaattacacaatataacaaaaaagggaaaggttcaattttttctccaaatttacagaccccaaaaattagggtttctacctctacttcaaaacgataccataactgggttgaataacctaaaacataacaataaattccgagtcccaattctaagactttacactaatccatgtgaagcttgtacaaaagaacagaaacaataaggtgtatcacaaacctttgaggatgcaaaaacacagttgacgttagaggagaaacgaacaagcgtgagctcagactaagaacgcggcgcagagacaaaacgacgtcgtctccgaaactcttggtatacgttggatcaaaatcttcgatgttttgacgttgtacaaattttctaattcctagggttttattctcgtccaacctaatacgatatcgttttgttgacgtggatataaacaaataatgggctttaaatcacgattttaccgacctttttagggcccaattatgtagcccaaaaaaaacctcatcgttagcaatgtgctgctacatgttgttgtgatttatttaaatttagagatttctaaaaatttataactttcaaattagctgtaggttttataagtatctatttatccccaaattagattacgactgtgattggattattcaattttggtccttttggataattaagtcaacggaagatagacttcagacatctttttttgataaaagacatgtctttttttgggattagtcgtgtgtttaacagataaatcaacaaaattagccgcctaaaaaaaacccctacaaatatcttcatcaattagattttcgaaaagaaaaaacgaaaaagcaatttctgagcgtggaggacaaggcaaaattcggtgtgcaaggcactggatattgggacccttgtttcctcgtgagagaattttcaatcctagggcttaaagagcacgttcctagtataaagctgattcacagatgcggagattcttgattaaccaagctaaaggtctcgtcgaccattctcgtcgtcaacatcaccacaaaagtccaagctttctctctcctcaacctcgtccccttgcttcttctcctcctgctctgtctcgtttcttctcttctacttcggagatgtctgcttctgattccacttcttctcttcccgttactcttgactccatcaatcccaaggtcggtttctaattctctagctggtttattgcgtttttgaattgtgggtttcagggttgatctggatttgtttctaatttagtaaaaaagtttcaattttttactgtggttgtctgatttaacgccaaaggtttatcctttgcttctcgttgtgattcccaacgatgaaatcgacaagctttgcataacttctttgtactttatattacagagaagttggttttattgttaactaagagttttttttcttttccggggaacaggttctgaaatgtgagtatgctgttcgaggagaaattgtcaacattgctcaggtcagagatgcatgtgctttgtcttgtaaaaccaagaacaaaatctgtaaaattgtttttaatgctaattgatttttgtttgctttttgcttccatcttacagaagttacaagaagacttgaagactaataaggatgcttatccctttgatgaggtaaaatctctttctttatcggcagttttgacggatttatgattagtttagtgttgatgttacctgttctcaaactctttgtgcaaggaacttagaattcttcattacttttggcagataatctattgcaacattgggaatcctcaatctcttggtcagctgcctataaagttcttccgtgaggtaagtgaatgtttttggtactagtttggttgtcatatcagccacagagatataacgtctatcatctatatgcctcaggttctcgcattgtgtgaccacgcaagtcttttggatgagtctgaaacccatggtttgttcaggtgaggttttccttgctatatttcagctttaggacatgtatgctcacggtttaagattgcttaacatttgatttctactctgctatcagtaccgattcaattgaccgagcatggaggattttggaccatattcccggaagagcaactggggcttacagtcatagccaggtttgttattagagtctagttaaaagtcctaaaccctttcttgagatggttcttatgttgctgaatgtttcattttttgttctgcctcagggtatcaagggtttacgtgatgtaattgcag

SEQ ID NO: 1243 - DNA, 87039 bp, Arabidopsis thaliana
aagctttggacaatgtgatttcgagttgggtatccattgggaggcttcatgagaaccagccagtgcttgtaatcgcatccctcgactaaactcggtactcgaattaactcagaccaactagtcgtttccgagttaatagaaccagagttaccggagaatggagacaacggagaaagtcggaaccggacggccgccgtcaaatttaacggtcttctgatgatcctcgccattgataatgatggtccaacattaaaggcgatgaaacttcaataaacgtcagagcctccgaagaagctagaggttttcgttttattttgaagactatttaaaccgatttttggtttggtttggttttggtccgattttttacggtttgatacgagccgatgccaaataacgacactgtttgtgttgatgatcactttggttttgattttaatttgattgatggtaaacgaccattaagaattttaattatttaaagccttgatttttaattatttgtgtcgcctacattttaataaatcaacataataaaatccttgtaagaattttacaatatcggcaaataaaccatactgcgtcaaaatctaattatatacttataaaattctctatactttgaaaaattgaataattctaaatagatacactattaggcactcctctacacgtaacacccggttcagaactcggagccatcaactcatacggtaacactcccgcgccacagcgattcctacggctaggatcacgattcctcttgtcaatctccttctctatccgtccgatttccgccgagaatccataaaacgcatctacgatctcagcatctccagtccatatcgacggttgttgtctctctccgatatactcctcatccggcgaatgtgtcgacaatgtatcaaccaccgccataaacttcgtcgtttgcaataaactcggcatcgacgagaaaaaatacttttgaggatcttcgataaaactcgtgaactcgggatctgactcgtcgggaatcaaccgccgcattagcggtggtcggttcgggacgtagccaccgtaaggatattgtccgaagttgagtgccgcgtgttgtgccgaggcgagccagatgatggtggtgatgacggagacgagatcttcgacggtggaaagcttcggccaccactcggcgtcgcggtgatcagcgtgacctacgttgattgactcagagtaccaggcttggagctcagtatcggtttggattaggttcgagtttgcgtaataacgttccacgtaggttcggacccaagtttggattgcggaccataataagagaccgtcgttggcgtatgggtagtcttcaacaagtaatttaagcccatgtggttgtgttgggtctggaacagccatccccctaaaaatgaaataaaaaatttaacaaaaaaaattgttagattcaaattgtatatgaaaagaagaagaaaaaaaaatccaaatttaaccagacaacaaaatatctatctcactagtcactacaacaatctattactatgcccactacattatttatcacatgagtatgattgaaaccattagaaactgttggagctagatttcatgtaattctaataaatcagaaatgtttctaacactttttaagttttatgcatcagatttagtttaatacttaagtttctaaatttaataatgtacagagacattaccttcggatgagatcagcagggagaccttccatatcaaaccgccatttgttcttatacgcagcggaactaatctctagaccgtattgaccagcagtgaagcacgactcgatcacaccgtccgcactaatcaaagtctgtcgtgccacggcattgatctccaaagtgtacctcatgtgagggtctaataatttgaatatcggatgcattgcgcttaattgtctatgagcagctaatataaacggttccaaacacgcatgagtacgtaaccaatgattcacaagctggtggacaccagcgtcattggacccaacgtgggccttggctagctgccacatccagttggaggttgcgtctactggaggtgtgaccacgcgcttggacttttggtttgagcttgattgagaagggaggcttagctcgatggcgataggcttgagtgtaccgagtcgggtcaagaacaatatggttcgagtcgcgtaagccttgcgtccatcaagcgcgttgattctatctagaaacggtaagtatatgtcatggtagtccaccataaacaaacggttcgtctctaacgcctgaaaattcaatcaaaagataaacaaattaataatattactcaaaatttttttgtctttgtgtaagttaatgagatgatgtatattcatacttgttgtacggttaagccatcaagttgaccgatgatgtggtcttccgtgagagcggagtgaagacctggtccgtagatttcagggtcaagattgctgaccggtggataagacgtgactcgttctatgttgaccgggttgatcccagctatggcttggcgtgcgaactcgtcatctcgaagccatgcatatttatcctctacattaaagtaaaaaagattcattagacaagttaaactatataataacaagacctataagtaagcagtttaaagagctagtaatataaaacagaaccacgcttttaattatataaaagcaatctcttacaactaccaccaccagtccaccactatagcaaaatttatcttttagtggaaacaacaaataaacaaatgaatagagcacgtgaatcatatttccttgttgaagggaatctaaagggaactttcactgttggttccaaatacacacggaagtgatagaactatagcaaaccataaaataaaggtaatgagaatcattaggattcctttttaaggattggtccataaacgggcatgtgatggcacatgtgttaatctttcgaaatatttttcagataaacgaattagtgacataattaaatgttgtaatagctgtcaaaagattaaaagctgtaagaaataattaatgtacttacttgaaactattttaggagtgtcgtatctaagcaagccctcgcttgatttttggagggtagtgacgatcttcggtaaagggaatttcttgaacatatcatcttgaaaccctaacttgagaagcaagccttctttgtaaagactatcgatctcaccaaagttagcgaagtcctcagccaaaatgctagcttttagtgaaggtataaggttatgtaaaaccgccttaagtctacatgcagcaaaagtgttctgcttagactcctcgaactgctcatctcttggcacatacatcggtaatggtttctccacccgcctctcagacatcatatcggtgtcggttgaagaccggccggttcgacagcgtctagggtaaggaaattcacggccaccaagtgtgggacgggctagttcacgtgatatgtccggatttcctatgtcgttgtacacatcataatcgtagattctgtctgataattttctttctcctttaccatttcctcttagattctccaattctttctcccttaatgttcttagaccggacggtgtctcgctcggcaagtaaggctgcggaagaaaattttcaacaacagttaatttttcaatccaagatatgtagttggacgtcacatttgttaattaagaccagtcttggatatttggacccaccatgacatgactatatgatattcacaaattcacattaaatgtgattttgcttatgctttagtcaagatttaattaattacctgattagtgaagagaattcgtttggatggatggtctttttgagattggacccaagagttgcaggggaagtgaacagggccacatgcgaaaccctcgatggtgatgctctcaagaaagaactctttttggtgtttgttggtcacggtgatggctcccggagaaccaaaggctgaatccaccgtgaactcggccgtgtaatggactctttccgcctttgaatttgatttctttgaccaatctttcaaaactgccgctttactcttctttggctcattcgtttctgttacaaaaagtttgacaaaaaatttgggtaaattagtccaagttaaaaaaataaaaaaactttgacccaaacccatgttaaattagacgacttaaaaatacccacagtgaaaattagtaatgacttacttggatcaacttgggtactcataagctccaagacaacgtttctaccaattttatcagtaaaagcatccaaatgcttaaccaaagtttctttaaaatcctctttgtttttgttcctcaccgtcgcaactgctctcaccttaaacttcaccgacttctcctcttcttcctccttctcttgttttctaccgacagtgctaatacgcagcgttttaaccaaatcctcgctgatggccgctacaacgccgcttgagttaacggctctcataggtctcggatcaaaagggttgatggagaactgtgttctctgtgtcttcttcttgatggagaaacgcgaatgaaacggagacgcaagtgatgatgatctctcgaagattagacgagaacccattatctcattagctaaagccattttaaaaagaattagttagttgatgatatggtagatataaagttgaagcttcaagactgagtttgagagctttctttatttggttgcgttctgattacaaataataatcggcaggtgacagctatttatatgccttgagaaagagagagcaaaagggaagaccgaaagagagcttttcgccgtccacacgtttttttaattggaatattcgttgttacttgtttttctttcgtcaatcatatttttataactttgctaacaaaaaaattaaaacgcgaatttttcaaaacttgttgttagattttctgaataatacggacactttaatgttcaacgtaactacgtaaggtaactttccaacacttttactcaaaacaaaagaaatattgctaccttctaaaaaagaaagacttgcatcaccatatattttgctttagcaaaagatttagagtttttttcaaaccaaaataaaataaaaaaaggtctttacgaaaaaaaagaaaaaaaaatcttctagtttgagtcaaactgagttccgagtcagacacgaacgcgtctaaaaacgttaaggaagcaaacgagaaagtgttaaataatggactcgcggattctcgtttgattgttgaatgacaaatattacccctgatctttccggaaatggtgatcatatcccgttatcgtctaataaagttgacattgccttttactttataatatatataaaaaaaacaccacaagtgaagtaaatctataattcgaacatcggatattgaagatcggtttgtgtgatagtttaataaaacagtccatttgatatctacgaataaaactttaaaataattttaaaagtaaccggaaatggtgattatatcttgtgatcgtcaaagaaagatgatcatgtcggatagtgctatcagtataatcagttaaatcacatgaattttttcataagaaaaagcttgtttcgaaatcgattattgttttttttttcttgtagaaatcaataagttatatttacacataacatgtgggttgatttatgagatgatatcatcaatcagatcaattatacggtagatttaccgtttggttaagtatatacaattaatgtttttgtaaattgtgttattaatccattttactttataattttctccgaatcaataatatctagatccccttttatttaatatattatccctttcaagtttaaaacaaaaaaattgtattaagatgttatataatgcaaacactaatcagaacccaaagttatattcgtgatgtacccatcgtcataaatcataaaactaagatgatatacattcatgcatacaagatgacgtttcaaatgtccaaaaacctttcagtttgttttcatatatatctcgttttttctctgattaatatttcgtcttattttaaaagttatcaaggtatctgattcttgtaagaaattcttccatatcaagtatgcaaatcaaatatgcaatgttctgtatctatgcataacttaattcacaaattaaaggtttaatcaatcttcacacttttgagaaggcataattttttctttgtagagcttccaagcaagaacgagtatccctaagtcgttagagccaccattttggtacaacaagttgcatgctcacccgccgcctcttcggttaggccgattagtcgctttatgttattcctactttatgaaattcgttaaagtttttagacttttaattactagttattaatttttttatttctataattatattgaccagttgttttgttagatgtagcgggagcatggtcgtattatattggttaagtctcagggttttgtctccggcttcatgaacaaacgccatgctactcagtcgatttgacttcagcgaaattacaactcgcaaatagccacaaagtcaaacatatacaaaaatatgaaaaatgtaagttgaccacacaaaaaagctgtataccaatatttttattggttacaatacgtacgttgtcaaactcaacgtaccggttacctttgattttttgaatactatatcaagacacgtttgaataaattttcatttgaactcttcatagtatgaagttcatacacctaaaattttcaacggcaaagaccattggtattcaattttgatgttgtactactttcaaattaatttaaaacacaaaaaaagcaagtacttttgatgttgataatgatatatgatgtaaatatgattgtaagcacaaatttgattcgtgaacgttgtactgtgtatagtgttgtttactgtgtattatgttcgggcccttgggctttgtttgtgtcttaaaaaatttagactatgaatgtatgatataagtccagagcccatgggacgttttcaatatttttctatcacaatttaaaataggaaagaaatagcaaagtatgtatgcaactggctaaatcaaatttgaagaacgtttagtaagtcaaattatttgcaaactgcaaagtatgcgttgtaatggcctaaaattacaaaaatacttaatatctattataattactaatgtgaaaatttaatagaatcaatcagttaaaaattaaaagaaattattaaagaatgtcaaatttggtaaattcttggtttggcttgatttagaaaagagtttgataagccaacgatccttgtaaaccgtcttgatatgatccctgttgctttgccaccaaagatggcatccatgaaagagcttgctgagctcaagctcatttcctagtgtccttggcctctcttctttattattgatcctaaattttgccctctctatcagattaacctatgtgctcatctttaacatttggcatacctattccaacgactgaatcactttgtttatacacttgtgcactcagctcttaatcctcctaggtactagctccaagttacatcaaacacacataccagaataatataaagttacaattaattatgataagtgaaaaccatgtctataagttccaaaaactgtaacaaaacgcaattaagcagaaaaccctaactgaagcaacaactcctaatacaattgtacaacaacacatctacacgatttgaaagtaggcgaaagagtggtaaaggtggatcactaagtccctatcatatgtactcgatatgcaacaacatatgcatactgaaatttctaatcaagaaagtttcatagaaaatgaaacttcgagttaaattttctttttggctaaattgattgttaatttgagactttcaatacacataaatagaaacttgtgttgtgtatgcgtatacttatgtatctcgcatgtgatagcttaaattgaacacttcagcttctattatagtttctcctttttccatttttattaaattctaaggagatacatagcaagttgaaggaacaaaaaatattggttaagtagtccaaatgtccaataatctttataaaaaaatgtcgaatcaatgtagttagccaatttgcgagtgcatacaagttacaattatgctcaaataggattcctaattttttgttttattagaaatagaataagattccaattttttataaattattgagagttagtgaatattggacaaccaacccatctaatcttttgttgttaaccgtgaaaacatttttcaaaacgtttgtacatgttacttattgattcatgcgttacattacagtcatttgatttaaaataaatattttgaaaagttataaaaataactaaaagctaagaaataaatttaaattaatgtgatgcacctttttcatttctattttgtgatagagaatcatcacagagataagcatgaccctaccttccatggtttttgatcatacatgtcttttcaatatgataaatttctaaagaatctccttcttaattatctaattataatcgaatagtataaacatattttcatttcattttgttcttgtttaactaagctcacagcaacagaattccgaatattagctagcaattggagaaagaataaaagacagaaacagagcaccaaattattcttttagcccaaaattttccaaaagtacaacaacaaatccggcaaaaacacatacagaaaccaatttttgatttaccgacgaaaatttcaaatcagaaaaccggatttgatccaagtgggtccctaaaccgacggtttaaaacaattttttcaacgatgagcttttttcaagtcaaactagcgaaacagctatcagacctagacaaaacattagaaacacaatcatgatgatgatcttggtcgtctttagatggactattaggcatagatctaagcattcttggtgaatctaagctttttctcaagatctgtctcatggcagagatcaaatgtcctgtcggattcggtggtgggcttgaggatttgaacttattacacatgttcatgtgtctggccatagcttcctctgtcgttaacaatcttttcgttctcatgacttcatacttcacagcttcagaacaaagtccacagatccatttccccatgtaacgctctctgaccatctctatgtacgattgggtacactcctcggttaatccgcaacaatcacacgtcaccgaatctggctcatctccggagatttgagtaaccgataccggagagacgagtattacctccggtgttgaaattagcattgttggatcacttagaacactcgcagacatggtttcttgattttaaaaccctgttaaaagaattggatcaacaatccgataccaacttcgacataaaagaactataaagaaatcaagcagagaaaatttaccagtagaagaagaagagaagagaacgcaattagcttgtgatctattttcttcttatgtctctgtttctgaaacagaggaagggttttaagaagggaaaaagctttttttttcttaaaagaaattgaaaacttttttttttatatttcgttttgccactctccgtcttctaaattactttcttctccgagaaaaatttcacaaaacaaaatcattgcaaaaaacagagtatattaaaaattctttttttctttggcttttcttgaaaacaaatagaaaaagttaccgtttctctttacttcacggaaaaaaacactagtagtagttcataaaacatcactcgaatctctcgtttcttctgaagagagaagaagaaaggtattgttttggaaatatatgaggaagagagaatgagcgaagaagagagagaagatgtagtgcaggcgaaggagaagcaatgattggtgttttataaagggaagaagaatagtaaaagccacgtcagataatttatattctgattaacttttaatcctcaccgtttatctcggaattagccagctggcgaagaaaccgaccttttctccaaacacaaaataaataaataaaacaaatatgggaattattatttactttcagccgtttcggtttggtttgatttgacttaaacttagctaatcagaatttgtcacgtcgtctatgtcgccattttccaaccaataattaattgtttaattacgcacggcacaccgtatctactatagttaatcacggcaataattttgctaatataatcaaaaattatgtcttgagtttatcattaattaggtgtagtttgcaattttgaaaatgttaaaggtgtctgtgaaataggtataataaattaggtgaaaattgctaatacgatcaagtcaaattactaataattatacgtgttaattgtgctgaaagttttgtgtttttctgttgccaatgctccaatgcggtgtctgcaatagtagccaattattgattactgattagagacaataattatatagaaaccataatttcagatctataattcattattacaaatttgaaattcgaatgacacgtcactatgttattatctctactctaattaaacacagttaattacttttttatttttccaaatgtttatctaaaaaaaaagttcgaataatacattcaacttcaaaatattattgttatgaaataaatagtaatagcactcttagttttgtgaactactataatgttattctcaaaactgatgcttgggaaaaaaaaattaaagctggagtattgattattacaaaagtatagggatacatataatggccacgtatatatatcatttttaagttgaatgattgcgtggaataattaaacgaaaggatatgccttgttggcgattccctatagagccaatataaaccttgtggccaatgaaaaaagagcaagttgcaacaatttttaataattctcatgtcatttgattctttcttttatatttgatactatatacaataagcaaccgatcgacgttgacagaagaaaagcaacagatggacgaatatttttccaagcaattgcaaatagaaataggcaaatagccaaatgccctaataaaaaaatgtgattaatgaaaaacatcgtagcaatggtataacaaacaaaatttaaattgtagtcatatcatgcatactaatcaataatcatagtttcatagtttttgatagttcgtcgtaattgtaattgtatgtaacactaactataaagccaccatcgtatatcattataacataacgtgggaaattaattaatggtttaggaaaatgtatatcttaatattgttaattcttagcgtccttatgtactagctagtatattctagaagatgtcttagaatatatgatctgtgagatcttgcacgttagcttaatccagttcgaatcctatatgcaaagcatacatctatataaataaaatattgtaaatgtcaattatgaagccgtcatattgaaagcgttcacatcatctgttgggaaatcttcaaggtgtgtttcacgtggatgatatatatggatagaccaattcgtggatgtgtccttgatgttagaaaaattggcctttcaacatttcataataagtacttcaaaaatgttaatgtagattttaaaaaaagttaggagtatactctcccatttctcaactgttcgatgaagagaaggaaagtaagaatgattttttaatattttttttgtgcaccggaaagtaagaatgatatttaagaaaatataacttgggaattgcatggattaagtctgggggagccggtttagtgtaatttaatataggtcaactcataaactggatgcatatatatacagtatccaaaaaaaaaaagatattacgtaatatacacataattcacatctaaaagtaagacattgacgtgacttgacttatgatgcataaaaaatctgcctggagacaaaaaaacaaaacaaaacattggtctcttgagtgctaaaatctaaaatgtatttatttagttcactagttctatgcgctaaatgggcgcaacaccgaagggtccaattgatattgtattaagccacgggcctcagtttgatttgatctgttgatcatttaaacaatgataatgggcctgggcctctgagagccagatcgagtattttatgtatatgtatcacatgttttagttattttgttgatatcatatgttagctttatcatctacttataagtgttggtaaataattaacgacatacgagtaaattataacacatctataggagaaatataatatacggatataaactagaaacatggcaaaaaaagacatacttatataagcataaaacaatttaattagtttgattcataagcaactttagaggaaatataaacttgagattattataataaccttgatcacgctttcgagatacttacaagcataaataatataaaactagttaaaagttttctcaaaattattatattaaacaaaatgagttggtcatgacacgcacattcatgtcgtttctcaaatgattgtactgagcttgtcagttgatgatacatatagttgaaaataaaatgttattataacttatgagtgtattgacttgaatcatcagaagataacaaaataattaattaattatatcataacgtagaaaaataaataaaattgagatgccagcagcaagcagtgttgtggttggcccgacgccgaatagttagtggttacaacttcattttataaataaggtaggaccgactcaaatcttagtggacctaaacctaaattcagtaattaaacaaaaactttgcccaattttcattaatccgcattactaatggaaagcatggcagacaacacaatccgttaaatcagctttttccctcaaccattaattaaaaaagctaaccctatattttaattttagtttactttgaatgaatctatttttgtgaaatactttggccaaattatgcaaaccaaatttgaaaccagtatgtgaaattgaatgatcaccgatccagagagctagaaatcagaatatacgaataatcgattaaagttgtttgtttttgtatgcgataaatgtgatttattgtacatggcctacatgtccaatgattttgttcgacgaatttatattgagcagtcgatcgtggtccgatgtcgacgtggagagattctgtagagtttttacattatttatttattgaaataaagtgataaatagtagtcaaatgatatttatactttactttcttacacataaaagtatatatattgaggtggtagccgaaatatccaaatccaagtccacactaatttatagaagctacatttgtcatgtaaattctaacattggaagaaaattaaatagtggtatagttggacatttttccctttttaggagtgaatgtaaatatacatggacattaaaactaacgtgcaaaacgtttttttggataaacttcaactcgtaatattttaaaacaaaatgatggagttattaagcaaaattacagaactaaactgtggaatgtaagaggttcttattttatgatcaaaacaacataataattgaacatcaatcatactgtttgtgaaaaaatctttagtttgttcatctcttgaagaataaatacattgcgagtaaaaacagagatgtggacgttttggaacgccatggttataaatatgaagaatttatgaattatgatgcttcagtgaatattcaaaccacttgatttgatcgatagaacttgaaaaatagaaaaataaaagtgggtgatttaaaggaagcataaccaatggagagaaaatgatagaactattcatcaaactgtcgaatttttgggttgatttgagagtgtgaattctaaaacaagaaaatgcgtgaaatattatgtctcccgaaaattctgaagtcttcaaaacattcaaaaaaaaaggtaaaacaaaaaaaaacaaaaacaaagcagttataagttctaacaatataaaaaagatgactagatttctattagatttcgacaaaaaaaaaaaaaaaaaaaaaagatttctattagattcataatttgtagtgttaagagattcgtctaaacagactaaatctaataacacatccactaacaaattcgcgtatgaccgtaggataatttgagccgaagcacatttgcttagtaaaaattgaatgaaccacaacctaatttatgtatttttaatgtcgttttcgtttgtagaaaaaataattttgacccccaaaaattatattctttatcaattgcaaatttcaactcaaaatgatacaaaacttccacacaaaaaaaatgttagttatttacttttccaccaaactattattgtgtttaaagtagaaacattatttagcttaaagttgaaactatttatactacccttgaaaagacaagaagaaatctactattccataaaaaccaataaaaaaattatctataaacaaatccgtgactgttgtggcggcagggatgctttccacgtgtacataaaccattggctacactatcccacttattaaaatctttatctcgccgttcctttcaccggccgattttaaaatccccctttaaatacggacctgataaatctctctttcactttcttcattttcgctctcaccatcgccggtaaaatctcgccggagaaaacaaaaagaatgtcagaagagttcgcacttcgagtagagcaaggtcttcagctcgcaagacgtatatactacggcaaaggcatcgctcctcctgtagtaccagatcctccttcttcaccggaaaactttcttccgacggcgattacggcttacgcttcaataacagatccggtggctgttgataaccccgacgttcctagctaccagccgtacgttcacgcacgatgcgatccttcagctctcgtgccgcttcagatgctcggaattgagatgaatatagattgttggctcgacacggcgtttgtcaccgtcaccggacggtggagagttcactgtgttaggcctagcaaacgctttgactgctgtgtcggtgttcctatgggtgagaaggtaatttcattacaacaaaacgacaaaaaaccttctttttccatcttttctctatctttccattaatagcattgtttcagatattgttttgggaaataattggaagacattgtgtaacagggctcatttctaggtgctgagattgatgttttgaacaatgagaaatcttaccagaccaaactagttacagaggatgaaacatctgactttgataacgttcataaagacaaagattcacgtttctttaagtctcatatctatactttcaagatcccacatgtttgttctttgtctcactttttatagttagttttctttggattttgttatgaataaatgctaaaatgttgttcataattacaggttgctggaggatcaatcttttcggttaatgtgacttggtctcagaaattgatttacaaagacggcaagtttcatctcaatgtgccttttagattcccttcttatgtgaatcctataggcaaggaaattattaaacgagaaaagattgtgttaaacatgaattcttgtgttagtggcggcgaaatagcttctagttttacaagccatccattaaaggtatgatttgtgttcacagtttttttttttctttttcaaactgttagtctgttactatggattatgtaatgtgtgaaattcattctcagattattcaccgtgtagcgggtgaattaagttgtgagtatgaagctgaagtaccatcttggtcaagggttgattttggtgtttcattcactgtgagggtttttgattatcttaagcatttttgtattcttcttcttgattcttagattgagctttgtttgcctttttacaggtttcctctggtgatctgtgtggtaatgtattggttaagtctccatctccatgggattcagatgacagaggaatattctgtttgtaccttttccctggaaccaccaagcatacgaaggtttgtttgcactacaactactatgaatcttctgcttaactgtgacatgatcaatgcaatgttgttattttgtctacagcttttcaaacgaagagttgtgtttgtgattgacataagtgcaagcatgaaatggaagccgctcgaggatgtgaagaaagctttgttagagtgtttggctaaactacaagctgaagatgttttcaacataatcgctttcaatgacgaaattctagaattctcaacttcaatggagtttgcaacagatgaaactatatccgctgtgactgaatggcttgatagtaatttaattgcaaatggtggaacaaacatgttacttcccctcaaacaggtacgttgtctagaatctcttatctttctggagacattagtctctgagactcttctctatgtgtggtttaggcaatgaaactacttgaaggaagcaatattggagttcctcttgtataccttgtcactgatggatctgttgaaaacgagagagagatatgtcatgctatgaaagaatcttgtagcagaaacggaaaatcgatttctcctaggatatctacctttggcattggtaagtaaaagaatactctgcttttacttgcttgcttctttcatataaatattcaaaattttgattagaaacaattccacaggttcgttttgcaaccattacttcttgcaaatgctagctcggatagggaatggttactatgacggcacaaacaacacaggtagattgtaatctcctttggtctatttgtttgattatcgctgatagtgttactaattcataatcaagaaactaaaaacatatttcttggctttgtattaacaatacacctagccagattcattcgagcatcagatgagtagactatttgagatagcttcttcaacgatcgtagccaatactacttttgatgctctcaaacttctccgatcagttgaggtaacttgacaagttcaataacatcaatttcttgagatttgtttcttgaacttgttcttgtctttgtgtcttttgcagctgtttccttgtcaggttccagacattactctcggtgatccgttgatcttgtctggaagatacaaaggagagttcccagatgaagttgaacttagaggcacactggctgatatgagctgtttcacaatagagttaacagtgcagaaggctaaagacattcctctagacaaggtttacttaattctgccttaaatgtaagaaatgcaacaaagctccttttgctaacattcaaaaaacaggttcttgcgaggagacaaatcaatgaactcactgctcgagcttggtttgaagacaagaaagagctgcaagaaaaggttgctgtaggggttgtgatttgacattgttggtcttttttcttcttcttacctaataacatctttttttttgcttaatcaggtcatgagattgagtatacaaacagggtttcctagcgaatacacgcaaatggtattatcagtcaaacacgacgaggaagagaagacgatggcaagaccagtttcaatcaaagagattctaaggaacccaccataccaaatccacaagcagatgcagaggagcaacagcatgagaaggagtttgcttgggaaacaagggtatgggttcgggaacgttgcagctactttaaagaacgtgccaccgtggatggaggagccgaaggaggtggaaggaactgaacttctgataagagcggcgtcaggagtggttgaccgcgtttgctgtatgtgttgcttgcagtgtatgtcaagggtgagtgatcagtgcaccattgtcttctctcagctctgtgcagcattggcttgtttccagtgtattggttgctgtttcgaagtctgtggctgtcttgcttgacctctagaactcaggacattgtcaaaataaaactaaggagaaaatgtaaattcattaatggattttactctcttgagacaaagttgaaaatattataattagtgtgtaaattagagttgtgatatacaccaagtttgaaaatacaagactaacgtagttgaatactaatatactactttatgaaatgagctgtatttgatttgaatataacaaaacttatcacaagatgatgaaattaattcttcttcgtgataaatattgtagatggagtctcggattagcttcttcagtacctaatttgtaataatcatgtttcattatatgaaccaaatatgcctcgtaacttgtagaaacgaataggactgagaatgatcggattattagcaatttcctttttgcaaggatgagtaaagaacgagttatttgcttatattttttcaactaaaatcatagaattatatatattttatatgaaaaattacaactaggcaattacttaacatagttttgtaaagcaaatgttgggaagaggataataatcggtgatcatatccaaattcaaattctgtgctcaggttcaaagaaagacgaccaaaaacaagtaccaataaaccaatagacagcaaacaaattcctgcattggtttcttatagtatctctagcaagattagattagcctgtaaaatatttgacttatagacaaagagatttcagatccaatgagaatatatattataaatgagaataggacagtaattctattggcaaaaggtcattgaagaagggagagttgagtagattgagaaaggaagcggaagagagaaaacattccataattggaaagaatttggctgattaatggaaaggttacaaaacacaaagagacctcgtcatgctcactccacgtgcctccccatttttctcccctttcttctctttttcttaatctcgatgtatctctctttctctcttcttaggttcttccattttccctcttattcttctctctaattaagtaataccctttttcacaacttgacgactattactaagacttttgccacagtaccaaaattcatattcttgcttatcattttcggctttatgaaatacaatattatttcaaagacatgtagaaaactgaaaacgttttatagtggccaaatgtgaaccacaacaactcctgtagattgtgaaactcgattcttcattaattctcaaaacatgtagaaagtcgtgtattcgtaattttccttttattttataacaattcttgttacaaacttactttttgtttcctacagccatttagtgttttgtattttggaaaaaaaaaaaatacttcctaaacgaatggcatgatgacgagctgcatgacgatcaattcatgagtaaagtacattagtactctttttttgctagattacagtacattagtactcttagtagtttgatcagttgcatttataaaattcagatgccttacacgtgttctgtttaagttcacaaagacatctcaaaaccttgctttttgttgttaatcacgattagcgaatgtttaaggcaacgtatcaaccatataaaccacacattcttttcaataatgactggttaagtggtccataatccatctcttgtccttattttcctccctttttataccaaccatttatgtatatcttaattacgctgaaagcatgcgtcttagagtcaagtcgccacgaacactctgatatattaatgcttaaaactaattaatctcgattttgccatagatactgttgataactaattcaatcaaaggagatcaacgaaaggaaggcgatagaagaagttaacgtaagaacaaagttccatggggaccaataagatatgcatgtttcctccaatgatgttagttcatttggtaacatgaatcgctattggactttcataactcccttagattatcttaattgatatattttatatgttgtataattgttttagaaccaacattaatggatgcatatactagaatgtatttattctaattatattaatatatcacacctatatatctaattatatatctatctatctataaatattataataataatatatttgattaacatacgttgttttttaaagtattttatacgtatagcttgtgcataaactatgatatgtacctagacggctagacccgttcagcaccgcgtccattcgaatttggactagacaatcgacccaccctatacataataatttgttggttcaaaaaatctcttggattttggtgcttaatttgctcaaaatagtactttggctacactggctagtgcatgtggaaactgatagtagccgttgaaagtcaacctgacccctttgggaaaaggattacaaacttagacccaccaaacctaacctttttaccttagaatacgtgtctttctcaccataattagtttgtttatctctagtaagaattggaactacaaaagtagtttatgtaattaacaaaaacaatgctcgtttgtttaagcaaagcgggggatgggaaaaatgacgtggagaatgtcgattggacctgagttcacgtgattgggagtggtgcggtgggctcaactctccgatgataaagcgaaactgctttttgttgctttccttttgtctcctttttttttcttccagttctctcaccctattttgttcctcatccttatttatgaattttaagataaaaaaatatatatttaagtaattaaaatgtcgattttttttataagttcatttgaattttttaggtttataagtaaaaatcaattggtcatgaatagattgatttaaaacgaaaagaaaagaaactaaaacgtattaacccttgtttaaatacctagttatatacaagcaaatcttcaaacgatattattaaagggatgatgcattagataaaacaaattactagcactctagcagtatcatcaatagtttatggtaataacccaaaccgttcaaccattaaaaaacgatattggtatatagatgtgcacaaacttggtcaacaaaagttcatgtagtcaattataaatcggggattagtataaattttcatacggctttgtattctatcgtggcaccgtggtgtgtaatgtaaagatgattagataagaaatgtgttacacgcccacaacatatgattcaattatttgatggaaaatatagataaaatgtatagagaaaaagtactagaagatgcgaaatccagaaggtaaggggacaatggcatgagttccttcgtgggatttgctttcttaatttcactctttctttctgtctctttccctcttagatttttctgaaattctctagaattttatattagctttagtgctttacataatttacatattatttagttcttttgtcaattagaattacttgtggatcaaactttaatgagcaaatatttctggtcaataaaacgcttcgcagtaagaggtcacaaattaaacccattttttcatatttatattttttgacgtttgatgtgtacggtaagttgaaacttgaaagctatattacaaacttgatttcccatattccttttcatgcatctactattactaacctagctagcaaataaaatgacatgtagcatattggttggtttataatgcatttgttgttactctcgagatttaaactcatatatacatttgttgacaaaaaagtaactttaaatagattttttagattagcgcttctaagttataactatacactgatttctagtgtaatttatgcattctagttctatatacttaatagtaacttttatacagtatttgtgtaagtagttttcaagtgaatttttttctcaacatatacaatgtatattacatataatttacgtgcaccttttaaaaatgaaaaattcgacgaaaatcacacacaacaaaatgtgtggaagcctctatatcttcgtgtcagcatagtaaccattcaaggacgatacaatttttctagggattcaatataatttccctctcctcttatagatagtcgaaaaatggtagaaaaaggaatatttgagactgtttgatgaaacgaagtgccaatatatgaattgtgatcaaagccgtgacgttatctccaatacaaaaactaatattcttattgtactccattaattaattgagctataatacaaattaaatacgtacagaagaatgtttctttgggcctcgatcgtttgcatggggataggtgcgttaatatgagtgctacgttgtgagctgtataaaagaagagtgtgggaataggttttatctgaacagaacttaaccaaaacccaaacaaattgaaagaaaaaaaaaacttttttccttcttccttgatcctttatctttttcgaagaagtgaatctggacgaagaactaaggccgccaattttggaatttgaaccatcaaattcatcaacaacaaaaaataaagatcttaatctttgaatttctacttgtatttaagcttcttgattcaccttaaacccgagttatttcatttctttttccacctctttctttgtcttcttcttcttcttcttccgggtcactaagacatgaaggttcgtttaatcactcatacgctctggttcattgatttctgatcacataatgtgttacattacttattcataaatgtttttttttcttttcagtttttcgggtggatgcagaacaagctacatgggaaacaagagattactcatagaccaagcatatcctctgcttcttctcgtaagttcaagattacgtattcgttgaaaacaaaaaatttgattaccaaaactgttgtccacagtccacttgagacatgtgcaaaattgcaaatatcattcctaacattcttctttccattgattggctctctgatatttttgttttttcctatttaaaacaagatcatccgagagaggagtttaacgattggcctcacggattactcgcgattggtacattcggtaacaaaaagcagacaccacaaacacttgatcaagaagtgattcaagaagagacagtgtctaacttacacgtggaaggtcgtcaagcacaagatacagatcaagagctttcttcctccgatgatctagaagaagatttcactcccgaagaagttgggaaactacagaaggagctgacgaaactcttgacgagaaggagtaagaaaaggaagtctgatgtgaatcgagaattagcgaatcttcctttggatagattcttgaattgtccttcgagtcttgaggtcgatagaagaatcagtaacgcgctttgtgatgagaaggaggaagacattgagcgtacaatcagtgttatcctagggagatgcaaagctatttctacagagagcaagaacaagacgaagaagaataaaagagatttgagcaaaacctctgtttctcatcttctcaagaagatgtttgtctgtacagaaggtttttctcccgttcctcgccctatcttgagagacacgtttcaagaaacaagaatggagaaggtactactactaaataaagttcacaaccacgattttgatatcaattattttttctatgtctctaaccatttacactgtatatacagttgctgagaatgatgctacacaagaaagttaacactcaagcttcatcaaagcaaacatcgacaaaaaaatacttgcaagacaagcaacagctctcgttgaagaacgaggaagaagaaggacgaagcagtaacgatggggggaaatgggtcaaaacagattctgattgtgagtttctgatctttggatttcttaaaaagattaaactagaaaaattaatacatcaactgattccatttgcttcttctttaatttgcagtcattgttcttgagatctgaatatatggtccacttttcctttttcatgttctttcaagaaaatacaggtaaaataattgacctgatcagtgaatctttgttatattagctttgctcatagtactgaatcttatactaaatattctatgttttggcagatagagaatcttcacaatatcaagacaatttctttttctctctgatgaaaagtttttgggtctctctatctatctgcagagagcccatgagtccctttttttgcatggttgggtccataaaaccaaaacatgttttgggaactaaacatcagacatcgtacatgagatatgtatatgcatacatacatgtgtgtatatgtaaagatagatatatatgcgtacatgtatgtagttttgtattttcaggtggataacctttggtttctagaattcctgtctctgtctctttttttttttaaaactcttttttgtatctttcatttttacatggttttgtttcttcatgtatcacagaagagaactattcagattaataaatacttttatcgtagccttgtaaattattgttatcaatttatcattttgtaatctttgataggaatatcactaaaaccaaataatatccgtaaattaatttagaaactatgagtgtaactatttaatatatagaagtaaaataaacactaaatgagaatataacatttaaaaaaaaaacaaatttatataaattaaagctataactattaactataaacccattcttcaaatataactattaactatatttggtactacgtacttcataaaatgaaagtaaaatccagttttgatggaccatatttcacaaagcaattattggacacacgaacgaaggcccatcctaaaatcgaaatatataaaagttttgttacttactaaagtgtaaccctctaattaggctagaggcttcacttggaacacatgaacatctggagaatgatcaaggagcaatctttaacagccgtccgatcaaaccgacccatttgacacatctcagctctcactgacttcttcttcagtcatcagctctctttctcctctctttcttcagatctctctgcaacgaattgggtttacaatgttgctccatcttcttcttctgctatgtctatcttcttctttgaaagttcaagcatcggtgcatgagtaccgaagcgagagattcgtgtctaaaggtaacgcctttgtcttccatggtggcagtgaaggcatctactcctcttctccctccgataacttcacttccgactccgattccgtttcctttatccggtaaatttagggttttcgtagctctctgttcccatttctttacttgaggttcaaagtttcttctttttaaatctacttaggaggatctgatttgtaatcacaattcatcaactgcaatgttagtcaactgtgtcattgttagttgaaagattgttactttacggcgttggatcttatagataaacacgtaatttcttctgttaaagtttcttaatccattaaaaactcggtgtttgtttgtgtaaatcttaatcccacggcgcaatgctattggcaggtttgagaagatcaagtttcagaggcctgaggaagtgtctaaccgatcctcgttatctatccatgccgtggttttcgaggtagaggaccgggaaaacattggaggatctgcttatggtgggcaaagagctgtgtgttgcacatctgatctggcaaaactcggtgtttgctcacacggagatgtcatttaccgtccttctgctaaagattctggttggccacaagtgtttggtgtctcgttggctgagaatgagttttctgttatactgcctacaagatcgatccaggtcactaggaccgggatgtacaacctctacttcattcattgtgattctgatctcaaggatttggttgttgaagggaagaccatttggaaaaaccctactggatatctacctggtagaatggctccattgatgtacttttacgggttcatgtcgcttgcttttgtgttgcttggcatcttctggttttctcagtgtgctagattctggagagaagtgcttccgttgcaaaattgcttaactctggtgataacattggggatgtgtgagatggcactttggtattttgattacgctgaattcaatgagactgggattaggccaaccgtgatcaccatctgggcagtcacgttcggttctatcaagcgtacgagtgctcgtattatcatcttgatggtttcaatgggctacggtgttgtgagacctacgctcgggggattcacatcaaaggttatcatgcttggggtcaccttctttattgcatctgaaattcttgagctgatggaaaatgtgggtgctgtcagtgatctctcagggaaagctcgactgtttttcgttcttcctgttgcaatattggatgcgttcttcatcatatggatattcaaatctctctctgctactttcaagaagcttcagaccagaaggttgttggtcaagttggatatatacagaaaattcacaaatgctttggctgtagacatattggtttccttaggttggatttgctacgaggtaatattatagcaaactgtttttaatctcaacagtgacagtgccagaaccattggattattctaagtcataagatctttactaaagcttttgattttggcagctttatttcaagtcgaaggatgtttacaacgaacattggcaaaacgcttggatcatcccagccttttggcaactgctatccttctcgctcctaattgttatctgctctctctgggctccatctcagaactcgactaggtaatgccgtctccaagaagaacattcgaaaatgcgatatgatatttgatgttcgtcagttgttatcaatagtcattgagcctagcacggcgtctaattgtttgtggcgttcttattttcggataggtacgcattctctggatcttctggagatacaagcgcagagtttgagaaggacgattacacgctaaccctcattaaaccatctccaattccttctcatgaagtcaagaacctctcagaaaccagacttttaccagctgatgaaggagaaccagaaaaagatttggaggaagacaaaagggagtaaagaagtgaagacaaaactcacaatcatgacttgataatcctttctctatatcaacacctttaaattttactacatgtattcttttaggtcacgtaagtttagttttgtacaatacaaaggtcaagagaccatatatcagcctttctctttggtgttgtagtgttagttggggttagtttgtgtggctatgtttttgtcacgatgtaatctttaaatttttcattttcctaagttgaattatagattaaagttttgtttcttgtaacatatgctttggtctatgacaagggtggagaaagccaaaaccaaaacgaaacacagcaaataagcgtacaaacggctttgagtctttgacattgacacaaaacaattttcatcatatgaacaaatgaacaagaaggatatataagctaagaatttggcaagtaaccaaacagatatattataagttcatacaacattacagctcatgaatctgaaaacttaaaattcaaagtactatcatcaatccttcgttctttcttgctcgatttttggctctcccgcaaagaacccgaatttgcgaaaagaattcaaagaatctgtctccgtaaaaaactctaaaacttcgaaagaaaaaaataaatactcatctctctctctctcactcggatcgtcttctcagatgctgagttgcagaatacccctcgaacaaatcaagaacctcggtctctagatcttcgactgagatcttgatgtaattctccggatgtttcccgctctctatatgactcctgaacctcccaagaaacgatctataagcgggactaagcttctccaatatcgaaatcttcaactcttccctcagctgagaatccggaaccaaccattgtgattgaaccctatgaacttcctcaaacaaagcattaaaagatttaaacctctctctcaacgcacttctcgaaacacctgatgagaaacttcctttcgtatgtaaaccttcatctcttaaacaatacaagactttaacccaagcagctctttggtaatacgtcgcagcttgcctaaacttacccgttagcttcctcaagtaaagatcaccaatcatttcccgtagctccggtgaccctttaatcttctgaacaatgtaatgtgcgttgttcatgataaagagatgtgataaagctgcgtttttatagtactttgatttgccttcgagattgaattgcaatatcactatgatccaaatcaaatgaagtgctaatggacctttgttattctctaactcagagaaatcgaaatctggagtgtttgaatccgttgcgtttctcgatggtttcgacatgatgagatcgatcaacgttggtctatactctgagatcaagcttatgtagttcatgacatacctcgtcaatggatgtatcgtacctccaggaacaggaactctagaaggttcacgaagaacggcgttttcgaattccgataatatccctctcgccgcttccgctaatctcgataatatctccgccgcttgaactctaatcgaatctgaagatttcagatcgaaaactgactcgatatcaggcaaaagctcaatcaaagcgtcgtgtagatcaaggatcttaaaaagcttctccggcgatctccgactgatactaatcgcctccgcgaagttaaaaagctgaatcgccggacctttgactgtttccatgaaacaagcttcgtggatattgacagctccaacgctttcaaaaacatgctcacagagcaatttctcgcttgcgaacacaactctcacacagatcttagctgctcggatccaacgacggatcttctgctcaagcgcttcccaatttagcctctgaacatctccgatgctgagtttctcgatccctaaccgtcggaaacttgaatcgacggcggatttgcgaacgcttccgtagacttgaatacattcacggagataaccggcggagaccattcgccgagcaatccagctcagatgaatcaccgattcgatcggaatcagctcgatctcgcgtatactactggtggatctactgtaactacctcttccggttggtaatcgaaccgtcgctgaaccggtacttgcacttgaaccggatcgtttcagaagatccgtttcttcttcctcttgttgatcatcttcttcgttaccattattactactacttccatcttcatcaacctcaaggtgagaagaagatgaagaagacagcattaacgaatcagagttgatcggagaactatgagaaacgagaatattcctgaactcgtcttcaagacgagccatagctatctggatagctgaattagctcgattctcaatctctccgccggaagatacatatttctggatttcatcgacggcgttgaggtaaaggttaacttcttgtggatcgttgaatatcatcttctctcttgcttcttctgacgccgtcgcgtcccatcggatgatgactttttcagctgaatcgaatccggaaactgaacagttctctccttctcctccgtcgccgccgtgagtttggtcatgtggttccattgtttcatgtgaataatagaaacacagagaaagaaacaaaaagtgtaaaacagagagagttcttctttcttatgatggagactggaaaataaaataaaaagcaacagtagaattttagatgctttttaaaaaaatattaattaaataaactaatacgtccaaaaatttaacagcttttaaccgccatgggaagcgcctttttcaagttaaatcgaacattttgatattaacgaactgtcaaaaatcattataaattacaaatgtaaatctatttgatttcttacatatatcaaaaaaaaaattgtgataacgttttccataatttaaataatactctctttgtttttaattaatccaatttttcaagttttcaaatatattttaaaaaaacaaatcgattataaatacattccttatattttataattaaaaatatcataacttgttcttaaatttaaaattcatcatcaataactaatgaaaatgcatagaatttttttcttgcagcaaaagttttctaaattttggattaataaggaatcaaagctgtagaattcattttgaaatttataattcattatttttgaaacttaaaatttatatttttgcaacatttttttcagaatctctatcataaaaaacagaagtaatacgatttatcataactatttacaaattaaatgttgggtaagtaacaatgtaatatttactattaatctaaagaggataaataaaatgtgttgtttaatagtaataagaatcatatgaagcaagtcaactattcgactgctgcaatgggccgacattcacgtgcttgcacccgatttcccatgcattaagcctttttaaaagattcacggtgaagtatgacaaaatttatttataactttacacaacaaaagagatactccaattattatttttcaagatttgttaacactatattaaattgctttttgcatgaattaatatcattcttttgctcttaggtgtgatacaatataattcaaataattatcgtttgtttgtcgagcaaataatatacttatgtgcatatattaatgttaagccgtataatttcttgagacaactaatacactttttgtttcatgaaattaccttgggaaactttattaattaattatcttatactaatgatatgggacagtctcgaaacatggaagtcaattttacatatagaagaaaaatattgttgcacgagtggtgctctgctggattgagccagtgagaatttcttaagacgttttaatccaattttaaaatacgaataggagttcaattcgatgacgtttttataaagataacaaaatggtcctattaaatagtaatgtgaacagctcatcttatgcaagacatttattgggtaagcaaatgtcattagatttgtcgatttaataatcatcacgaaattttatttattgcaactttatacccatatatataccttgatttgatgcttgagaaattcacccaagtcatatttgtttgtcctgattcaatgtgcattagatttctaattaatgccactaattataatattgtatcctacctattaatattagattaaaattgtcatattaacacaataatacaatatattcgtactcgtataatttttttgttcatagaatataagtgatgattaataatcaaaatgcagtgatgggtcttttgttgtctgctaacttaattctggccataatttaattaattctatgatagaaaataataataataataataatttcacgattcgttaatctacagctgtgtttagctgtcatacaattcaatttatcatttttcttcttcatcacgtacgacgtatacacaaacacgtgatataggcatattattggttcgtaattcgtaactttcattgataatataatcgataatggtgtgtgtttaataccaaaatttacaagttgtaataaaaacagcaaatcgctaatgatgtgtgtttgattaataccaaagtttactagtggtaatgaaaacagcaaaacagactgataactaatctatgcacaaaacgttacaacacacattttttgtttacaagtagccttaagttgacacattaatcatatacaaatttaaacagaaaaacaagaagtggcaaagtgaaaaaaaaacaaaaaaaaaatccaaaattggtgaatctgcatgaatctaacggttggaattgatcgacggtgaagctaagtttctatggtgataaagtcgtcgttagaatcttcaatagtcagttcatcaacgacttcagtcatattcggtctctgatctggatcttctctggtacatctcacaccgatccttaaaacgttctcaatttcctcctccataattttatcttcagcggcggcggttaccaccatcggatgaagcagatccatccaaccaccttgttccaatgcggagcctaaccactcaaccaaatttgccccaccggctctgttcaaaccagcgtattgagacgggaattttccggtcaagatctcaagtaccacgactccgaaactaaatacatcagatttcgcagagacggttccatcacgatccgcttctggagatttaaacgcgacgagagattgagattgagcgtcgggattgattagtttttgaagtccaaattcggagatgagtggctcgccgtcttccgcaagaaatatattgcttgattttaggtttccatgtggtaggtttagaaaccctaattctctatggagataccacattcccctagcgattccttgaatgattttgagtcgagaaggccaatctaattgaaattcttcgtggtctccgtgtaatcggtgaagcaaattcaaattaggaacaaattcgaacactagcaatttctcgtcttgtcggaaatggtaagctaggggcgttaatacgttcttgtgttgcaagcttcctagtttcctaatctccttgtcgaatacgtcaacactcacttgattcattaccgtcacacgtttcaccactaccgtgacaccgtttgaaagaaccgctttgtaggcagatcccacgcctccgctacttcttggacggttgcttccaccgccgggattaccaagcacgtgagccgccgctttcatcaagtctgataaacggaaaacacctttttccttgttcaccataactaggtctgatgtccccgccactcctttattcaattcgccggaccgactgctcctactctgccttgagctatttgatccctcaacagttacctgtctcaatcatatcaaaattttgtgtgattttataggtttaaaaactctcatttgaaaatgtgaaaattacgtgtagtggaagtaacctgaatttgttggtcgtcactattgtcttgttcagaggtacgacgtgccttcttcctccgtctcttctttttcttttttctgaaagctaaggagacaaggacgacgataagaagcactcctaatgtgctgaatgctagaaagtatttgctcttatttgcatctttcattgttccttctatcgttatggatgcagtcgaattttttggttgtgggcatggagtggatagcttggcaccgcaaaggccagaattccccgcaaaagtcttcgcgtcgaatttcaacaaaccgggaggtatttctccggttagttggttgtttgatagatcaacaatagctaaagtcgtttgtgtgaaattaggtatactcccgatgaattgattattttcgaggcgtaactcaatgagatttggcaatgtagttgccaatgagataggaatgagaccagagaaatggttgtttgacagccaagctttctttagcgacaccattgtttcgaaataatcagaaggaatgttaccagagaatcgatttcctgatatgtaaagcgacttcagagcggttaatctgttaaactcgggtatgtcaccagagaaagagttgttcattatgcttatggtgcgtaaagatggtaggtcttttaacggagcgacatcaacttttcctgatagacccatttgttcgatctggaggccaaagacagagtttttgttgcagagtaatccgatccatcgttggcttgctccacaaggttctgactctggtgtccaagaatcaagagacttggtgttgtttaaggacttcttgaatttcaataaagattctgattcggttatcgaattcgcagaaagtgctgttagagatagcacgattggccagattagccaagccacggccatttacttaaccggagctaggccgccgggagtttcaagcaactcttttttttttttgattaatcaaagtagttttttttttttttttggtgattcgatttactaatttttctgtattccttgtcttgtttctcgctttgtctctgttttctctgtcttttgtttttctttgtcatttgtgatccattggatgagaggaacttaggagcttatggcgcgaatgttcgttgaaagagtcaagaagattgagaaaagcaagagcgaataaaaaataagctaaagatatgcatttttggttggcccatatgaataatgttgattttagtttccaagcccaaacttggacaaagttgattatcgtttctataaataatttttaaaccgtagaagtgacttaattacaagtataagtgttgtaagaacaactatcaagtaaaagtgttgtaaaaccaactatcaaaactatattttttacgtgttacgtgtgaaaactattaagtgatactccaaattttgccatactacaagataacgcatgtaaataaattttatgggaaaaacaaatggttttggcattaggaccaagagcatataatcttaaaactcgtacaacatttggttcagttctagctaacgtgaccttttaagtggaccacttcatcatttggattttcctcctgatgcttagttatgtcggatttctaatttactcactatagcatgacaaaaaatgtatccctatgccgaaaaaagaaagaaatttgataaatgtaaaacaaattgacgccaccaaatgtaatcatcaatcagttttagcttttacagttcctaactatttccaaatatgagaatatcgaaagaatagttataagtttcttatgtatcatgagtaaaatactctaatactcaattactcatgatattatatgcaactaaacaaaatatttgtctaatctattaattttctgtagaccatgacatgtattctaatgatttgacttagtgtccttgttgtatttctatccggtttcaattatgcaattgttgaaaaaatgttattcctgttccgcatgtaatggatacttattaatatgcgataatctttaggcacatatgttattgtcatagtacaagaggagcatgtgaagaagctgcaacattttggtgttcacatccaaagtatctgtcggtgtcaaagaaccaatttgttttagtcattgttgtaaaacggacctacattcgtagtcgttacccctaaattttaaacaaattttatgtttagtattgtcatacgtcaatgcaaatgagttgtataatctttcaatattgtcttctaattttattttattttctgataagtaccattttatttatgaagataacgactgtacagagaattcccaccacaagctcaagctgcaagaccaaacttacccgaagacaacctgttacagagacacgctagctcgtaacactagatagaaaggaaatcttacccagctcaaagattaagtctgaagcacacctaacccaaaactgttgacaccatcttgattatgtccatatatgaacttaggtctcaaaacaacaactatttatttgataaatgttgatatactctattgcttaaaggagagtccaacttcgagtggtgaccggaaggtttcgccgttgccttttcttttttgccgttaacgttggtttggtagtcttagtagaatcttctcacaatcttgatttttgcatatcaaatctgttagaatatgacattcccttattttggacatgatcaaatatgtgatcgaaacccaacttgcgcttccaacaatgtagataatcttcatgtgaaatagcgaatattatttggtcttttgtatgtattagaaaatgacaatggatctatattgtgtaattaaatacacacatacatgtgtatatattagactcaagttgttgttcaactcttgaaatcatatgatattgaagagtcttcaaagttcaaagtattatgttctcattttgcaagttgcgataaataattcaataaaaatgattttttcccttggcgcgatcgtctacgacattttgttttaaattcttttttggtactctttggcattgcctcttattcaaataaaattcaacgctcgacttcattgaacaaaacgattaaaagattttattattattattgttatagaaataatatttaactgagcaagtaacaaaattcatattaggactaaacagaaatcgttaaccttttaccaacatacaaaaccacaaattctaatattaattacactcagtttttgtaattaaaaacagaaaagaaaattaggcctatgaagtatgaacgctataatatcctttagcaaagagggaaaaaaaacgcaaatcatgcatgaaataaggttggtaccgccaagattccgacacgtgttgacatcctaaacgcacataacaatacttcacgtgtccttaaactttgtcggggataagtaattgacaccattcatcgataaatatccactcacaagtcgtactgttgctaatggatcccacatattaaattcgtattagccatcgcagccgacgcgagacttaactccgtcagaactccgttagactatagcgtttgcaaatgccctcatttacgccctttaataacgaatatcctaaccaccactaaacgaattacctcagaagggtaaattagtatttaacagaaactcttgggacccgaatgaattaaatgggttaacgcctttatgtaatgtcgccgtcaacttacaacagtttcttcacggcttgtgcaatgaaaacgtgccggaacttgtaacgaacattgtagtttgatttttgtaatcaaccataggaataaatcattttttccgcatataatttatttccctatttctattcgtgacaaaacatttgaggatataggaaattaatagcctataatatgtttgaccataaaaagaatttcttcttcttgaaccatcataagaaaaatgtgtgtttagtctattgatcagttttgtgttcaaaaaaaaaaaaaaaatgtctatcgatcagttaggtgtaaaaaaaaaagttacaaaactcgtgacaaaaacattctatattggacacacatcactgtcacttcagactaaataaaaaaaaagaacacgttatttcgttttctttatttattcgggagaggttaaaagccacagaaacttattggctagaattggttatttataacaacaacacatgagcaaaaagctcaaaacatctacatactctttggaatcctcgattttttgtacgtgtaaagaagtcacacaagaaaatcttgggttgttgtaatcttcatcacactagtatgtcaacgggacaagcgccggagaagtccaatttttctcagagatgtagtctgctcagccggtacttgaaggagaagggaagttttgggaatattaatatggggttggctcgaaaatccgatcttgaactcgccggaaaattcgatctcaaaggtatttatttatttttccctatctattccgacggccgccgcctataaagaccaaagtttatatcatatacttttagtatcctgcttcgttgattattagcataaagtttaactatatattttttttgttgaaatgcaaaattttaaatcatttttttcttttcttttctttaaacttaagcatggtattattttggacagcttaagtatattaaagttagagattctgtgaagttttttaaaaaacgtaataaacatgtaatttgattttgataaattttaatcggtttgcaatttctgttctaatttgttttaggacaacaaaatgtgattaagaaggtagagacctcagaaactagaccgttcaagttgattcagaagttttctattggtgaggcctctacttctaccgaagacaaagccatatatattgatctcaggtactgtacacacaaacttcatatgtattcgaactcctaaagtgtttgttttcacattttgtagcaattgaattagagaaagaactaccggttatagatgtatggactatggagtttgactaattgtaaaaatgggtttgatttgattttagtgaaccggcaaaagtagcaccggagtctggaaattcacagttgaccatattctttggaggaaaagttatggttttcaacgagtttcctgaagacaaagctaaggagataatggaagtagctaaagaagcgaatcatgttgctgttgattctaagaacagtcagagtcacatgaatcttgacaaaagcaacgtggtgattcccgatcttaacgagccaacgagttccgggaacaatgaagatcaagaaactgggcagcaacatcaggttgtggaacgcattgcaagaagagcttctcttcatcgattctttgctaaacgaaaagacaggtaaactaaactccgaaactgttttgtgcttggttatgctttttctaggccgctcgtcaaaatgtatgcatagattaggatcaaagtttcttaaaaaagttatatgtaaaaatagctaataattaccatattaagacttattcgagttattctaggaatcccacatcggattagaagcgtattaccaatcaagtttaagttgaacattcatgaaattgaacatagggtggtcctagtatgtttatgaattatgattcctagagtaagatttcgagatgtgactcaagtgtcatcatttataaagaacatgtaaaaaatcttacaagttacaatgaaattcgagatgggacctagagtagtatataagagatatgagtccatcatctatgtgtccttgatctaggaaaattattagtaaaatgtcgagaaatttctagttaaaaaacactaactaagagttctttgtaaatcaaaacttcaatatctactttgtcttaaatgttgattaattgttttgatttcagggctgtggctagagctccatatcaagtgaaccaacacggtagtcatcttcctcccaagccagagatggttgctccatcgataaagtcaggccaatcgtcgcaacacattgcaactcctccaaaaccaaaggcccataaccatatgccgatggaggtggacaagaaagaaggacaatcttccaaaaaccttgaactcaagctttagggcgtataaaatgcacgatcgagttcacgtttctagttttcacttatttaggatttgaacccaaatacccttttatattttcttccattacttttgaccaatttaagttatttatagtactgtattacgtagctagtatttatatttcaaaacatacatattttgatacttgttttttagattctttaattaaaattgtcatctggattaccctttatcgaaattttttaatcacctgatataatctcaccagtgatggatttgcgttgttagtaatttttctaagtggcaaaagtatattaacctataataggtttcaaagatatacatataatgtttctatcaaagatattagtataatattttaccacatgatcgaaatctcaccagttatggatttgcattgaatgttctagcgattgggctggaccgtctcaggaacccaaccttaatgaaaaaacatcgtctcattgattttaggtcgttaagtctgttttgcccttgtcttatcccgtaattacgaaattagccttctaccatttcctctgtctgcttctctcttgccgttttctaaaaccctaaaaatttctgttgaaccccaaacattgaagtttatctttctttttcattgttcgatctcaaagcacagagattgcttaaacctaactgtctcagttcttttaaaaacagtcatctctcacaaaactctcttaaccctcttcatatgctttgagaaaaaatgtcaaagataaagcctttgagtaaatcatcgcaggacttgagtcttctcacatctgatatcgcatcattcgcttcttctattggcttagcttctgctcttccttcttcgggtttcaacgacactgatttccgaaaaccagctaaatccaaaacccagaaacggaaaaagcctaagaaggatcagcaacacaaggatgaagatgaagaaggagagccaaaatcgaacattgggaatgaaaagggaaaagattttggagcgaggaagcaaaacaaagatgcaccggtgaagcaaacgttacaaccgaagccaaagcctggattcttatcgattgatgatgagagtactgggtacaagaaaaaacgtttcgatgaattcaagagtttgcctaagttaccattggtgaaagcgagtttattgagctctgaatggtacaacgatgcagctgagtttgaggagaaggtgtttggtggccggaaagtggcggtggcgaataaggaggattttaagggtgtggtggagaagaagagagaattaggagagagattgatgtggcaatacgcagaggactttgcaacttcgaaaggaaaaggtggagatatgaagatggtgatttctgctcaaaagtctgggacagttgctgataaaatcactgcctttgagattatggttggagagaatcccattgcaaatatgagatctcttgatgccttattgggtatgtttctggttttgtttttcaatggtgaaatcctctgtagcattttgttgatgtcttgttcacattatctactctgttcattgcaggaatggtgacctcaaaggttggaaaaagatttgcatttaagggtcttaaggctctatcagaaattttgatcaggcacatttttcttactcacacaatgagctatggatttatgtgtcagtcttgcatctttttctcattgactgaggttttttaaattctttcttcaggttattacctgatcgcaagctgaagtcacttttacagcgacctttaaacatcattccggaaaataaggatggttactcgcttttgctgttttggtactgggaggattgcttgaaacagaggtaaagatctcaaatcatgccatgagggatgtgtttaatcacactatgtcaaagatctgtgtcttctatccgtaattgttctgggtcgatgattcgtttaacagcttagcatgctgactttgtaggtatgagcgcttcgtcacagcccttgatgaatcatctaaagatatgcttccagagctgaaggacaaggctttaaaggtatatatcctatcaccactctgctcgtgctagcttgtttagtagcactggtctccaggttttgtaagattcttgatgagctttaatattagagatttgagtatcatcaatgtaatccttctctggatgatgcataacggcatggtccgtagttttcttttagctacagtgagtttttttgcttggtaacgtgattcggatctttccttcagtaaattttttcttgtttggtttcagacaatatatttcatgttgacaagcaaatcagaacaagagcggaaattgctagtgtcattggtgaacaaggtattgtttgttgttcattcaaatatttgtatctaatttaaatttctcagttgtgatccctttaattgttccatggattactttatattatagttgggggatcctcaaaacaagagtgcatctaatgctgattatcatctgacaaatcttttggctgatcatcctaacatgaaggtacggctattcaaccttcctatgccagtttcagtatttcgtttattaattggttgtttggattcttctctttggctcatgtaatgttattttttttcaggctgtggttatagatgaagttgactcctttctcttccgaccccatcttgggttacgagcaaagtatcatgctgtatgtccattgttctctctaattatgttcacgagaaccatttttctttattttcttgctcttctttttaaactgattcacgcttattgtcgtctaaagtattgtctttgatttgaatgggaaacaattttactaagactttagaaaagaaaagaagcataaacttatccatgtttagctttctaaacaatgctcattaatctttgtaaatttcacaggttaactttttgagtcagatccgattgagccacaaaggagaggatccaaaggtggcaaaacgtctaattgatgtatattttgccctgtttaaggtaactggcattgaagtcaataaatttaacatttccttatgatcttcttaaaatttagtccctccacttccaccttactttcatgatctcagagacttctgctaccccttagtgttttcttttggggtggcgtttgtcataagtcataacatgaaatctttcactagttggatattcactacagaagtgtgtttgcattcttgtaggttttaactacagaagcaaataggaaacaaggtgcagatgacaaaggagccgctgataagaaaaaatccaacccaaaggacacaaagcaagaagtgtcaactgattcacctattgagttggattcaagaattctatcagctctactgacggttagtctggatgtgtttttttggtgtacatgatgtatgtaattttaaagtattgagacttcacagatcaacttatgctttagtactccgtaagtgcagggagttaacagagcttttccatatgtttccactgacgaggctgatgatataattgaatcccagacgccagtgcttttcaaactggtaaccatttaaagcttcattatagaagtttagtttcatagttacaaccgaaaattgatatagaaaatgggattttgaatatgtaggtacattcggcgaatttcaatgtaggagtccaatcactgatgcttcttgacaagatctcatccaagaataagattgttagtgacaggttttaccgtgcattgtactcgaaacttctactcccctccgcaatgaattcttccaaggcaagctaaactttgaaccttctgtttttccatgttccaatcacgtcattttattcttagtttatgtatgggttataataacccttacaatttggtagagcccggaattggtttatgaatgttggcataagtacattcatttatttataatcttgtgaaagcaacttatattgtgacaaaaacatcaagatgtctgcccctggcatgaaccatagcattttcttaatgaccgagtttactaagttgccgttcttaatttgcaggctgaaatgtttattgggcttcttctcagagccatgaaaaatgatataaatatcaagcgtgtggctgccttctccaaaagagtcttgcaggtcggtaacatgaatcatataaaccatcaaccccgtcgtttgtagctctagtttcattgacaatgatgacaatattcgcatcattgatcctatacaggaatcttgattcttttgttattaaattttcgatgtcgacacactgtatagtaaatttttttgtcatctctcaagtgtactctttaacgatttgagtaggttgcgcttcaacagccaccacagtatgcctgtggatgccttttcctattatctgaagtcttaaaatcaaggccacctctatggtaagctttttttcgttctgttaaccacatatccatggtttttagtttttttacccaatgatacaatgggtccttctatttacgttgcaggaagatggtggtccagagggaatcagttgaggaagaagaagatatagaacattttgaggatgtgatagagggagatgatgttgatcccaataagaaagcagagaatgacgagaatgttgttgaagttgatcatgatggtgtcgaaaagtcaagtagagatggtgattcttcttcagatgacgaagaggctttggcaatcaggctatctgatgaagaagatgataatgcttctgatgattctgaagagctaattagaaacgaaactccccagcttgaagaagtcatggaggtttctaatgatatggaaaaaagaagccaaccgccaatgagaccgagttctcttcctggaggatatgatcctcgtcatagagaaccttcttactggttagttaatctcatctttcatcaaaagcttaagtatactgcttttgtccccattaaacaagcgatacttggaacaacgataatattttaaaaactttcttgatattatagccttattggttggaactgaatccttgatctcaaattaacagtaacgcagaccgtgcaagttggtgggaattgggggttctttcaaaacatgctcacccctcggttgctacaatggctggaacccttctctcaggaacaaatattgtttacaacggaaacccgctgaacgatttatctctaactgctttcttggataaattcatggagaagaaaccaaagcaaaacacttggcatggtggttcccagattgaaccttccaagaaggtaaaaagctcatgcttcaactattaaagctttaaccatattgttatctacttttcccctgtaacgttttattttctcatctcatgttgcagcttgacatgtcaaaccgtgtgattggagctgaaattctctcattagcagaaggagatgtggctcctgaagatctagtcttccacaagttctatgtgaacaagatgaccagtacgaagcagtcaaagaaaaagaagaagaagaagctacctgaagaagaagctgctgaagaactttacgatgtgaatgatggagatggtggagaaaactacgatagtgatgttgaattcgaggctggtgatgagagtgacaatgaggagattgagaatatgctggatgatgttgatgataatgctgtggaagaagagggcggtgaatatgactatgatgatctagatggagtagccggcgaggatgatgaagagctcgtggctgatgtgagcgatgcagagatggacacagacatggacatggacctgattgatgatgaagatgataacaacgttgatgatgatggtactggtgatggtggtgatgatgatagtgatggtgatgatggtcgtagtaagaagaaaaagaaagagaaaagaaaacggaaatctccatttgcgagtcttgaagagtacaagcatttgatagaccaagacgagaaagaggattcgaagactaaaagaaaagcaacatcagagcccacaaagaagaagaaaaagaagaagtctaaagcatcagagtaagaagcaagacttgttgcttgctatgcaaggctccttatgttgagtattattattatactgtgtaacgctggagatagtcactccaattttgtggcgtttgttttgtatttctttcttcctaatgttttcatctttgaagagaataactgtacgattatgttttaatttaatcacttgaaactttgttcaaatatcacaaaaattgagtatttttaaaatcaaatattgaacttagtgatgtgaatgtgatggtattatggcaggcgtgagaatccaagttgatatagtggtaattgggtagttagtaaaatcatctttgatctttacttgagtgatatgattaagacatgcttagttcttatgtaaccttaaatcttacttttttttagggataaccgatcctttaaaatcgtattaaaaaaaaaaaacatttccaacctaaacccattatgaaaaaaatttctgaaatatgtccaaatccataaatggatcaggtcaaataaataaaaaacactagaccattatttctttttggtagaaacagtagaccattatttaaacacgaatataaaattatgtttgctttgaattttaaaatcaataaaaattcattaaccaataaatccttctaatatatcgataatatacattaggcaacaattttcaactactacgctaacaatttatagacagagatactttaagaaaacagtgactgtttagtgtttacctttatgctaatttcttttacaatatgaagtatataaatgtatgaaagacgtattatatagaagtcgaaaaaaataaaagtagattagttgcacaattgtcgcgcacttaacatgaacaacaccatcctaactggcttgtctctactttaattttggactctagcttgtttttaatacaactaatcgaaaatttctcttaaattaagtttctaacctttttagtaatatttaatctaatccaaaaaaatgaatttctaaaagtatcacaccttagaatattaagtaatacatgttgctacctttatataattaagttatagcataactcgatttatgctaatcattgcaatgattacgaatcggaagtaattagtattcctaaattcagattgcttgtttgtttcgtgtgatgccagtatgtatatgctgcatatatgcgcgtatcattttcctttcttcaaatcttcaaaaattctctaagatcttcactattcaaaaataaaatatttcactcttgatcaaattgtaggtctggtttgatgttttactagctacataagtacattaagataaagatagttatctaatgtttaatgatgagagagtactatattactattttatttcttttgctataaacaagtactatatgttcgaccatttataaaaaagaagtatctaaaaattccttaaatgattagcttaccatccacaactttttttgttcgataaaagacagacggtaaggtaaggtcttctccacctaatttctcggaaatgccaaactaactttatgaaaagaatgagcaatatttatgattatgcatttgcactagataaaaggactgtgtcttgtcgaaaagagcataatatgcttgtggttagtttttgcatccgtcaataaaacctaattaccgtgtaaattatatgagtttacgagtttaattttatagtatgctttttgaatgttcatatctaatttatgttcttaatatgaaatgaagaaaatcgaaggtaaatcgacagatgaagaccatacttgttttctatagtacatgataatatgaacgacaaaaaattagcattatcgggtaatattgaacaaaattgtggacaagatgtaatcgttatctaaaaaacatcgctctttgtccgatcattagacaacaacacgcaataagaggttgcctacacatctctactcaccgcacgtatatgtatatatctacaaattattatatactataagacatcataatatacaaaatacaatttaaaaaaaaattatacaacaaacatgaatgtttatcaagcaagcatttccaaaactggatttgtggtgtctgacatttatgtaggcaaaacaaaatgtcacaggtaagagaaatagtgtgtatatatagtatcaaatatatataaaaaggaaaaaaaattgtatcaaataatttaatagttttgttatgttaaattagataaaatgttatttattatgtattttttattgatatatatatatatatatatttagccaaataaattaatggtgtaatgatcacttgttatatctgttttttttaatagaacgtatttatcagttttttcgtagaccgtatcattccctcatccatctatcataattttacaatatttttcttatcagcaagtgtaatttgtaacatgaaaataaatgaatgaatatggcaaaatttattacaaaattaaaattattacgaatctcaatatataattacaagatacaacaaaaaagaaagaaaaaacaatgggcaaaaaacgatactagttttgccatttatgtcctcatctctcttagctgttatgcatcaatcggtgggtcatgcacctatacgttctctctctatctcactcaatatatatacacgaaccttcctcgttatttcctcccaagaacatctctcaaacattcctctcttcttcttccaatattttgatccccacacacactcacatcaacacatataaatctcctcgtaaaccctaaaccctagctagtttcaacaactctcttgttccaaccccaagaaaaaagttcaatttcgttagcaatggccaaagttgggaagctgacaaagcttaagtcggctatgaagaaatggccttctttcgccaagaaccaccaccactcaacctcctcagccgctgtttccgacgaactctcagaagacaacaatctccatgtggtttacgttggtcaaactcgaagaccttacatgcttagaccagacatcatctctcacccactctttcaagaactcgtggatcggtcttcttctagatccatcgaacaagatcgtgagattgttgtagcttgtgaagtcgttttgttcgagcacttgctgtggatgctcaagtctggtcaagaaggaggatccgttgaagaattggctgagttctatacttattgacatcgaccgattgattttatacatttatttcgtataatatataccttttttgttgttgtttgttgttgctgatttgtattttcattcgatgcggtgtgtgatcaaaacgtgatctcgtaaaccatgtcatttgcttccgtttttctgagcaattttatgatgatgatgagcatatgtagttttcttactttgttaagaccaaccaagaataaatttctactaacaacaatctttatatatattttccttcaaaatgtatttcagtacctatattaattgtaatatacataaaaaaagaatgcaatgatttcaagaaaacaaactaagttttctggtaggttttgtttctatatttattttattatggcggttttgtaaacttttgtttctattttcgtaacgtatctttctcatatgagtcatgagtctcatgacataataaagaaggcctttgatgatgttcgataaacaaaagttggttgaatatgatgagtccaattcatttattttgctttatataaacaaaatatgactagcaatgatttctatcatcgatattcatttttttttttttttgcgtatcatttgtatggtgtcagtttcaaatctatttttgtgtgtgtataaaatagaaaatacgtatgcaatttcttttaaggaaataataatggtcgctctcatgacgcgttggtgacctggtcccaatttcatgtccctactctcctttctagttgcagacattatatatttatcttttaatattcttgaactttcagccatacaaaataaattaaagcttacaggttaattagtcgatatactaataaatttgtagtttgttgtactaattggcattacttacaccaacatatgtgcattaatatacgtttatagacataaattggtagataaaataactgacattaattttccgaggtgggtacgaaaaggacgcgcagaataattattgaagataagtataattagtaagaccaaaataaattaatttcctacgtaggacgaagttctaatcattataatcaaagaaaagaagtttctttgctaagtttaattaagcttgttaattgattccgacacgctaatgattgacaagtcactcggtgtgtcttttcagcaaacttcatgggacttcttcttctacttctgtcttgttccttacattacatcaatcctatgatattatagtgtttatataaactcggttggtagctaaattgttatgggttgctgcttgttttaacgttgattatagaagaaattaataattacatttgattcgaactcaggttagttactagaagaaattgtaacgaccaaaagacagtgttgggccttagtgggccgtgcaaagagatgggagttatgaaacgacaccgtttagttttaacttagtgtcaaacactctaacctgaacagaaggtctcaacaataagagggggactagcaagaagactctcaagggaaggacaacttcatgaaagctcaggtgaagtgaaaccaaactcatcctttgtcttgacgatttgatttctcttgtttttgtttgtgcaattccctatggattcttctttggtcgttggtcttttttgtttttgtctgtgggtcgatgtgattttatcaattcttgtctttcaagtgtttgttgaaatgcctcaatgggaaaatgtaaggtttttcagggaatccattaatgggttctgctcaacccaaggattcaagtaaccctataacttcagctccgaatagggctgcagtaaaattgcttaagtctctcttcattgggttatgcgttgtgctagagtttccaaagagatgatctttcatttctcttttgcaacctcttgttatcaatctatgggatattaaggttattctccattttcattccggaaagaaattaaccagttagtgttgttcccattgatccagcaacttcagaactatgtcacggtttagatcattgtggcaagcctcggtgaatgcaacaaagaagggtatttctccattttcttcaattaccatgttcaacactttcttgtaacttagtgaatttcttgctataggtgtgctatacttattcttgtttgtaatcataatcaagtgcgtttgattggaaagtaacgattttgtttcaagactaatctctatggggatgaaattttctcacctttctactttgcatactttttagctagtctctaacatattttcacaatgtacatactgtatatagctctaacgtgggaactcgaagaatgggtaccccctgtagagaagtgtatattcaagttcaattcaaaagaagaccttaagacatggcacctatactctgattctgaatatggaggtacttaaatcacacaagttcaggcatctgcccataatcatgttacagaacctattattgcctgtttacatagtttcttttactttcattccttgttggttcatgttatgaaataatatttctgatatgcagtgcataacaattcttcatgtgatatgctcattatagtgtggatattttactttataggattatcttcggcttcgttggaaattaaagatggaggaaatcgatcagattgcaatggttagtatattgtggaacaagtgtgccttgctttttctttctgttactttttcgcttgggtctgatacaattagtttgtgcaagccagattttcgaattaggctgggaaagttaggccatcgatgcttctttgacttaaatatactgtgatgattttctcatatctagaggcatagaaacgttattgagcatgctctaacgtctaagccaataaattataaaatgatttctcttgaaatttctggaactacagttttcctggtttagctgtttaggctctcttaatcgagcctcaggcgaaagtatgaagtttcttgcttctcataccatttacctctcttcatcatgtttttttctgcaattgggtggtgaccgttttcaccttatgtctcctttaggtgttttctctgggaacctctctacggatatgagggaaggttcaaaatggaatatcaatcggagtggtttctgtggaatgcggtcaaagaaggttaaaatcataggttttgtttttctttactaatcatcacatcatcaatcaaaaccaaagatttgcatgagtttatgcacaacttacttaactaaaaccccctcccatttttgtagtttgatggctttattgatctcgaagggtatgattccatagccctgaggctcaaaggagatggaaggtgctatatttctactgtgagtctcatgctcaacattcatgtctttttgctccagatgaaacacaaggttcaaggagcataacttttttactaaaaactaaaccgcagttccaattcagatatatactgagaactgggtgaactcgccaggacaagcagaagacaactcatggcaggcttttgtttttgctccaaagggaaactggtatacagctaaggcaagtctcgtacttctacaaagcaactagtgttaaaaggggttttgctgtaacttgttaactcaagtgtgacatctttcttcttcaggttcctcttactcgctacttaccaacatggaaaggaaacgtgatagatgcagaaatggagatgaatccaggtcatgttgttggtatgtctctatccgttaacgcacaaggaggtggtttcattggagctaaatcaggcgcaggcgatttccaagtcgaaattgactggatcaaagcagtgaggatgccatgaacgatgatgaaaaaagctttctgatgaacaaattgagaaccataaaaaagattgttgttctctgggtttaattgtaaaaccgggatttgggttaaccggatccaagttgatgaacaaaaacgcttatgaattgacttaaagcaagttgatggacagcaacttgaaaagaaaaatgggccagaatggcaagttgctcaatttatttaccttaaagtgaccataaagtaaaattatctaattcttgaaaaggtaatattacaagttttttgcttttgaaaaaaaagttttcaagataataaccttattaagtttcgttatacaaatcctttatttgaatttcagcaagactaggttataaaattctgctaaagtagaagcacatataaaaatatgtaaattctatggaaattgacataaatagctctaaaattctacaacgttcctacattatatatcaaaaatgtctatgctgacaaaacaagaagaatgcatccagactattacaaaataaatttgatgctctagagtcgttgctcaaatatttattttttgtattcctgccaaactattttttttcttctaaaacatgagtactcgatcggattttgctatactcgactaattttagggtttagtagatttgttacatatacattttgtaacctacatagaaatcaaatgaccaaaattacaaaaaaattcacggttttgatcttaccagtatacggatcattatttttactcagtaaaaaaataattgataaatgatttcttaacctttttctagaaaagtgagtttaatcttccattcatttaagtcttaaaaagctaaaacatttacaaataaaagatgtagccttgttcaaaattggttgcgtatactcacaattcataaactagaaagaaaaaaaacactaaaattaaagtagtaaaataatacactacttttagttttaaaagatgttgtctaaaaaacgaggataaacataaacaactagttcaagtggctagtttctcgatcattctttgttaccccagtctcgtatatataaatagtattatatacaatacaaaagcacgatacccaaaatatcaaactcttcttcttttcccttctcttctcttcttctcttcttccacgtttacgcgtatacacatctctatacatacattaatcttgatccttctttatctctttgcttccaataaactccaaagaacagctctttctttttctcattcttactatcatcattaatggagagagaagacttgtacgctgtcttggatttgaacaacgaatgtacacaaggagatctcagactttcttacaagaaccttgttctggttcgttttcacatctcttctcttcttcttctttttttgtctgaatgtgatctgatcttcttgaataattttgtgtgtttttttttgtatgtttggtggtgtagaaatggcatccagatcggtttcttgaagaaatagagaaagatgaagctaagatgaaatttcagtccattcaacgagcctattctggtaaaatttacacggttttcttttaaaccgggtctggttctttatccgtcttctccagtttattaatctattgtattcacaacagttttgtcggattccaacaagaggcttttgtatgacgtcggtgcttatgatagtgatgacgacgaaactgtatgttcttcttgtagatatttctcttttaattgagtcagaaatgttgatttatttaatcaccgatatgtctaaatcaatgtcaacttattgcgttgtagggaatggctgatttcataaatgagatggtgacgcttatggctcaaactcaatctacggtaacaaactactttgcttcatctatactagtcattactattatatatgattatgctaatggtaatggtaattgcatatcttggagcagggggacgaaagtttagaggaatttgaagagttatttcaagaattgttgaaggatgatgtgaatcaattcaaaactcgttcatcttcgtcttcatgttcgcaatttagtggcacgtcgactttggtccattgcgatgatttatcaaattcaaatgatattcccaacaaaattaacggtcatgacaactattgttgtataagttctagtaaggtatttagttttatactctttctgcttgattttttttccttttcttataacttctttgtggttctatatatgtatataacaaaaataaacttttgaaatgaaaatgtatgttgtagaatttaattcagaattatcatgaaaccgatgttgaccattgatgttttaataaaaggtaggtggtccatcgacgagattccaagctggcaatagaagatctaagaagtagagcttaaaaagtttttaacattttttgtattttttttttttgtggaacttcatgttgtaaaagttgtcgtggtgaagaaaatatggtggtatgtactattttgtatacaatgtgatcaaacgtctaggtcatttgaatctcatttttgagttatgcacattcttgttaaagtacaaatgcacacaaaaaattagaatattgatattgtatcttccaaataatatatttactattcatatttgacatgatgatcaaatgaaacttcacaaattctcgtatttgattcagttttacataaatatttaatactccacaaatatcaaatgaaactccacaaattctagtatatatatattcctctgtcgtgcaaaaataggatattttggaaacgctgggaagtaggagtagccgagtaggaccaaagagacaaagctagtcacaagttgtcatattttttagttcgtgaagtccaaatcaccactattttcgcagacctgcgacttcgagacttttcttcctttttttaatatatatatatatatatatatatttcctttgacaaaatataatattgttaacttatacaaaataaaataaaatcatgttatccactacatttacttgatatggtaaacaaaattagaagttggatgaaatcagaaataaatgtgtatgtatcaccaagttgataataattagtggcctttacaccgaatctggtccattacttttttttctaatttgacatatagtaggtttctccaacttgtataaacgccgcttattttcaatttaattcgtaattaaacaaatatgttcagtatataattatgataacatttttctatcattcttttctgattctgttttttcttaaactattaaagcattaattatgctgggaattagtgatacacatatatacagaaaaaaaaaatccgtggaagaaaaaataaataaattacgttcttcgttatgaacattttttgtgtgcgaccgaaaagaaaaaacatttttgtagattaagaaaaatataggctaaattgagggcgggaggtctaatatgtccaatctaaagtgggccgttaaggcccattagtgtttctcatgttttatcttcttaaattctttattgctcaatggctgctgattaccggttcgaatcgtacggaatctagttttagttaagaagatgtgctgatctaattactctatgatcaaaatcataaaattggagccaacaaaaatatcataccaaacacatgacgtggccatgtggaattgttggcaaccccaaaacatccaaacattggtttgttgcaaaactaatcagataattaatgagattaggtacagtatttcatatacatttaaggacatttaatgaaaattaatgctacattagaatgttagggttgtttgattggtgaaaattacaattgccagcaattatgttactgtaaaattgccattcacattttcacccaattgatcaataaaacttttcatcgtcattcttttttttttccatttgaaaatctgttttttttttctgtgttggatgtaattttttttctttgaaatatttttattacaaatatttaaccgtaataaaataaaatacagtctactatttttagaacgtttattgcaaagttctaaaattgctaataaagtcttccaagtgaaaaatattttaccgttgaaattatgtttatttattactactagctagagagcctaggcttcgaccaatttttagttacgatattaccctcatcgttataggctttattaggaaagtaaaccggtgttgttaaaaggttttgagggtattatggtaaaacgtagtactgcggctgtatcttttttttctttcctaatcgaagacgacattcgtcggaaaagaagttgtctgaataaggaaactctctctctctctaaacagtctccgcatattttctctctctaaagactctgtcttttttactacggagagagagagagagagagagagtgtgcgtgtgctggtttcgagcgtggatattaagggacagagcaaaatcttctttggtgggagaaataaagaaagattttgcattttgagcaaaaccagtagtgaagtgacaacattaactcctgacattgttagggtttcatcttcttttctctctttctcaacctctcttgccgattgagaacttggattaagtttggaaatactgagaattggaaagttcccagctcaatgctggatcggcaacaggaggatcttggtatgttctttatggattttgcatgattttgagttctgagctttggttttttttttccggattatattaaagttgggatttttatggttgggtctttacttagagtagtggaatcagatctgagaagcatcgtgttccgatgaattagatcctcgatttctatgtctggccatttatatggttcatgacctgtttttgtcttccttttcatttcccgagattctttgtttctcatcaaagttatattccgtgattgtcctacttatttcgtgagaatgactctggtttcattcatcttttgctttcaacattgttagcaagttggcttttttttttgtaatctctgagtaacagtttctattattgttttctcaggtttcttggcattaatttgagtttgttcagttgaattctgttaatctcagtgatacttctgctggttggttagcattagcaatctggtcttgtgagaatgaggtcagatacggttcttgactacgtggtattcgaattatcgccaaagcattcaaagtgagtatatgttccacttcaagatttcatgatttctagtttgttctgtataaacaagtgtgtgtttttcctttgatagatgcgaattgtttgtatcaagcaatgaacagacagagaagctagcttcagggttgattcaaccctttgtgaatcatttaaaagttcttgaagcaaaagcgtcgcctgttgctcaatcctctattagattggaggtggagaaaagcaacacttggttcactaaaagaacattagagaggtttataacaaagaattcaatatcattttggtttcttttcacatagccttttttcgatatagtaatagtttcttccaccatttgtcctttcagatttgttcaatttgttaatagtccagaaactctcgaaaaggtcaatacatattattccgagatgttgcagttggaagcagctcgaacattatattcgcaggttgtaaccactattttgaaacttgacttctaattgtgattcttgaccgatcgatctttcctaaagttttgttgtcatttttttggttcttaaagcggagtgaagactcaaagtttggtgcatcaggtgtgtttgattttactgttgttactttgctcgtacattgatctttaacatcaatttgaatcctatttccttccgtttcagatgatggagctgcagcagatgccacaaagtaaagcttctctgcgtttatgtttgttctgtgtttaaagagttttatattgattactttttcttctctatattcaggaaggagctcttaaaggctatagacttaagacttgaagctattaaaaaggacttgacaacgtccatttctcatgcatcagctagcggtttcgaccctcatactgtttccgaactcaaacaatttgctgatagatttagtgcacatcatttggagtaagccttttattgttttgctacttttcatttgatgaaacctatctttcatgctttgttgtttgattgaattggaatggttccatcagtgaagcatgcagtaaatatatctcactatggaagcaaaggccagacttgatcgacatgaagtactcgaatcagttggctggtgttgacaatgtcagcctccaaaaagatagcacgcgccagaagcaaaatgcggtaaacgaatcagaacatcaaattcaacagtgtgctactacaagtaccaaaaggaatgaagaggagaaaactgatgacagtttggatgtaacctcttctacagttaagactacccaacacacaagacgactcagtgtgcaggataggattaacctctttgaaaacaaacagaaggaaaactcaccctctgggggaagcaaacctgtagctgttactaaatccacagagctgaggagactctcctcagatgtttcttcctctgagaaacctatcctgagaagaagcagtattgtgagtgacatgagcactgatttggcatcagaaaagaagttggagagtttcccggaggatccgtcttcgacttcttcgtctcttcctcataccatagctcaacctaatttcaatgaaagcgttaaaaaggacgatgaagtcaaatatgagctgaagagtgactccgaaaaagttggtgatgaagaagcttctcgagacagagttgagagttccaaaactgtcactgaaacgaggttggtgtcaggagttgaagcaacgtcttatgttcagtccagatcagtcattgatccgaatgtgtcttctgcttcacaaaaccagactgagagacatgtcgataggctacagaatgtcatgagtgatgctaaatccagacagagagaggagggttatgaacacaaagccaacaatgtatcacaatcatcagccatgtttccttctcgccatacacgatctcagtcagctcatatagaagctagttttaaggaggatgtggcttctcaaccgcagtctagatactcttttggcaggatcaagaagaaagaagtggttccatcagacgaacaaccggtgttacctcagaaaccacaatttaatgtgagggatggtcctgacgatggggagggcaggcaggttagagctaacagtagtaggtttccacctgcatcggtagatcaaatacagaggacaagactgtcaaaggaaaatccgggggctaatgatgagttgaaattgaaggcgaatgagcttgaaaagctttttgctgagcatcaactccgggttccaggggatcaatcaagttcctccagacgtggtaagtcgagtgaaaaccaagttgcacacaaagagccatctcattctatagcagctacagaaaaaagactttctcttggtggcggttctgctgatttctcaaagcttatgactcccttagttggtgacaaagacaaaggggatgcattgcgacggaatttatcggaccttagtcttacggatgattctaaaggaaagttttatgagaagtatatgaagaaaagggatgccaaactgagagaagaatggagtttgaaaaaaggtgagaaggaaacaaaactgaagtctatgcaagaggctcttgagcaaagtagaaccgagatgaaagctaagctctctgcttcgtcttctgagagaaaagatttgctttcaagtactcgtcagcgtgcagagaaattcaggtcttttaactctcggtcaagtatgaaaaagtaccaggtaacttagcattagatccattagaaatgttccgattgctaagacttgttattgatgatactgtctttttggcacatcctataaactcatttcagagcgaagaagatgaagatatctctgaacagaaacctcgggcaaaagataaagcagccagtggacaacaatctgttggcagcatttcttctcggagctcccaagctagaaagcttcaacccaacaggaacatgtcttcttctattactccgcggagtgcagcatcggttccaaaaccatcaggtaaagtttcaaacacctcttctgggaggcgaagatcagacaagtcgctcgcacaatctgttccaaatttttctgaacttataaaggaaaacacgaaaccatcttctttagctgtcaaaactactatgcgatcacaggtgaaaagtagtggtcgcaccaagaatatcaaggaagatacacttctccaaagacctcgatcattaaggaaaagctcctctgggaacatagactttacggaactctccactctctgctctgatgatatgatggtctctctaagagtggactctgatatatccgagactctgagaaatgaagaatatgatgaacctgaagctgaaccagaagaagtcttggagaatgctgttagagaagaagaggaagtggaagaattggaaacattggtgtttgaggatggaaatccaatgctaagcgaagcttatgagaaagttgatcattcaggagaagagaattgtagtttcttacccgctactgtgcctacgacattgcttgcctcgttaatggactcacctggagaaagtcctctttcttggaatgcaaacctgcaacactcattcagctatcctcacgagcactcgtcagatgttgatgcttctgtggattctcccacgggaagccctgcttcgtggagttctcggatgagaaagaaatggggaacggctcaaactcctgttaccgttgctgctgctaataatatgtctcagtatcagtcaaagaaggatttaagtaaagggtttaaacggttgctaaagtttggaagaaaaagccgcggagcggaaagcttgatgatggattgggtatctgtaacgacttctgaaggagatgatgaggttgaagataggagagactttgcggatagatcatcagaggatttaagaaagtcgagaatgggatctctacaaaatcatctctctgaggatggattcaatgagagtgagttccctgaacaaggtaatactaatagtattgctttcttcctctctaagtttaatgctatcgcgagttcttacatatttagttgatattgtctttcttcttcaagcttctaacaccgagctgaaagatgatcatcaaatgtctggaagcaactttaaaggtcaaaaacttgttttttttttcttttcatgcatattactcatgcagaatgcaagattctccatcattcttccttgaaatgagtcgtattatttcttcttttacagcgcaaaagtcattcttctcgctctccacattccgcggcaaaggaaatgattcgaagccaagatagagagcaaacaaagaaagaagaaacttggatgtggatcaagttgcgtgagtaaagagagaaaagagacagattctatcgcagactcaggcagacttcaaagacggtattttttcccgatgaactggctggtaacttcttcgatggtgtgtgtacattttgtttagtgaacaagaattgattaatccgattttctgtaactacattgtgattttggcaattttgaaaaatcctatttgtttttggccttcctttacaaatatattgatgcacattcacaaatattcaagagcatctggctgggcaacgaaatctttctttatttcccccacaaatcatatagctgaaattgtagtgtgcatatcaaattttagttcccatgtttacaaggtagcagtggcaaatcacaacaattgaacaaaacagatatattaattattaagcttaaaataaatctccaaatagccttgaagcagacagtggttatatcaacaacctaatgatagtggcacttaatttcactagcagagcacaacagattctttactttttctctacaggctttggtcatgaatctaaatttaatttcaaaagcttaatgtacaagcaaaacttaagacggtaaactaaaaactctttctatgcttgtccctaatgtagataacaactcatgttgtgaagcaaagggttcctgaagataaataatgtctacccaaaatcatagttttcctgatcaagaattattaccagcagagttgtttttgggaccttgaagctccattggagaattagtgatgctaccaacagaacccattgtctgagagctaagctgtggactcgctggacaaccctcgaggttgcttgtgctcatgggatgcattgcacccgagcttatctgaggactcataggagttctttggttcacttgctggggactcattggagttctctgactcatttgctggggactggactgttgtagctgctgttgggtaattccagctgatggtgaccctacttggggtggtgatagtacagactgaagaggggatgctgttgcctgctgctgctgctgtgcttgttgaggctgttcatgttgttgtagctgctgctgctgctgcggagactgagctagctgctgagatggctgagacataggctgctgtaactgttgctgatgctgcaactgttgttgttggggttgctgctggagttgctgctgctgttgttgttgattcatgtaaagattcatcattccaggcatcagcttgggtgggcccatgttacccatagcagcagctcgctgcagattagctctgttctgatccaacatggaaagaccagctgagctggggtgcatctgcctagtacctgacacgccacttatcccggtttgaggagcacccattacacctcctcggtttgccatgcccatcctaatctgtgtaaacagagcgttttgttgtggtgttaatgcaccagatcggagttgctggcttatagcattcaaatttgatgctggattcagattcattgggttctggcccatattaccgatgccaggaacagacattgacgatgagattccggttccccccatacctcttcctgccatattcaattggttgcctaaagctccaagcccagcaatactatttcccatgcttcccatacccatacccatgcccatacccatacccatgcctacacctgatcctagccccatcattatcttcttctgcactgccgcctgctgctgctgctgtaacatctgcagttggagaggcgaatacttgttggccatctgaccacccggctgcataccagagctctggctcatcgagttgatggctgatagtggatttgtaggcagtatcatggaaggtctctgcatttgtggatgctgttgctgtgtaaacattgactgttgatttttctgctgtgaatgtgatgacagtagcgctgactgttgtgggtcaagctgttgtggttgcataggcatggagacaccagacagcagtccttgagacatttgcaaggcttgagaatttgttggaggaaccatccttgcatttgcaagaatattctgggttgagttattcggcgtatttccagtattcccatgttttgatgcctcaccagacgcttgccctgcaactgcatctccatactgttgcatatcgtttgcagaataacctcttggataaccacccgcagaatttggatggctgctgattgggccagtatccccacggtttggctttgccataatatgttcttcaatcatgtatccttcacgggccatctgcataagcatataaatcaatctttaagtagctttaccatagaaccaggaacatgaaataattgattcagaactcgagaaataccagtgatttaaattgagtagcaagtagatcggcgatgtgctgtgacaaagtgaggaataagcaagtcagcatagcttccagaaaataagtggcgtacataagagaaaaattaataatccattgtccattcccttttgatcgcattggacaagaaggataaacgagcataagcaactaacaagagagaagtatccatagaccaaccaaccatattcataattacacaaaacattcacaacagagacataaaccccaagaacatgacccgacaacctataaacatcactaaatgtaaaatcaacattacattgaatggtagtgcatgcaagttgaagatatattgctgatcaaaaaagaatgcaggggagtatgataactatcaaatttcctgtgaacttactgtattgggcaacgctaagagaaaatcttcagcctgaaaaacatccccttcatctacgtccccttgataccatgctactgtcccatcgacggccttctctgacatcaccagtcttgttcggtttctagggatgaaggaagggaccgaacctgaaaagatactggagtctggtcaatcacataaagaaatataccaatagccagatatctagttaaaagaaaaacagaccttgcattacacgttccatctgaccaaagtgaatgactctggtcttgtatgtattcatactgccaccaaatatagattttgataatgcttcgtcctcgtctttgaagacctcttcgttagacaggtttgataaacaaacagtaaggggctgtttagcatacacgcgaggtcttcgagagtactcatccaccttatgctttttgcagtttagttggtacctaaaaatggaacaagaaactggatcaaccaaaaaataaaatctatgaaatatagaacttgttcatgcaccaacaaacattatttatttatataaatgcaatgatataaggagaataagacaatgccagcaatgctctagcgtaaagccagaatcaaaacaggagaagtatcacataagtgaaagtaaagatcataaaaaagaatttgaagggaataaaatcaacaaaccaggtttcataacattcatacctagcagcaactcgttcaatctttgaaaatctgtccaagattgcgtgatcgcccaaagtttggggtcccactgaagggctccttgcattaactgggacactaatagtattgacactaacaggagaaccaacagtgctaataacttgcgtcttaggaagagaatttgttctccgttttgcagccatttgggcttggtgttgcctttgctgcatagcttcattagcactagaacccactgactgagtagcaccaatagcaggaatagaagtaacagccttgtccttctgagctgctgcaactgctccatagtgggtccccattgaaccaccagaaaactcaccagacttcgatgaaagtggggactgcggtggaccacctgccgacaaacgaggactttgagccgatatcctacgactaaattgttcttcttttttcggctctttttcaatctgctggccaggattaacattccaggatgtttgagggaaatttgatctaatgaatgcattatggggcatccttgactgaatacgtggatctaaatcatttgcatcacttcccacccccggaatattgtttctggtgccgccatcaattttaccagtctcaaatggctcctcttttgaagtgtatttcattcccccctgttgtgaagctggaaattgcatgggaccaccttcctgattcataaccccttccatttggtgtggtgaaaacctctgaatacttgtatttggatactgaatacttctgcctagcatgtcttggtgttgtagaagcgtatttttccaatttgtatcggatccatgaaggccatccatacgttgccctaactgttgctgcggaaccccatcaggacccatatgtgaaacccttgttcgcttattcaagccaggcatagaagacatttgtccttcttgactttctctctttctatgaaaagatgtaccagggttcatactatcagagccataaggcagcatcgcatctagtccaccaggcgaagcgccagagacactgacagaatttgatccttgatcctgcgtgtttcttgtacttccaattcccatgtacctttgttgctgaggtggtaccaaggccagagaggaatttggtgcatcttgcaacggctgacttcttaatcccgccagcatattagtaccaaggttttgaatagcctggttgttattggtttgctgcattatcaaatgccctggcaaatttcctcgctctgaactttcaggaagccgatcaatgcacacctttttcccctgaatcttattctgagacatgactgtcacttctgccatttgccttaatctctttctccgcaaagtagaaagcgacaaatcgagctatcgagtagagaaaaaaaaacattttagacactataataaacaactgagaacagaaagcacaaggagtctttttaatgagatattaccttagcagtcaaaggatttttactcagcctatcaagtctgggtaaaggatccagacagagttcaggttgtaaggcttttaatatcctggactccacttcctgcagttgatgtaaggatcagtacagaagataatagtttcagtgctcagatatacgacctataagccacgagctaccatgattaccatgagatcaccgtacgtccatgagttgtctgacattgatggaatatcttttaccacattctcgagtgacatcttaaggcgcaatttatttatcacaggagagacttgagatgaggtatgtttccgatagtcatgcacctacaatagtatgtgccaaaaattaaagaaaacatgatgatgtaagatggtacacagcagtcaattaaaaattagtataactaggttttttatgtttacttctggtcccagttactccattatgtttcagaaacaatcaaatacatgtacaattgagtttggaagataaacttccatgtacttataattacgacatttttttaatcttgattaagtgtagataatttctgttgagctctttttaaatatatttatatacgtttggactgtttccaagaacttatggaaggctttatcccaaaaaataattgcagataactcacctcacatataaccaccccatccacaaatttgcaaggtatatcttccaaaatgtccccaggaagcctgccagcctcaatagcctataaagcgtacaaagggattaaaaacatttactcagtagaatgaaactcagaaagtgtatttaacaaaacgcgagtaagtagtgcagtgaaatgcattattcgggtagaacaagtggggaaaaaaaacatcatcttcacatttactaaatctaagtactttgaattcattcaccaaaactttgattacatgttcaaatcaagtctataataacatagttcgaaagatttaccgaaaggagaccctctgctgccctatcatacggatgtaagacctttggaacatctcgaaacgatatctgttgcatagcctggtattcaaaaactcaaatttgtgaaaacgtgaaggttttaaaactcaaatacaagaaatcacaagataaataaattcatatagactctcagtacatacctcagaggtttttcctatagagtacccatttggatagaggctcaatatgaaggaaacttcatgatctgcagagaaaccaaaatgcactcaattcaacatagctagaatttagcaaaacattatgtgtcaaagtggttcgttgagatccaaacctggagatatatcgggtaaagatggcttcgaaaacccggaaacatcgccaatattgctatcatcagtggcctgaaccaaacgtaataaattttctatataactttccaaaataagcgaatttagttggaacacaatacaactaaaattctaagttaaattacctttggtttcccagatagaacgattgcttttggggaatcaggagtagccaattcagtagaaatcttaggtcgaaactttctaccaaccttcgatatcttaaacgagacacccatggattctctccagagagatgaagctcaaacctgtctaggtactgtcaataaacgatacagaaataaaaaagacacgagaattgaagaaatcgaagaatgaattttaagaaagctagagaaattgaaaccttatgagcttgttacagagaagatcatcaaacaattggatcggatagaaagcgagagaaatcaaaggtgactaagaatagagcaatgaagaattcataaacatggaatttgtgaaacacaggtgggaaatttttgaagaagatgcgatcggaagagaaaggaagagagattattgttagggttcttcttctaacttcaaagtagcagaaaaagaaattatcttttgtgtctctgtgcacacttggatttcggtttaagacaaaacggaagttgaaccagttattaattttggttagcttcgattaaaatttgggtaaccgagtttgggggtagaatagacattttgcaaattagggttttgcttgatatataaaatccttcacccttataagcctttcgtcgcctcttcgtgtgatttactgagtgaaaaaagcttatcgcggcgattagttcccggcgaagaagaagaagagagataagaaaatggcgactaatggatctgctagctcagcgcagctctctcagaaggaagctgatgtcaggatgatgtgtgccgctgaggttcatcttggaaccaagaattgcaattaccagatggagcgttacgtcttcaagagacgcaacgatggtaatttctcgtatattttttgataaactatctgtatgtatgtatgttgatggttatagtgttgagattctgtgttgatatttcggatttgtataaatgttgatgatctgtttatttggtttatgctgctttgttttagatggtttttggatttataggttgttttattgtatcgagagtagattttactcacgacggatctaaatatgtcgctgactgagaaaagataaaatgttgcaactagccgtttttgtcagcacgctcacttctctgcgttcgtatctaagaaaaggcttttgtttctgtgtcttctctagtgttcttgtttacagaaatgtatgaacaaatgatcaaaggctcaagtttcatttctatctctctctgtgtgtttgtaaaaaaaaaaaaattgagattttagttttgactgatgtttgagattgtatttgtgctagtgtgtgttattgttgctcttttattgtaatttacaattgtaagtggtgagtatggaacttagtttttgaagttttcgtcattctcaggtatttacatcttcaaccttggcaaaacatgggaaaagctccagatggctgctagagttattgttgccattgagaacccacaggacatcatcgtccagtcagctaggccctatggacagagagctgtgttgaagtttgctcagtacactggagccaatgccattgctggaagacacactcctggtaccttcaccaatcagatgcagacatccttcagtgaaccaaggctgttgattcttactgacccaagaactgaccaccaggtaaactcttcatatgattcatatactagtgattgattaatgatttttgttattgataaatgtcttgtgtgtgttgcagcctatcaaggaaggtgctttgggaaacattccaatcattgctttctgtgacacagactctccaatgagatttgttgacattggtatcccagccaacaacaagggaaagcacagcattgggtgccttttctggcttctggctcgcatggtccttcagatgcgtggaaccattgctgctggacagaagtgggatgtcatggtaagaatatcattcttggagctcttagattagaaaggcatctgttcattaaaaactttccctgtttattgactgaatttttcatatggtatggtgttgtgcaggttgacctgttcttttacagggaacctgaggagactaagccagaggatgaagatgaagctggccctcaggcagaatatggtgcacttcctgctccagaatatggaatggtaggtggagaccaatggaccaccgctcagatccctgatgctgcatggccaggagaaggtcaggcaccaatctctgctgcacctgctgctgcttcttggagtgattccgctggtgagtttttgataaccatttgaaccctattctaacagatcttgattctaatgttatgtttattttgctgttctagctgcaccggcagatggtggatgggaagctgccgcgccaccctcaggggcaccagctgctggttgggagtaaagttgatagcctttactcaatggtttaatggttatagacatgcttttttgttacttttgggattgaagagttatcgaaccgtaactgttttttcttctcacttgtttctcttaagacccttagatgttttgcacctttttgtttgaatcgaatctatattttgcgtttatcacaaatatgaatcgagctttgttcttcccaaacattattctctacattcttacaacttaaaatatcgcaatcttcaaaacaatagtcgtagtggccgtttttgtttgacactggctaaggtttgaagaataaatagcaaacagacaagtcgaagaagaactcatttaaaacactcatgtcatttgtacaatagaaccgttcaggaccatagacccatgtcattgcctccatcaaagagactactcagagacgttgaggaatcacagtttccctccgtaaaaggcatctgcgagaaatattcggtctggttctcaaaagcaagaagctcttcagaaagcagagaagcatcaacgttgttggcttcttcactatcattaggttcatgtttcttattcgcatcgcccatgatgatatcttcgagccattgtgtatcaatcagaagcgtgtccggattattctcctcccacaagaaatcaagacagctactactaggcgctgagcttaccaccgccacatcaagatcagcctcatgattctcctctacctgttgcacagtcttagccttggctttcctctttccagaggattcgttagggaaattgagcttagctttggctccacggattctcttagcttcaagatcataagctcttgcagcttcttcagctgtgttgaaagtcccgagccaaactcgaactcctttgattggatcacgtatctcagccgcccatcttccccaaggccttcttctgattcctttgtaccgactgctctgtttcttcttcccatctgatgctgagcctagccatggataaagttcaaagctttgagacatagaaccaaacgatgaacatacaaaacatcagaaaacagaatcgtaactcacctgaagcatgatgtttgtgagtagaggagaagacaaatggctcatcggactctaattcatcgaaatttccatcgaaatcgtagattgagcagtcaaagacgccattacttctccaggaagactttccagatgatctcgcaatcttctccggcgctatgtaatcggaaattacagctcctccgcacattttctcagaactaaagggttcaaagtataagttttaaaagttttgggctaaaaagtaaaatttctcaattttaaaggtgtctctgtgtttttgttctttcatttttgcctgagcacactcttatacgcagagcgacaaggcgtgttcttcggaacgacaattgggccaagtgggctttgttaattttaccattttatcctcatcataggttaatccctttttaaatgatttcgccactgtctgtaatgatctgcatttagctgagtttatgaacttaatatattcgatcttatcgctttacttgggggttaatccattcttatctttaatcatatcttacattaagtgaatcgtatatttgagttttaatgaccatgattcttatatctacccagtttactgcgtcatactagtcgttttggatttttggcataagataaataaaaataaaaacctatacctatagtaatggttggcttattcacctttcaagagtcaataaatcgacatgggttttaacttttaaccaatgtgtttagtcgtcacggtgattagttaaaacctttatggaacaactttaatgaaaaaactataccaacagctggttttgctacaacttgatatatacactagattttaacccgcggtatatcgcgggaataatttattttttaaagttagtatatataaaagtttataaattgtatttatctataaaataattttattttatagtttacaaatgttattaagtaacgtccttccaaacccgtcctgtaaaaataaacccatttattttattaatgttgatcttatttatgatatgtttatgaatcattgtctaaatattttgtaattttgtagtaattaaatgctatcagattatatctctgcgctttgatgattataatcgaattgttatagtcatggagaaaagcaatatcaaaaatgataattttgtagtaattaaatgatattaaatattttagaagtattattttagtaaataatcgtgtagttaatgtggagagattttgggaagattgttaaatgtcaaatatttaattcgaagattttctttttaattatcaaaaacaaacattaaaatccagtgacaaccattgtaaataaatctcaactacaggatttatttaacaaaatggctgcaaaaatgtatatatagatttaacaaaaattaattaatttgtaatagtagttgttatcctacctttaggggtatagcttttaatttgaaaccataagcagtctctaatactgactaatgaacccgtggttttctccactaaccatttttcaaatctaaactaatctatcaaccttactttgaacctttgtggagtggttaattaattaaagactaattgatatattaaatggaaaagaataaaataattttaaaggaattaaatattcgcaatggccacgaggaacctttcatgtggcaactatactttgtaatttcaactatactaaggccagtgttttctttgacaataacattaacatccatatgctcatatgcatatatatatatttgatttgatcatatattattcgtatatgagacccacatatattagcatcatcattagtttttttttatattttatatataacaaaaatgtaaaatagagaggagtaagcatcttgtttgtccaaaaagaaaagaaaggagtaagtatatctcgtaaatctttgaaataatgtcacgaaacttagattaaaaaaagttaatgttgattgtttatggaatcattccaaatatcatgttaacttattgagacgcgcatttaataccacaattagcatatattatgatgagacaataattccttatatggttcaaaactatgaatataaatataattcggaatatttctcccaaagaacccttgtaatctctcacaaaaatctcttgttcttcttgtcttcaatatggaggatggggaagcttcaacaatcactttcttaccaaccacggaaccaaaacccctacaaaaccctaacttgctggccaaaccaaaaaaagagactaaacaaaaaaaacctaaaaccaccaaaggtcgacagaagatagagatcaaggagatcatgctggagacccgaaggcaagtgacgttttccaaacgacgatccgggcttttcaaaaaagcggcagaattaagcgttctctgcggcgcacagattggtatcataacgttttcacgttgcgataggatctactcgtttggtaacgtgaactcactcatcgataaatacttgcgtaaggctccggtgatgctgaggtcacatcccggtggtaacgtggcaaacggagaggaagataacgacggtttgatgtggtgggagagagcggtggagagtgtgccggaggagcatatggaagagtacaagaatgccttgagtgtgttaagggagaatttgttgacgaggatctaccagatgagtggtgatcggacggttgagaatcttccggcatttccaaatgagatggctatggctgactggaaattaacgaatgaaaatctgatggctaggaacgatcgaggttatggaggtaacaatggtgatttggagtttgcgtttatgcctcaaaacggtagacagtgaggtgttttttctttaatttattattacagtttggtgttattacatatagattataggttgatctaaactatttttttaattcgtttacctaaattaactaatgctttcaagtttaagattgaaaaaaaaaaattgtattccgaaattgaaattcatatttcccttttcttaactgtggagttagcttattaataatactggttttattttatgagcttgtgtttttgtctttcttgtttattttcttgaaactgttaggatattttctccaacagtttctttttatataaaaatgatgtaatattttccccaaccattggctacacttgaggaggttagcttgtctacgaattgtcaatggtcgtaataatgagggcttgaggatcggaatctggtcatggtgatgttgatcctttagaggttcttattagaactatattccacacacaattcgaaatcaaatcatgtcacaaaaattggaaccacgaggactgaggattaggtatgttgtacatgtttatagtctctaggcaaaagagtaataaatggctacttcaatagataagattgtttaaagttaacggtgttgataccaggatcggaaactggttaccggagaactgggccaactggcggaaactgatctaaatcggaagacgaagcagaaaaactacctcaatatttaagataaaaacatgaactttgaagatcttaaaaggctcaaaattggaagttttcacttctgaagcaaaagtagtataaatagttagttattaattaggagttgaaattagagatagagttgaataagctcatcgctaactacagagggagagagaacaccaaggtcagtgaagaggagtgttaggtactgaggcggagtatagtctcgagctgacctctctacttccacctttgtcggaatctttacaccaaattcgattggtctcaacgccggtgccatgtccttttggtctaatgggtaaagcctagcgaactgcaaatacacaactttgtatcattaaccactctcttactatgggatcttataaaaccgtttcaattaccttgtaactctcagcagcaacatagaccggtttgttcatgctgtgtgccacaagtgcgatttggtatgttcccatcatgttgataataccgccactttctacaactccatccgccccgacaaacaccatgtctacctcgtccatactatacgccacagctgaatcaagcagtagtttcactgggatatcgagcttcgatagctcactcgataacagaactcctgttccatccggcctcccctctatcattttttcaccaaaaaaagttagcgagaggctactaatacaacaaaatcataaagagacagggtttataaggtcaagactatgcaacaaaaatgtctcagagaaaccaagaaacattaagcggatacaactcaagttccaatctaagcttgttgtttaagcgaacctgtgcagagaactcgaaagagcttgttgttttgtgcagcagtcttaagtatttccagaacaactctagagagtccatgaaccaatatggtacaaccatcgaatataaaatcttgactaagcattgcgataatcctacgagcctgcgcaataaccaaacctttataaaccctcttctatcaaatactaattgatctacttcattgatatatgtacaaaaactactaaatatgagccagaagccataaaaggaagtaccttgcaagatatttccccaaatttctcagcacgttcaagaagacgagacttagctgaattgaaatcttcatattccaaagcagacgttctcgtaacgtatctgataaacaaatcgcatccagctgtcaaagagatcgacgttttgtcccacgactgccaaaatttgaacatttcttaaatcaacaaagcccacaaaatcgaagaatgaacagaaagtgaaaaatgaattctcaccttgagtgtatcagaagcctttttgagctcaatttcaagctccatcatggtgctcgcttcgctcgcacgaataacagcagccaaagctcgtatagccgcgacggcttcagccagatccggttgttttctccagttattgaactcttcaattacattaaacgacttctcgttcccgagatcagttacggataagtcatgctgggcatcgcctgagacgccgccaacggcggcttgagcttgggctagccagtcgcttgtaatgacaccgtgatgcgccgcgcgagtttggtaataagcggagatggaatcagggttttgaaaaggacctcgtgttgtatccgccattggaggtgaattcgagcttcgtcgctcgtcgagaataaacgacggtgatcttctccacattgatttttttttttcttgagaaaattcttcaaaatggaaaaattgaagataatatactgtcgctttctccagaaatatcatatgaaaaataaatataaggcccattaataatataaggcccatttataagcccaataaatttactaattttcatatcttcatatgacatgccatggaatggaagtacaaaatattctaaaattaaattagctgatcacaattgcctgatcaaattcaaaacacaagttttcttttttttaataactcaaactgatcacacttttcttcaaaagggtctttaagttcatcttcatggtcaggtccttttagttgcggaactcgtccatgaagctcttgtggaactctgtcagacgattcactatcgctggaatcttgtcttcttgtggaagtattgtgcatctaaagtgccatgttccaggaacctaaaccacaatgaatccaaaacccattattcaagttcgatccttttgtaagacatttaaagttatgaagatttggttatattttacctgtccaaagccagaaccagggactacaactacaccagtagcattgagaaggcgtttgcagtagaacgcatctggtgcagttttttcagcctcagcagcttcgatagccttttgaggaaggttaattcgcgggaagagatacattgctccttcggctctgttacatgtaacaccttctaaactgttgagagcgtcttccaaagtctgcaagttcattttcaagcttgtgacattatatacaaagagactgaaaaatgtcgttagagggtattgtaatcttcgactaacctttgcacgtttagccatggatgagagaattccatctctttctgccatgtatgagtcatatgagtcatcaccaggctgatcaaatacaatattagactttttagtcataatctgttgcaagaacttagcgaaaaccgattagagagaactagggtgttaccttgggtgggctcatgacaaggctagcaagaatttgaccagagatgttagaacaaagattcacagaagccattttgtatatctgttctcttacatcagaagtgaatccagtaacctccatgtaacctcctctttttccacattctccataatatcctatcaacagaagaatattaaaaacaaaaaccccattttttagatgacaagcattggacagtaaaagttgttcttttacctttggagactgattggaacgagactaacgagatatctttttctccatagcccaaagaccgagccactttcttgaaagaatggaactttttgtcagggacgtaaacattttcttggtagacttcatcagctaaaagaaccaaaccctcttgcttgcagaaattaacaatgtcacgctggttttcttccgcaagaacctaaccagaataagaacgcaagattagaagaatgttacattttgttaggctagtcttgaaaatctgtttgtacctgcccagttgggttaccggggtttatgacaaccaaggcccttacagagatgcccttggacctagcttcctctagttgcttcttaaggtcagatatttccagtccccatcctgttgcttcatcaagatagtacggaacctaagaagtacaaatttcaaaaacttgtaccaaaaaacaacattactccatgatgattatatgaacataccaaagatccaccatgaagggcaattgaagccgagtacaatggatactgaggaatcggggaaagaataccatctttctctgagctcaagagaagttgcatcatcatgtgaacctatagagtaaaaaacaccaaaaacacttagcatgaatcctttaaaagaacttactctaactctatgagataacgttttcgttttgattgttaccgctggacttgcaccatcagtcaagaaaatatcatttggatcagcagggaaaccatcacgtgcttcgattccagctgcaattacatcacgtaaacccttgataccctgaggcagaacaaaaaatgaaacattcagcaacataagaaccatctcaagaaagggtttaggacttttaactagactctaataacaaacctggctatgactgtaagccccagttgctcttccgggaatatggtccaaaatcctccatgctcggtcaattgaatcggtactgatagcagagtagaaatcaaatgttaagcaatcttaaaccgtgagcatacatgtcctaaagctgaaatatagcaaggaaaacctcacctgaacaaaccatgggtttcagactcatccaaaagacttgcgtggtcacacaatgcgagaacctgaggcatatagatgatagacgttatatctctgtggctgatatgacaaccaaactagtaccaaaaacattcacttacctcacggaagaactttataggcagctgaccaagagattgaggattcccaatgttgcaatagattatctgccaaaagtaatgaagaattctaagttccttgcacaaagagtttgagaacaggtaacatcaacactaaactaatcataaatccgtcaaaactgccgataaagaaagagattttacctcatcaaagggataagcatccttattagtcttcaagtcttcttgtaacttctgtaagatggaagcaaaaagcaaacaaaaatcaattagcattaaaaacaattttacagattttgttcttggttttacaagacaaagcacatgcatctctgacctgagcaatgttgacaatttctcctcgaacagcatactcacatttcagaacctgttccccggaaaagaaaaaaaactcttagttaacaataaaaccaacttctctgtaatataaagtacaaagaagttatgcaaagcttgtcgatttcatcgttgggaatcacaacgagaagcaaaggataaacctttggcgttaaatcagacaaccacagtaaaaaattgaaacttttttactaaattagaaacaaatccagatcaaccctgaaacccacaattcaaaaacgcaataaaccagctagagaattagaaaccgaccttgggattgatggagtcaagagtaacgggaagagaagaagtggaatcagaagcagacatctccgaagtagaagagaagaaacgagacagagcaggaggagaagaagcaaggggacgaggttgaggagagagaaagcttggacttttgtggtgatgttgacgacgagaatggtcgacgagacctttagcttggttaatcaagaatctccgcatctgtgaatcagctttatactaggaacgtgctctttaagccctaggattgaaaattctctcacgaggaaacaagggtcccaatatccagtgccttgcacaccgaattttgccttgtcctccacgctcagaaattgctttttcgttttttcttttcgaaaatctaattgatgaagatatttgtaggggttttttttaggcggctaattttgttgatttatctgttaaacacacgactaatcccaaaaaaagacatgtcttttatcaaaaaaagatgtctgaagtctatcttccgttgacttaattatccaaaaggaccaaaattgaataatccaatcacagtcgtaatctaatttggggataaatagatacttataaaacctacagctaatttgaaagttataaatttttagaaatctctaaatttaaataaatcacaacaacatgtagcagcacattgctaacgatgaggttttttttgggctacataattgggccctaaaaaggtcggtaaaatcgtgatttaaagcccattatttgtttatatccacgtcaacaaaacgatatcgtattaggttggacgagaataaaaccctaggaattagaaaatttgtacaacgtcaaaacatcgaagattttgatccaacgtataccaagagtttcggagacgacgtcgttttgtctctgcgccgcgttcttagtctgagctcacgcttgttcgtttctcctctaacgtcaactgtgtttttgcatcctcaaaggtttgtgatacaccttattgtttctgttcttttgtacaagcttcacatggattagtgtaaagtcttagaattgggactcggaatttattgttatgttttaggttattcaacccagttatggtatcgttttgaagtagaggtagaaaccctaatttttggggtctgtaaatttggagaaaaaattgaacctttcccttttttgttatattgtgtaatttgggactaatagttcttcgaagctgagtttttttgtgtgtaaattttgtagggtttaacatagttggggctaggaattttcatggtttctgttggttctaaatcattgccatctaggaggcacaggaccattgaggaagatagcttgatgggtgaacgaggaaagtctagtaacaatcacagtgaaaggaataagggaatgcgtaggaaggaccataagggtaaccgtggatttgatgtagatagcagcaagaagaaccaatccggtggtgcccccaatgtaaagccagcatcaaagaaacactccgaattcgaacatcagaatcaatttgtcaggtaaaggagatttttaaccaagggcctttgctctaatttatagtcgaaattttgttgttgtgagaagtggtagtgatttgggtgtatctttttcaggaaagagattgatccagagacttcaaagtatttctctgagattgccaatctctttgatagtaatgaagttgaattagaggaacgttcagtaatatgtggaaatgcccttgaagaaacaagagggagggagtatgaaattgctacagactatatcataagtcatgtcttgcaaactctacttgagggatgtgaacttgaccaactctgcagtttcatacgaaattctgctagtgtgttcccagccattgcaatggatagatctggttctcatgtcgcagagtctgctctcaaatccttggccacacatctagaaaatccagacgcctattctgttattgaggaggctttgcattctatatgcaaggtactttatacaatttttactggctttgacaatcatattaaggtatccagattattgcttctagtctagtaattgacctcaattttgatggtgaaatatttcccctggtcaggtgattgtggataatcctcttgatatgatgtgcaactgctatggttcgcatgtactacgaaggcttctttgtctttgcaaaggagtctctttagattcccctgagctttatggcgcaaaatcatcaaaagctctggccaaacgtttgaatctgaagatgtctcagctagatgacaataatttagaaatccctcatcaagggtttccaggtatgctcacgtaccttttatctgggctattaagttgtagcagagaggacatgaagtatcttcaagtcgatcagtatagcagtttggtcttacaggtaggttttatgtccctgtctaatcgtttatgtcattttcaagcaatttctttagtattgactgttatttagtctctctccctgattcacggtgattctaactaatcttctcttgacagacggctctcagactaatgctgaaacaagatgagcagttgcttgaaatcattccgcttattctgcgctgcaactctactaataaaaaagtagaagggtttcatatagagactaatgttgccaaagaaattttagagtcgatgaaggataattcattcagtcatctggtggaggtaactgagtctaacctctggctgctctgactgagttgtttataccaagattctgtaccttgcataaaacaattgatgatggacgtattgcctgctttagaccatgcaaaatattatctataaggattgctagttctctgtttgattccatgctgtaattggagtgttaattttcttagtcatctctttaaatgcgtttgcatgccattttcaggttattttggaagtggcccctgaaagtttgtataacgaaatgttcaacaaagttttcaagaattctttatttgagctttcagttgatcggtgtgcaaattttgttattcaagcattaatctcccatgcaagagaccaagagcaggtatctttatcatacacttcatctttttctgtgacatcaaaatttcattccaggtcttcttaacttcgaatttatttgtgctatttccgtgaagccagtaaacttacgttcaattgattttgtttacaagatgggtattatgtgggaagaattagctccaagattcaaggatcttcttgagcaagggaagtcaggtgttgtggcttctctgatagcagttagccaaaggcttcaaagtcatgaaaataaggtttctatgttttctaaatttagatgaaaatttatttcttttctagtttcaaaattgtgttcttatacagctgatttttactgatttgacagtgttgtgaggcccttgttggtgcagtatgctccacaaatgaatcccgtatctccattcttccacggttgctgtttcttgattactactttggttgtcgagataagtctacatgggagtgggcacctggtgcaaagatgcatgtcatgggttgtttgatacttcaggggatttttaagttttctagtgtatgtttccttctcttcttgtgttgacaaaaatagcttcagtgcttttaacttccaaatttttggcttttcatgtgcattcacagtaactcccaactttttctcaatttcacaggatcatatacagccatacataacaagcttaacttctatgaaagctgagtatatcactgaaacggcaaaagattccagtggagcacgtgtcatcgaggcctttcttgcctcagatgctgctacaaaacagaaacgtagactaattataaagtatgcactgcttcttgattttatatggggatatgtttatctcaagaccgatagattccacagtagcttgtttatatgatttccttcattctgttttttcttcattcagtctcttaggctgcttgtcagttttttttttcaagcaattcttcatattttgatgatgtttcttttcaccaatgatttcgtcacagattacgtggacattttggcgagctctcattacacacgtctggttcatttacagttgagaagtgcttcgatgcatgtaatttgacactaagggaagccatagcatctgaactgttggatgtgaaagttgatctctcgaaaacaaagcaagggccttatctgcttaggaaacttgatatcgatgggtaagatcttattcacaaacttaccttgctttgtttgacggaagctgtaacacatcagaaagactggtatcactaacatattcgtcctgtgagatggaaaaaaagagtaaaatttcttagagaaaaagtctaggagattaagtgaccatagtgccactgaaaggtggcataactgtagcattgatggcatgcatgtattctcttgcatcttttacctccttattcatgatttgatatgatatggaatcatttatttgttgcagttatgccagcagacctgatcagtggaaatcaagacaagaagctaagcaatcaacatataacgaattttgctctgcatttgggtccaacaaatcaaattttccaaagaacacctttgtctctgacgcatctgaggatgcagctcaggaaatagaagtaaagaatacaaggaaagagattgaccatcatcctacttccgggtttaagcgtcaccgagaaaaacatgcaaaggataaggatgaaccttttgcaggtgaaaaaagatcgaaacagaagaagaataaaactagtgaagcaacagataaaccaaaactagctggcagcaaaagacctttcctttctggtgagatgactggaaagaatcggcattcaaataaaatgagaatttgaaggttagactccttactcttgtcatatctagtcaagctgtattttcctcatctctgtgacacagttcttttttcctcatctctgtgacacatttacaagaatgctaataaaaagtcttttcatataacactacaaaagaacttatagaggtctaagcacactctaggaactgttaacagtagcaaagcttacagcatccagaaataagtgcaaagacgctatactacccaaaaaaaaaaacagatccaagcgaaaaatatatgaaatctatggttttcttgctgtgatatgttgtttcctacttcctcttacatctgttaggggatcaatcctggtacaaaaatacacactcttggtgtcaatcataccctttggaatacataaagattgaaagaaaattgagtggtgtggtttgtctttacttgttctgtatagggctggagccagtccttgggattcttcggaagctatctttttcacctcttagagactctcctttcatctcctggcttatcttcaaatctctcacacctttactagaagctaaatccatggaagctggcgccatctgacgacactctacattatacttgctgctaaacaaagctagaagtaacagacagagagctgctgagatcgatgccgatgtatggaatctcttcattgtgaaatttctttttgatctgttgtggtcttaggttgttgtgttccttgagactgctattgagaaaactttagggtagcgagcttatgtttgagttaaagagcgagaatctttgttgctttgtagattatattatcgattcatgaaactttttgggatctaatcacgtgatctagtttgactgctgtgccaataatttccttattgttttcccaattgtgtttcagatgatgcagatgtttactattaatctaatagtttctagatcattcactggtcattagtcctcacataggcgtacactgatacacattcattcacacgtattattagccatgaagatatatgtgattaagatgcggatcatgtgataggccacgtggttactgaatactgatgctgtttctattctaatagtgttaagttaagtccaactccatgaaaagaaacgttgcagattaacacagctcatggtcacgatgataatcaccaactctttttttctttttaattgcaatctttgaagaggaaagaaaaacagtagagagggattacccttgtgcttaccggtttaagtagacagtacaacagacctaaatgtgttttctaaattggttttttctgtttatcgaaaccagtggcgcgtctagtttatggtaagtaaagctcattgttgttctagagttttgcttcttgttttagcttaagatctgatggtttaacatgatgattccataagttaaatgtagagaacaatgtaggactcttgtgtttgatctgagtaaacaaaagctttagatttcaattacccgtggaatagataaatgatttacttggatgacaaagaaagctctcaaacacagccaataaagagccgagaccacatacacacagtttgacatcttcaggcaatctcactcagctaagctaattacaatcttcaaggatcaacagaagcaacagcattggagctgctactattactagtactactattgctacaacccactctcttgtctctgctcagaaacctccttaaggacctcaacctcgttgtcattggagattttgcttcttcctcctcaacaataaacctcatagatgacgacgaagatgatacattatgatttctactggaagaatcgctgatatccagaacaacagcttcttgactctgagaagcaccattaccagcagcaccgtcttcttgagtcccaacattggtgtttccggtactaacttgatcctgacgaccccataccaagacattggtgggaaattctggagaagaagttgaaagttgagacaaagcatcatggttgttattggtggtaccagcattttctgcattgtctggaacttgttcaactctctttgagctagcttgctcaggaccaagaacagtgtttctacaaatcggacaagtagagtgagactgaaaccacatgtcaatacactcaacatggaagctatggttacactttggaagcagcctagctttatctcctttaacaagctcagacaaacaaatagagcattccaaaccatctttgcaactatcttgtctgaaaaacacaattggtaaggaactaagttcaaaagaggttagtccagtgttgcttagagcgtcttggcctgggacgaagatgaaacgacgtcgctgacggcgagtgactacaggtggagcaatggatgattggtcttcttcttgctcttgctcttgctgttgttgttgctgttgctgttggagctgatctattctccaccagtagagtttggcgtatagatggaggataaggacgaacagaaccgccatgaatagaacaatgattgctgtgagaatgatcttacttgtgacctcttctgttgataggtcaccgaacattgagctatgagtagatctattatcgtccattgatgtgcgaatagggacaagatcagaactttttctgttccttctcaaaacaatgaatgtgccaagatgattcaacagaattggtttggttatatgaaggaaaacgacgattcagaagtagaaacagagagttgagcagagcaaaacatggaattggataaggatatgaaattagggttttgtgagggaaagcatagcaagtaccacgaaagctt

SEQ ID NO: 1244 - DNA, 101105 bp, Arabidopsis thaliana
gaattcttggtgcaggcagatacaatttgcttgatttttgcgttgaaaaatgcaagagtcttggatcattgatgggaattcttagtgtggaaaaatcagctccaggcagaaacgagttgcttgagcttagccttgaaaactgtaagagtcttgtgtcattatcagaggagcttagtcatttcaccaagttaacatatctagatctcagcagcctcgagtttaggagaatcccaacaagcatcagagagttatcctttatgagaactctctacctcaacaactgcaacaaaatcttttcactgacagatcttccagagagcctcaagtatctctatgcacatgggtgcgaatctctggagcatgttaacttctcttcgaatcattctttcaaccacttggactttagccattgcatcagtctagaatgtattagcgatctggttcgtgactttatgaacgaggaatattctcaagaggtaaggctctcttctctataatctgttccctttaaccccctcataagctatatttttaagttgtgacttgattgattctcattttgcacgtaggctccatttcgacttgtttgtataacgaaatactcaattgcttctaccaacaatatgcgaacctcatggagggaacctatgaggatcaaactacctaagattaaagctgcccccaagcttgtgggattctttgtccaaatcatggttgtttgcgaaaagcccttccatctacagtttccagcgttttcttataattgggactgtgaaggtagcaggttatatcggattaacctcaaaccaaatctctatcaatcatcagagatgatggaggacaacaataatagaccatataaatggcatcacctggtcattgtccaaatcccaactggcatcatcagcgcagaaattgatgaggtgcaattcgaatcccatatccaagttccggagccgggcgacgagataattttgtgtggagttgaacacgttgggttcgttttaaagtagctggtgcggagatcaattcttaagatgatgatggatctgcagatttctaaacacaaggatttgtaccaattttcgttttggaactaaataaattactacccatgtaacctcgtgtcggtttgcttttataatcggtttggtatttttcggtttaattgtgacttgattttatttttttccttttaagagaaccaattttttctttctgctttgtactcgatgtctgccctttttgctcaacaagctttaccagattgtattctggtatttcatcaggctagaaatggagaaagaaaagttggagctgccaaacccacaggagttgtgttctcactggaaatgttacattaaatatcattgcaaaacaactactaatacattgaatctcctttgattttggtccaaagaaaggtgaataacttttgattttggtgcatatgggatgatgacggactgatgagtacccaatatccagtgcccacgtgtcctaattcttatggatcaatcaagggcttaaaagcccataaacattaaacagagggaataaaggaatgctaaaaactaattaagaaaacatcaagtaacaattattatgttttggttgttacttgttacttccaaggataaaggagggattcctatgcttgacttgcactagagctttatttcattgcaaaaaaggttaggtacttgattaagaacccaacctaagttttagtattatacaatcctttttcccatctcattttacatgcttacactttcattaaactattatactcaaggaaactggttgcaggtctataacttgtaaattaaaactgttcgtgttatttattcccatgataaaattgtaagagcgtgtgaatcacgagcttaggagagcgtgtgaatcacgagcttaggagagcgtgtgacatcaatatggggaggggcggctaaagactaacgagtaaaggcataagggggaaattaaggactgttcagagttcagaaatgtttttagtctggaaacgacaatacactttggacaaaaagctaaataacattttaaaagcttcatacaaattaaaaatataatcaaacaaaagctaacgtggccaagatagctaattacttttttggaatcattattagagataatggaaattaagaaatcatacagccaaaacaaaccgtagttattatattcgtaacaaaagatgggggaaaagttaatataaaacaaaccttatactagtatatataatacatggctcataatacattactgctaaatgagcaaaaacaaataaaggtaaagttcttaacggctttgtagagataggaatcattaattttagagaaaaaaaaatcttgaattgtacgtttacctttccagaattacattatttgttggcttttaattgttaatcatttttgttgtgtttttcctccaaattataaaatttaaaaactgtgtcagggaatttaggaatctaatatagttggacgatttcgtattaataaagattttcaaaaaaagagtctgctctaatcgttatttgggggtaaattgattctataaggtagggttagccagagagccttattctgtgttttgggttaaagtgagaccaaataaattaagatatttaaaatgaataattaagagcacttaagacaataattaacccagaaggagaagctggtgtagtggtggttctcatggcgatgttggtttcccaggaaaggtaaaagagacggagacgaaccaaaacaaggaagaaagaagaagatcttacatacgaagatcactctctgattcactctgagagacaaactggtttactttggttctgtttgacaaaaggagacatgcaaaaataaatctctatcccttgtttttcttcttcgcttcatcgattactcaaagaggtttctttctctatctcttatctatttctttctgcatctgtagtctctttgttcgaaaaaaagatgtttaatttctgtcaaatttttctccttttttctttgttcgattattggtgtatctgtcttgtggcgtgcgattgatgtttactgattctgaaaaattcttgctaaaataattcatcttcaagtcaacgactttttgcccaaaagtgatgacgggaacaagaaatttttcttggtcggaaaattactaattttagccaatcgtagcgatctctgcaatcgtgttttggttacccaagatagtacgatcgaatcagttcgtttagagaattaaaaaattactcaaatttagaaacttccaacttctgtttctttctattctgggttttttcacccacttggattattagctttaaaaatctaatctttgagtcatttttgattgttatttaggttgttggttgtgagaataattagcttgttaaggaagacgttatgatgcatcagatgttgaataagaaagattcagctactcattccactttgccataccttaatactagcatctcttggggagtggttccaactgattccgttgctaatcgtcgcggttctgctgaatcactaagcttgaaggttgattcaagacctgggcatatacaaactacaaagcaaatcagttttcaggaccaagattcatcttcaacacagtccactggtcaatcttatactgaagttgctagtagtggtgatgataatccttccagacaaatctccttttcggctaaatcaggttagattgttggtatatatatgttttacttcttgtgtcattgacaaaagaatcatccttttgccataaagaatgttatcctctttcttactttctcagttgtttctctaggatctgaaataactcaacggaaggggtttgcaagtaatcctaaacaaggctcgatgactggatttccgaatattcactttgctcctgcacaggtatttgtaactctatgaatacagtaatcatagcaaagcttttgattgtagactgatatcttatgtttatacatggttcaggctaatttctcatttcactatgctgatccacattatggtggtttattagctgcaacttacctaccacaggcaccagtaagtacacccttcgtttccaagtgggagatttacctttcagttttatctgtccatcagatctcaagtctcttaatctcttttgcagacatgcaatcctcaaatggtgagtatgattcctggtcgtgttcctttaccagcagagctcacagaaactgatccagtctttgtcaatgcgaagcaataccacgcaattatgaggaggagacagcaacgtgctaagcttgaggctcaaaacaaactaatcagagcccgtaaggtagttaccaaattttggtttatattttaaacaaacgcatacacgtagaattgctttgctcatcttttctttttcttattgcaacagccctatcttcatgagtctcgacatgttcatgctcttaaaaggccaagaggatctggtggaagattcctaaacaccaaaaaacttcttcaagaatccgaacaggctgctgctagagaacaagaacaggacaagttaggccaacaggtaaacagaaagaccaacatgtctagattcgaagctcatatgctgcagaacaacaaagaccgcagctcaaccacttctggctcagacatcacctctgtttccgacggtgctgatatctttggacacactgaattccagttttcaggtttcccaactccgataaaccgagccatgcttgttcatggtcagtctaatgacatgcatggaggtggagacatgcaccatttctctgtccatatctgagacagtggatcttggtgctgtgttcatgttcccaccaagaaggggaagtcatccttggctactactagttctttcgcttgttgtaacttcagtgtttttatttcatattatgtctgtgttagacatcacaagaacgaccaagatcttcactttgaaacactctattaccttttcatcttctgttaccatggatctcttgtctaaactagtgatatgattcttctgataaactttcaattcctcttttgtttttttcaggatttatatatgtttgtttttgcttcatttgtgtcggcaatgaagaagtctccttattctgtttgaaaatggcgaagaaaaatacagattctggttccactccattgatttctgtgaagagacacattcggattcttgaagtattttacaatttagttgacaatgtttaagaaaacatttaatgaagaatccagtatatattagattatgtcttattcttgatacacttcttataaataaagtaaaaaaggttgaaagattctactttgagtctcattttatctgtctgagaagatgtcatacacttgaaaatactaccatttcttccacacgttcatgaatatttttttcaaaatatcaaggcagtctctatgcattatttcctatttaagatataatattttgataaggtaagaagaaacgtaaaatactgctccaaaacacgttgacttatgggacagatacacacacacttgtgtccctcaaatactaacaaatgatcataatttaacttctgtaaagaaaaagacagcattgtgaaatatataaagtcacaatcctgtacatatcactttcgcaagtgattcatgaattacttctaaatataacatgttgccaaatcaaagcttgtcgtgtgtgcttattgatgtaagactgcaattgccaaataaagtcttacaagtcatcttttaacattgcaacatatcatgtcggtttagtagcacggttatggtgaaccgatacctggaaactgaattcaagccaatgtggaaagaacatttatttatttaaaaacaactgaatttaacacattccttacatatgactggaaacaaatgaaatagcagaagagctagataaagaacaagataagtaagaaaactagagacatttccataaaagattcttctatgtggattcccagttgttatcactatgatttagaataaaacccgtcatggttcttagcagaaagccgtttcaagaactcgtaggtagtgatcatagttgttgcagacattgacattgaagcacatcttggtcccaatcctctataacaagccgtccatccaccttctctaaccaagtttcttacagtctgtccaatactcggtccacgcttcccgttgttactactatcttccccatcaagaacctgcaatctcgtcttgattgtgtcgagtggcattgtaatcaaagcagaaacacttccagcaatcgcagcactaactccttgaacagccattatcgttttagaatctggtttcatcgtggtactattgttcccgctttcttcgtctttcttacagacataacacccaattccaccccaaaccatccgctgtgcaacagagtaagacgcccaccaaacagcattagacggcgcataagtcagaatcgatatcccaaaccctctgtataaccccttcggtccatcagcgcgaacgatctttctaaatgcatcaaacccgttaacataattacaccttgatgcattaacaagaccagcacttccttgaaccataagcctttggctaaccacatcaacaggagtccaaacaagctgtgcagccatcgcagcactcaaacctccaaccgcattagcaacagcagcagctttagcctctgtcaaccccaagctgacagcagcagagcctacgttactcttagtaacctccaaggcagtcatgtacaaagcacgagcagggatagttcccatcaaagaagttccaaatcctctgtacaatccccttaaaccttcatgtctcacaagagtaaacgcagttttaatacaagaaccttgcgaatgacacacttgttgccgagttttcatcaaaaccgcaggataaagagctccagatacccctgaaaacaaagcagcgcctaaaacgaaaaacttggatttatcaagcatctcccaattgatatcagctggtaaatgaatctcctgagccgattcttcctcggccgcacccaaattcatcttcgccactttctaaccaacccagagaaacacacacaaaaaaaaaaacttttttaaacaaggaacaaaaaatgttcctgagatgtgtttcagagctcaatctctatctgtacaacttttcctaacctcgccgcaaatttctatttacaatcggagactgtaacctatccccaggattagaaagaccaaaaatttctaaaaaagacaaaacaaaaattaggattcaacgagaacgaaagaggaaagatttcagaagccaaatctcaaagcaagagacgacggcattttttgcgtctgtggaaccacgtcttcgatccaaaacgatcaccaaaaccatgcggatctaactctaacaacaacatcttcgaaaacagaaccgattaatcgaccttaccgaagaaacgatcatcctcgccggtaagcgataaagaaaaatctaaccgcgaaactcgtttccttcgccggagatatccaataagcaccaatacaagaccgatgttagaagagagagagagagctcaaagagagtaatcgcgacgagagcacacgaaaatgagaccttatacagttatactgttacgagcgagtctagggttccggtttttttccccctgtaaatataccaaattgagataccggtatagattataaaccggcttgcattttccggttcgattagctgatttctctatgtaacaaaatgccatttacagttttcaaatttaccggttaaaattgacctaaccgaaacaaataaagtggaaatgttttagtttttgattcaactaagtgtatcatcaatggattttatattgtttccatattgtgcaaaatgtaatcagaaaatgatcacgatgtgcaaattggtttgcttaatttaagattgaattacagatttttttttatcgaatattaaaggatttattaaggaaataaggaagatctggtaaaaatcagatgctggcaggtgacacgtgtcactcatgactaaggtcttaaactcttacggataaagaaagcgacaaactgggagcactcttagaagacgaagaagatcgacggcagagatagaaaaaagctaaaaggtcgtcatcgaaaacaacggctaagatcttgttctcggatcagacccaacagaggagagagaaaatggatccgcttttgtgatttggataagatgacgtggcgtccatatccttgggtcgttgggcagagaagagagcagaaggcagtgtgagaggcacgtgatctgtcacgtgatttttgattctttttcactgttacacttccactatcgttcgagctatatttttttttatgaaaaaagaatctaaagatttatcagagttcctcctagagatgctaaatttataggaacagtggtggtccttggacaatagtatgatactaccaaacaccaacagaaatcatttttctgtcgttgtatcatttactgacataacttgattacaaaaatatagtattaattagctttgggagtttcacatattttagtatcaaatcaaatatacaacagaaatcaatactatagtatttggaaatgcccactacctaaacatatactacatttctttttcggtccacgcttacttattacatcgttaatccttatcttcaacagattagatgttaaagtgagtagacaagcttagactgattccaaccatgtgatttgattccaaaaagaacattatagctgtgatgggcttgagtgacgaacaacactgttggttctgtatcaactggtgatgaccattatttcagcccacaacttggagataaaagaaccaaatcataagcagtttccacagactaaagcaccaacaaaaactatggaaagcttttatcgagcaaaagatcacgagtcacaaacataacaaaaaagtacacgaatcatgaaatcaaatttctcaagttccctatcaaaacgctttaaaatacagaaaagggatcccttctcatttattgtgtcgttctctcccaaaccccaaaacactattacccaaatttagagagaacacacaacggttagttgaggtattcagagtttgaatcaattctaattcaagtcttttatttgaagtataagcttattgggctggtttttcacaatgactgtatatttgacccaatccgcccaatgtgacgaaaaggaggacccataactagtggtgtcctttactttctttttcttttccaaaaacgttaagatcataaactccatacctatatacattaatatgaactatgaagtgtcgtctactttgtatgaatgttgctctcatagtctcatctcattatttatttttgtcctttaaaatgacaaaaagatagtgacatttattatttattttttgtttccgtcgcttgtaatatatttatttgattaataaaatgggacgaaatcacaaatatatattagaagaacaaagaacaatagatacaaataatagtaacattatattttactcataagaatatacttcatgtgtggcacatgtctcatgtagtccatacattcgtgtttttttttgttgttgcatatttgatatcttaaacactaaaatttacacatgattcatgaatgtcaaagattcatttctccctagtgcttctttctctaccatcaaaagaaaattcatgactaataatccatacaaataatagtaacattttactcataagaatatacttcatgtgtggcacatgtctcatgtactccatacatacgtgttttttttttttttttgcatatttgatatcttaaacactaaattcacactagattcatgaacgtcaaagattcatttctccctggtgctttctctaccatcaaaagaaaattcatgactagagagatatatacataatttggaaattggaatgacaaatgaaaaacaaacaataaatgaatactttcgtcccaatatttattaggttataaataaattacttgtgacttgtgactaaaggtgtcaacaatcattcttctatccaatcaatatcatcaaactcttcactttactctctctctcactcataatggcctcattctctcttccccactccgccacctactttccttcccactctgaaacctcacttaaacctcactccgccgcttccttcaccgtccgttgcacctccgcctctcccgccgttcctccacagactccacagaaaccccgtcgttcacccgatgagaacattcgagacgaagctcgtcgccgtcctcatcaactccaaaacctctccgcacgttacgtccctttcaacgctccaccttcttcaacagaatcctactccctcgacgagatcgtctaccgttcacaatccggtgctctcctcgacgtccagcatgatttcgccgccttgaaacgctacgacggagaattctggcgtaaccttttcgattctcgcgtcggtaaaacaaattggccgtacggatcaggcgtgtggtcgaagaaagagtgggtactccccgagatcgacgatgacgacatcgtctctgcttttgaaggaaactcaaatctcttctgggctgagagatttggtaaacagtatctgcaaatgaacgatctttgggtgaaacattgtggaatcagccacactggctcctttaaagatctgggcatgagtgttctcgtttctcaggtgaatcatctttcataaagtttacaactgtataaccatcttcaataaagtttacaactttatgttatttttttgtttctcaggtgaatcgtctccggaaaatgaacaaaccagtcatcggagttggttgcgcttctactggagatacctccgctgctctctctgcttactgtgcttccgctggaatcccctcgattgtcttcttacctgcggataaaatctccatggctcagcttgtgcagccgattgcaaacggagcgtttgtgcttagtattgacactgattttgacggatgtatgcatttgatcagagaagttacggcggagcttcctatttacttggcgaactctctcaacagcctccgtctcgaaggtcaaaagacggcggcgattgagattctgcagcagtttaattggcaagttcctgattgggtcattgttcctggaggcaatcttggtaacatctatgcgttttacaaagggtttcatatgtgtaaagagttaggtcttgttgatcgtatccctaggcttgtttgtgctcaagctgctaatgcaaatccactttacttgcattacaaatctgggtttaaagaagatttcaatccattgaaagcaaacactacatttgcttctgctattcagattggtgaccctgtttcgattgatagagctgtgtatgcgttgaagaaatctaatgggattgttgaggaagctacagaggaagagttgatggatgcaacagctcttgctgattctactggtatgtttatatgtccacatactggtgttgcattgacggcgttgatgaagctgagaaagtcaggagttattggagcgaatgatcggactgtggtggtgagtacagctcatggattgaagtttacacaaagtaagattgattatcattctaagaacataaaggagatggcttgtagattggcgaatccaccagtgaaggttaaggcaaagtttggttcagttatggatgttctcaaggagtatttgaagagcaatgataaataagctttgtgtgtttgtttcttctaaagctcttcacgtcctatgatgatattgttggctttgttattagaggaagtaatgaaatttcgtttctttggacttgtggaataaaacgactggttggttccgtgatgctcgctagttgtttcatatcaaactactactgagttttacatatgctcttaacaaaagtactcacgacctgtcttttaacctcttcttttaaatcttttaagaaacaataaacttatctagaaaattaacttcaagaatttttttcatcttatttaaaaccaaaagaactcaaaattgagttaacattaacattgggtcaaaaacttaactagaacataagaaaaaactcccaagtaatacaaatttaaaacgttcctcttcttctaggtagtcttcttactttagggagtaaaactaggtgatctagttccacgagcagtctcttccttcatgcactaccaaaggttcaagccttcaacagaaggtacaacggccctgattaccacaacggccaggaaaaggccaagtacttccactgcgaatcggttcagccttaccaactacaagatcccatcctcccacgtcatgtctaccaagttccaacgccttctctgctccttctttcagatcaatgtaagcatatcctaaggaaccaccggttccgtggcttgggggaacaaatacgcgtgtgatctccccaaaagaactgaaatatttactcaatgcgctctttatatcatccacaggaagggaagcgtcaaatcccgtaacagagaacgatcgaccattgacaccaacagaaaataaagaatctttagcagctggcttgacaccaacagagaataaagaatctggcttgaaaccagcagagaataaagaatctttagcagctggctcgaaaccagcagagaataaagaacctggcttgaaaccagcagagaataaagaatctttagcagctggctcgaaaccagcagagaataaagaatctggcttgaaaccagcagagaataaagaatctttagcagctggcttgaaaccagcagagaataaagaatctttagtagctggcttggcggcacttgcagcaggtttgtttacaggttcctcagcagaagacgattcatcctccgaagaagtgtccatgtatgagtcatcgctctcagaagaagccttagcagaagtcttcatggcaggaactttctcacccttggctgagatgagaagctcctgtatatccgcctttattgccaacaaatccgcctttgttaccaacaaatccacctttgcttcgagacgctgaagacgatcagcgaattctttgatcatctccttctcatcaaggtttttcaagacggatactttcgtgatctccgtctgatcagattcttccttctcggaaggagaaatcacgtctttggccttaatcatagcaggagctgcttcaactgtggttgcggataacttgctagactcagccatggagaagatgacaagaaaagagaaagagcgattttaggttttcgagagacaataatccaagcctgttgtttaagatatatatattaggttacataaaagatatatggcgtttttctaacgcaactcggtggtggttcatcgtcacgttgctgttattaggttacaattacataaaagatggcgtttttgtaacgcaacattgccgccatattattatttttttgataaattattaaattattacaaatgtttttttaattatgtattttattgttaacaaagttttttcattaatttagaagggaaaaaaaagtggaatcgactaaaaaaggcaaagaagtggggtttcaattggctgtgtattaaaaagttgagttaatcaaattaaatatttataaatacctatcaatttgtttcttgtttgatgatataaaattaaagctatagtatttttttcttttttttctaaaaatattgaatatatttttcaaagctataagttctccatccaaacatagttcaaaataaaataaaaatggagagtattacaagaaaaactagttgtatagagattttttttggttcatcccaagatgggctaaaaactgtaaaaacggatactaggaattgtatacaccacaaaattacgtataagaaagtctaaacaaaagtaaggtaaaaaaaaccaacacagtagtaatccaaaaatccaaaatctaaaagaaatagcctctatacgcttgggctgggcctataacccgttgaagatccggattcatgaagtccgggttcgggtcctaaattggatctccctcttttcacagagttcatcttctccaatttgagtccggctctgaatcttgcgatgaaatcatcggctttggtatctacgtcggggctcggacagaacatactcccggcggcctccttacttccagctgattgagctacatccggatcatcaggttcgtcggagcttatgctgatgtcactagccatcctgacgtaatctccacgcttcacgaatttccaagccggcattttaaacggcggaggaggaggcggcggcgggatcggcattagtggtgattcgcttcctgtgcctacgtattgagttactttagctggcggatttggtttggatgtccgtgattccaccggagcttttcggagcttcgaggttgatgcgcgtgattcatatctccgttcaggtggtggtggaggaggaggaggcggtggatttgaattgttttttttgcttttaccttttttggatgagaaaagcccttggaagaaaggtggtggaggaggcggcggcggtggtggtgaatagaccaatggaggatcggagccgaagaggagatcgaggccatcgatgctctgttgtctctgcttcttcttctttctccgtaacgcaatcagaaagtctttcgttgctcctcctttcttcttctcctgtttattgctcttttgatacacagtcgccggaggtggaatcggcgtcgtcgtcgctacaaaatcatctctttctttcttctcttcctgtggagaaacatcttggtacactctattagtctttctcttcgcttgcttcgctggtggaggacgtggcggagacggcggaggagacggaatatacggcggagcagaaggcacttttagctcttctactacttcagcttccgccgtcgcaaccacctcaactttctcagtttccgaaccgccgttacggaccttacttccttctccattatcaccgtcctctgtttgatctacatcttccggcggtggtttaccttcctcatgccagtttctgtaactttgatttggatagatcggatctacatcttcataacggcattgacttacacgtgtatcatcgtagaatctccaccgttcatcggcttcgtattcccggagcctcagatctggatacgagctaacacttcgtaatctactaaacctcttgtacaccgtttgatcaccgccgccaccaccgcgatcatcgttccaataacgcggcgttgtaccactgttagatacacgacttcttcgatcaataatcgatggtgaagtcgagaatttgttacgaatgtcttcttctttgtgatgattggattcgtcattattggtgttgcggctgaggaagccgcaaaggacggcgaaaaggacgagaacgaagttgagataatcccagcttttacggactaaatgaggtcggaaaatctgagaaacagaggagaagaaaggagggataatgaagacgactatgaggattgcagctgttccggcgaagaatatttgagtggcgatggtggttgtacggccaccgagacttgcagtgcggcggaagtaagtgttattgcggcgtgattgaagccaaaacggcgtagacgcgtctccatcatcttcttccatactctttctattatttggcttttgattagaaagacaacttttagtttaagagtggttggcttacgatgctgtaatgtgtttgcttttatgcttttgcttggattgatatttgttttttaaaatgcttggggacttggatttggtcatttttatttgtttttttttctttctgtggattcttactttaatttacacattttttacaacaaaaaatatgtctttggagtattttagagattttttataggagacaagcaatcggataattgacgtatttagttgaatatctatgtcaaattcatcaatttgcatatatatttatttattacatgaaaatacattgcgcattttacgtagaggatatctgaattaattgtataatgttcaaatatgtactagttgactatatacaactttactcggtacatctgaccagttcttgagtttgagtctcggcaacacaacagtatctaactccctagtcctaaatgtatgtttcacaatgattagttgtatagatagatattgcaattttcacaaactatccatattacctgataatttgatgtccacaaactctgaaaatcttacatttttttaattctgaattttgaacttgtaaagaaaaaggttctagtatcttaaccatactctagacaaatgacatttacacccaaattttttttttatagaattgtcaaatcttgatcttttaaaatccgaaccaaactttggtcatacggtcatgcctaagagaaggttcaattgacacatgatttttttgggggaattttttatttttattttaataacttgttagacaagctggaaaatggtggtatttgcttgtgaaagttggaaatgggaaatacaaagaaaggcctactaatacagctggattacatgaagcaaatacagattggtacgtcaaataatcaaaattgttcaacggaatcatatgtctaacgtgttaataaacacgttttctatgtgaagctgaggccgtgattactaattagtcttttaataattatatgagagccggtgttgtcgtggcttttacaaatggccaggccaaaccgtcaaaggcaacatactataatctaatcaagtcttgttatcttgataacttatctaaaaacgataaactttctctcacaagctagattttatgtggtgccaatgattaacagctttctaagtttgatttaaatacacttacggtttcacacgtcacttccacatttgtaggtatgaggttgatttctatttctactcaatttaagaaaagaaatattaacatttcgtaaagactctaaaatgttagatgattaaggtaagttatggaaaatgtgatgataacagaaaaaaaaatgaaaaacgtgaacggcaggattcgaacctgcgcgggcaaagcccacatgatttctagtcatgcccgataaccactccggcacgtccaccttttgctaagtgtattgctttatcaatacttaacatcaaaataaaaatcgacctgtggttaaacccccaataaactctcatctcaccgttaagttatagaacagcgaagaacacaacatgaaaagacaaatgcaagaaggttaatgtgacatagtttcaattacaatttcatttgccacatctctcaaactattacaacatattcaactatttcaataccccaaaaaaaaaaagcatttctctgcctatttcttcttatacatacgaattcaagtaccatgagaaaaaaaggaatgtacttataattagctatgcatcatcttcttaatcttcagtctttagtctttacttctcctccccaacccgcatttccattttttttctttattttttctcccttctaacaatattgagtaattaacatgtaaaaacctgtcgaaattagatccttaacgatctaaattatacgaaaactcgaaacttacccccagtaaaaaaaaaagtaagtaagcgtactgcttgtaattaagcttcaggttctggtcttgaactttctttgagctttcaagtcaatcacaatgatggagatgttgtctttacttcctttttgtagagcaagcattgagaggtagtcagctgcggcttggcaagctggatctattcctttgcctctctctgctagaggcggtgcaccgttcttcttgtgccacatcaatatccgtctccttgctatttcgcagacttcttggttgttcattacatcccaaagaccgtcactggctagtatgagacactcgtcttctcttgaccgaggcatgaatgtcacttccggttctgggatcacatatggcttcagatatctgtcacctgcatagttccagaggaggaaagaaaccggaggatctaatgtttcatgtaggggagtaattacattatcaagccacgtttgtgtgatgtgcattactggtcatcaaaagaagcaatgcttaccgatggacctagacatggcgagaacaccaaaaacacgtgcgccttgccattgtataactttgcctccagcattttctattcttgcatattcatcctctctatctggctgcagaaaaatggaaggaggtaagaaaacacttttatcaactttgtaagttagattggggaaagaaaaggaagttcattttactttgtgatcaactgacaagggcatggcttctttgccacggaataaaaccgccctcgaatcaccgcagttagaaactactatatgtgatgagcaaaccaaggcaacaacagcagttgatcctacggtctcagacgcaacagcctcaagaaccttatcagaagaaccaacaacggctctaccaatttttccttcaatctcaccatcgacagttagaaaacaactcgtgaagactttatcccactgcacctgcctaccctctcctgtattcctcttgcataattcgtcttttatacgttctatttcttcagccaaagcaaaatggagtctatctcggcaatagtcagcaacctacaagccattgtagatttaaaatctatgaatttaaccagaacatctcaaagaggtgtataacaatctacattgctaaaacaacttacataaaatgtgaatatagcataccttatggcctccatgaccatcataaacaccgaaaaaatgaccggtgaggtgtgtgaggcttggactcataccctcatggtcccccataagcattttgatgggtagtttcagaaaatgaggtgacacggcaaaagcatcctccatctcagatctattcccttgaatggaaaccgtgccccaaagcggtatacaatctagttcataaacacttctccctttcaccagatgattactattttcatctggcaatctaatgacaacctccgaagtattggtatcctgatttacacccgcgataagaacttccgcggtgggaacctgctcaatgcttgattcgcctacgataatcgcggttgcaagaactcgcccgttatctatttccatagctgtattagacaagcttaattcagagcctgcatcaacaactaacaagccctcacttatgacagcactattatcctccacaacagacaatacatcgtcttcatcaaaaacattggaagacccgcttctcgtatcggataaagttttcaacaaatcctgttcacctacctcttccagttcagaaacatcttccatagtgcattcagtccctccgttgcaaaagctttgattttcagaatcagataacaagtcagctgcatcagtaacgttctttagctgagtgatctcgacaggtgatgattcacacatggtgttggctgctaagctaagagtcattgcaactgcgggagtcatctcctccatgagctctccaaaatcagagatttccacaccacaccacaacaaagctttaaatttcaaagatggacttaggagaaatcaattgttttcatcttcttcttcgaatactctaagcaatggtttcatgatgttgaagaatccttgctccaaataagtttttgtcagcgacccaaatgccgctttattcatacactaacttagcatagttaaaacgacgaatcaaggagaattaagtaccggagataaccagatctgacgaatctatacgacgaattctcctcactcgattatatcactctcttgatcccaaaatcgcaacaacttcgtcgatcttttctcaaatccttatcttgatttcaaccctattgagagatcacaaagcactaatcaaaaactcacgaatcattatccaaacggtcatgtcaaagaaaattcacacaaaaaccagaaaaaggagggaaaatcagcgaaatcaatcacaagaaagccctaaaaaattcgaaccattaacgtccataatcatatagtagaacatgggtttccttggatctaaattaaaaaagaagctttagctttacccagaaatagaaagatgaatttaaactttgttcttaagcaaaactaaacacaaagctcaaaacaacaagagagattcgacacataatagcaaaaatcttccgattgaaaagctaactacacagaaaaacaacataaaaaaatcaggaaagaaaaaagaagagagaaagaactaaccagttgatgaatctttagaagatattcgcatctgcaaaaaaattaaaatcgaacagaagagagagagagaacaaaagtaaagatgttcttcttcttcttcttctttttattttcttccctcaggattatttctcgctcgagctaaattgcttagagagaggctctctctatcagcgaaacaaagagagagagaagagaatattgtgtggtttgctttttctctctgtttttttttattcctttttttctttggttttgtaatataatttataggaaaaaagagtatttattacaaaagaggattaataaaaggacacgtattagtctttgtatcattttgtgaactttgtcctctttttttcttcaactttttgtcctttttctttttttaaggtcgcttcaggcaacacctgtcgatcagctaacaacaacagatgttatttaattcctttttttcccatttatttattttcagaaccaaaaatatgtttacaaatggaaattgatttctttctctttcctttttttaaaaaaaaaatatatcataaaaatttatataaagtagaaaaacactaattatttccataaaattttgacatgtaatattaaccacgaaaattagatatagataagtgagtatcttagttgtacaatctgacgtgtagataagtgagtatcttagttgtaatttgtatttgatataactgtaaaatgaataaattgtattaataggatcaatgaaatcttgacacgtaatatattggttcagcaaaaatttcccatatattttatttaaactgatcaagttttagttttgaaagctatgagtaagaaataaagattggttttatagttacgaacttgtctatagaactctctaggtaagaaagaataacacaaaattattgttatcagtaagaatgaatcagcctaaaaaaataaaaatatttatgtatacttttcgataacgttaaagtacaagttctcacaatcagtgtttaatggaatcgtcttaagagtaataatctttcgagagacgtataagatatggtgatatcgccaagaagaaataaagatggaagacgacagccccagaaaattatattatttggtcgtttacctttttttctttgttctttttggatacgtaaatcaaaaaatgcaacgtgtgtttgtttttttccaagtcaataatcgcaataatttcgatttctaccacccgcccacgtggctactctgattgatcagggacgaaaataataaatattttgttacacctctagattttgtactcataaatttcaaattcgtagatacatatattgctgttgcattattatcgaaactcaaattaagtaaatgtgtgtaaattgagatgtgtgatcatgtttaaacataacattctattctctagtctattttactctcttttttggttcaacctctagtctatataaacctaaaagactaaaccatatgtttgactagttttactaatatttttatctaaaaactttgttttactgattaagataaaataatcgatttaatattttgataatgtataatcgaattttattttaatcgaaacgcgtacattatagtacaaactagatctcaccagcaacttcccaaaaatcactctctaattaaagataagttgagacttgtggaaatttccattcttgtttgtttgtttcacaagactgttgagttgtttgagaaataaaccctccaaaattagaaaaattgtaaaaccactaaaagcttcatcatctcacaatacaattttctgtttcttttcattgttcattgtttcttctctgaggttgcaaagccagacaaaagaaaaacaacacaatcgatcttggttgtgggtgttttgtgacaaagaagacatgagatcatttatgagtattatagtttccttgtgaagcaggttattcatgtttcttgggaagcaagattctaacatgtctgcaagaagagttagaaggacctcggaggactatggcagtatcacggcgatcgccattgataaggacaagaacagccaacacgccttgaaatgggccgttgaaaatattgttgctgatgctccacaatgtgtccttatccacgttcaacgtaagcatctctcgctcttctcttcatcattgaaaccaaaacgtcaaagagccaccctaattaggagtatgttttgcagtaggagacacaggaggacattttcatcaggacaatccggacgaggcacatgaattctttcttcctttcagaggattctgcgctcgaaaaggagttagtattaatcgatcatttccaatctccttgcaacaacatttcacacttataatgcatcaaatatgatcatgacattcttgtatatacacacttttcagatcatagcaaaagaggttattcttcatgatattgacatctccaatgctattgtcaactacatcaccaacaattattacattgcaaatcttgttgttggcgcatctgcacgcaattccttccttaagtctctctcctcttctctgtttcatgcttggtatcatctcaactttggttatacaaaatgctaacattcaatttttctttgtgatcagaaagtttcagagtccagatgtaccaaccactctgcttaagacgactccagagacttgtgccgtctttgttgtgaccaaaggtaagcttttaaaaagcagatccgcgagtcaccgtcataaactttccagacaacaaaatctctcttctttgttgtacaactcaacaaactccattgactctgacaggtaatctcaactctcttctaaccattggccatggttttcttttcaacaggatttagtgaagtatgccttttcattttgtttacattttttacagcgcatcaatatcatcacctgtatctacacaaaccaacaaaccaaattcaaattttttccaacctaattcacctcgcatctcaacaccgcaatctatgagtgaaatctctcagtcagagactgacaatggaagttgtgatatggtatcaactgtgagttcttacaccgtctctgatagttccactaccatcggaagctcgatctcttcaacttccacggttagtagtatatcgtcactttcttataaatgttcagtttctcagtgttctgacatttccttcttggttttcatactgatgcacaggaaagtccacttgtcggaaattacgtggaacaacaggtaaagcttttcaggaacataaatttggtcctggatttgcagaatgtcaacatgatttgatatggtctatcctttttgacagaatcaaaatcttgaagcagaggtgaggagactgagactggaattgaagcagtttaacaaggacaaagacactacaaaccaaaaagaaaacgtaagatactgttatcttccatgttgatgacaattgttgtgaataataatcattagatattacattatgtagtcccaagaaaccccatggtcagatgaaaaaatagagctgcctagagcattgtctgatagggaaacgcagaaaacgcagtctgctgcattccaagcagctgaaatagcaaagcgcatagcgaaaatggagagccaaaagagaagattacttgagatgcaagccaatttggacaaacagatgatgttcacaacggtttcttacagacgttatagtatcaaagatgttgaagatgcaacctatggtttttctgatgctctaaagattggggaaggaggttatggacctgtttacaaagctgtcctcgattacacttctgtcgccattaaaatcttgaagtcgggtatcacagagggactgaaacagttccaacaagaggtactgtgttagtttatattgctctccttattttgcttctccttctcctgactcatacatatgtttcttcaatagattgaggttcttagtagcatgaggcaccctaatatggtaatccttctcggtgcatgtcccgagtatggttgtcttgtatatgagtatatggaaaatggaacactcgaagatcgcctcttctgcaaaaacaacacacccccactttcatggagagcaaggttcagaatcgcttctgagattgccacaggtcttcttttccttcaccaggcaaaacctgagcccctagttcaccgtgatctgaagccagcaaacattctactcgataaacatctcacttgcaaaatcagtgatgtcggtctagctcgcttggtacctcctgctgtggctgatacctacagtaactatcacatgacttctgcagccggtaagtcttaacatctcttttcgatgtcttaacatcgaaccaatgttgatgtatgtttcccattttgacgtgtacgggaacaggtacattttgttacattgaccctgagtatcagcaaaccggaatgcttggagtgaaatctgacctctattcttttggtgtggtgctactgcaaatcataacagcccaaccagcaatggggttaggccataaagtagagatggcggttgaaaataataatctgagagaaattttggatccaacagtatcagaatggcctgaagaagagactctggagttggctaaattggctttacaatgttgtgaactgaggaaaaaggacagacctgatcttgccttagttctgttaccagctctgaacaggcttaaagagtttgcaacagaggatcatgaacgtattcaggatagaacatctcatgtgtcacatgaacacaattcagttccgctttccccgattccttcctctcaggttagtttcttagaaccattctttttaagggatattagctgcaaatagaaatttagggttttagatcaagcagaatcatgttttattaagtaggtgaaaaatgtttactgcagaactttctcagttcatgaataatttctgtgccatgtagatagaggatgaattgagaaaatcatattgagtattgataaaaacatggaaattcgacgtagatcaaccagaagctgaaaatggcagtacctgagatccacgactatcttgatccttctaagacccgtaaccatcctatacctagaaggagtcgacctccaagatcacatacaagcaagtacaaaggcaacggttggtcttttatgagttgtgctccttccagagttcagtggggtgatctcccatagcgtgtggggagttcccttatctttgtatatgaaacattcttttagttttgttcatgtaaaattctacactttaaagaagacttgtttattgatgtaaagaccctcattcgaatgaagaaatcagacgaaatgtcattttgcaggtacatgatcttctgaaacaaaacaaaaattctaagcaagctgcaaaactgaaagtttaaggctttaataaaaagattagaggacactatttgttcttcatttagagcagctgataaggtctagagacggtaagagtttagagaaggtttgctacacaatatgcctgagacttgagaaccaaaaaccacaaaaccaaaagtgactgatccatcatcataagcttgtgaaatcttggagacaaaattaatagctaagagcagagaacagtccagagaaatagaaccagggggatataataggtaacaaaataacaccatcaaatatcaggttagtactcaatgagataaacagaggtatacaattatgtgaacacactacaccatcccaattaacaaaatgataagaaaaaacttgagagaagagcttcattttcaaatgtaatacaacacatcagtttctcaacgaatcaagaaagagttaacattgatcaaaaacagaaacataaaacactaactagaacaaacacactcatgacaaattaaattaccaatcggcaaaacatttaatcagtatgaatataagaaaaaggtttgcaggttattcttcaaagtgaaactgcattatgacttgacatacagacttgttgtacctctagaaaccaaataaagttttcatttttatgattccaagacataccaaacctatcaaattctcaccatttcccctatcaaaaatttcaacaacgacccgaaaaagagtctgccaattagactcttgcagtcttcaaatgggcacataccgcttcacaatttgcttcccagctacaacagctccagccgcaagtccaccaagagcaccagctacagctgcagatctcactcctctcgccgctctacaaacagctccggttccaagaccagccaccacactggtccaaacatcatctctatccgtggcagccacaataccactctcgatccctgcgtaaaccaatccaatgataccaatccgattaccccaagttcgaccagtttgaccagaagagttcaagatcctgttgattttgagcttagtagtgtcgccagattcgaagcttttgactccagtgatgactccaacagaagctccggcaacggagccaccgaggtaagctgttccggtgtagaaagtgagattctcaccccaagatctacgttgccttaaagcctcctccgtgaagagaaactcaggggaggtaggaagcttgtaaaggtactgagatttgttgattgggacttcgtagttttggtaaggattgtaaagtcttgtgttttcgtctgacccatgatcggatctgttattagccgccatcgatggaagagaaaagtctaggttttaaggattttggtggtggctagagagagagagacgacggagaggaaagagagagagagaaacgtgtgatgatgtggttgtgttgtgtctctctgaatgtttggtttggttgccgaaatgagaaatgaaaccaaactaaactaaaaatctatgtttagggtttttagggaaagactcagtccagttgtttccagatacgcgcagtaccagattcgcttaatactcgcgtttacgtttatttcgaacttaaccccatttattttattttctctatttaaacccaagttggttttctcttaccaccacacactgtatttgctgatatttcgaatgtgaccccataagtttaatttttacaaaattaacctcttcaacattggacttttcaaagtcatacttaattactttgcaaaattgcaatccatcgtgacaaccaaacatcctcgaattttcaggtgtttctcttataatgtcagaaatatttttacgacgaacgaacctaattttatgaattttttttgtcatcagtttttatttagagaactaaacttcaaataaaataattaaggattcaaatacaaagcttatttgtttttaatttaagtcaaaaggccaaaaaaaaaaattcgatttaatttcgagagcgtaaatagaagacaaaataaaaagcataaattcggaagtaaataatcgaaaaagttttgcaaactggaaacctcctcccgcagtcacacaactgcgcagagccaaaaataaacgaaacctccggcgaaagctacggcgaagagactgcgtctaactccgtttacacgccgattgtcttggagagagagagagagcacgaggtaaatcacgcaagggttagatgggaaaccagaaactaaagtggacggcggaggaagaggaggcgttactcgccggaatcagaaagcacggtcctggaaagtggaagaatattctccgggatccagaattcgctgatcagctcatccatcgctccaacattgacctaaaggtttctcttttcttcactcacctctttaaaatcactctcgttgaaccatatattaaacctagacatcgaatttgagaccaacccggagtgcattatgtactctgtcgtatctgcttagtttaagatccataaaaaatcaaaacttttggcaataggttttattagtgttgcctcttatcattggttataggattagagattccttggatagattataagtttttttttttattgattcaagtgtgcaatacctaaagctagcttggttgagttggagatttgaggtggaaagagtagtactgtccttcattttgctatggatttcttttacttggtggtagtcttatgaagaagagtttgaaaattttgtgtgtttcaatacttaataggataagtggcgtaacttgagtgttccccctggtactcaaagtttaactaataaggcacggccagcaaaagtcaaagaggaaggcgacactccggctgcagatgcaaatgatgctgtcactattccacggcctattcctactattccacctcctcccggtcggcgtactttaccttctgagttgatccctgatgaaaatacaaagaatgctcctaggtttgtctttctttgttctctatttctcatacttgaggccagaaagtatgatgagagactagttccataaatgctagtctatcaactctgagtaataatcttcatcatgtattgctaaacttctgatatgtccctattttcaggtatgacggggtgatatttgaagctctctctgctttagccgatggtaatggatctgatgtcagttccatttatcatttcattgaggtttgacaaatttctctctgctatttattatgcacagatcagaaaattatatgtgctcgctttgtaaactacttaacagattattagagacatcatctatatatgtgggagggatagttatgttattggcacgtgtaaactctatcttacattgacttgtgcaaatggcttattactactatcagcaatcttagatgattcgtccttctcaaatgagaacaccgagttctaaatgtaaagtcttatactactaattatttgtactttgacgttttatagtatgataatacttgtcgtgaagctgtccactatgcatatctgaaaaaatgttagaactcttgattttacttaaatttggtcactttctgttattcttttatcacatttggctatataatagcttttgtattggaccttacgactgagtgctaacaatggtttactgtggaaagagcagcccaggcatgaagtaccgccaaattttagaagaatccttagtacaagactgaggaggcttgcagctcagagcaaacttgaaaaggttagcaccttcaaatctgtaagtcttgaatctcacttttcttgtgttttttaatgagttcccattttcttttaaaattcccaaaaaaaaccatcttcatcaattggtgtttaaaactatctggtccatatctgtctgagccaatgaagcatggtttagaatccactgaattaataactgaagcagtgacaatgttctttaaagccttctcatgctatgtctttggtttttctttctgtgttgttcaatccaacatataacagatacagaacttctataagatacccgatccatcaggaacaaaaataggtgtcccaaaaccaaaggagacacatacgaagctgcgccaagcaaacaatcagacctctgctgattcacaacagatgatcgaggaagctgcaataaccgcagcctgtaaagtcgtagaggcggagaataaaatagacgttgccaaactagcagcagaagagtttgagaagatgacaaagattgcagaagaaaatagaaaactcctggtcatagctactgagatgcatgaactatgtaagaaaaagccagactcttttctcattattggctaagcaaaacaaaacaaaacgtctctaactttggtattatatggtctgttttgcaggttcctgtggggagactatgctcttggcttgaattgaatctatgggacattccttgtagctctcttcagttatctccgtaatggtgttgataataatatataaaaagaaaactaaattaatttactaggcgtggcttttttggttttaaattcctgaacctacatacatatttttacattagcgaagttactttcgtataattttatataaatttctttacatcgaattttaatgttaatttttttttgggtccaaaaccattaattggagtaataaatatattaaaagtttagagggcaaatcgggaaagaagatatttaagttgttttccttttcctacttggaataagcaaagtaaaacctaaaaaaaaaaaaagaccgtaagtagttacaagggtggaagtataaaggagcagtcttttcttcttctttcaaccccacggcgcagatcctacgagtttggtctttgtctctatcttttcaatctttctctctcaatcgctcttcaatttgataacagcaaaggtttgtttgaatctctcttctttttgtatgatttgtattttggatccccattgtgcttgcttttatagaagttataggttttgatattgtttgattcatgtttgcttcatcctaatacaatgctgattcgtaaaggatcggtttttgtacaaggatgatttagatgttctattactgcgacttggttatgttttggttacattaattgaatccttaggattatgcagttgactttacgaagatgaatgcttgatttgcttctgctctttctatctctcttggtgcttctatgtttttatcaccttttacgtgtttgttatgtgatctcagagacaacgagttcgattataaattgtaatctgttttttttttctaatgtcgatttcatatttttgttatgcttgtccagtcatggcaggaatggcatctgatggaactcaatatgatcctcgtcagtttgatactaagatgaatgccatgtgagttaaattttagtatcttaatatctgaatccctttataacaaccaagaactgacttgtgtaatactttctagtctcggcgaggaaggagaggaaacattctacactaactatgacgaagtttgcgacagctttgatgcaatggaattgcaaccagatcttctcaggggtatttatgcttacggtaagtgaagtatttcctttgagaacacattctatacataccttcattgtttctgtctagttttgtattttcttttgtttgtttcaaagcttagtactgttactcttaaacaacctcatattggttttgttatttatcattaggtttcgagaagccttctgctattcagcaaagaggaattattccattctgcaagggtcttgatgtgatccagcaagctcaatctggaactggaaagaccgctaccttttgctctggtgttttacagcagctcgatattagtttggttcaatgccaagctcttgttttggcacctacccgagaacttgcccagcaaattgaaaaggttatgagggcacttggtgactaccttggcgtcaaggctcaggcttgtgttggtggaacaagtgttcgtgaggatcaacgtgttcttcagtctggtgttcatgttgttgttggaacccctggtcgtgtctttgacttgttacgcagacaatccctccgtgctgatgcaatcaaaatgtttgttcttgatgaagctgatgaaatgctctctcgtggtttcaaggatcaggtttaatcttgtttaatctcccattcacattttctttttctctctgataaaatcaagtcatttgttcttataatttgatttctctgtcagatatacgacatcttccagcttcttccttccaaggttcaggttggtgttttctctgctacaatgcctcccgaagcccttgagatcacaaggaagttcatgaacaaaccagtcaggattctggtcaagcgagacgagctgactcttgaaggtatcaagcagttttatgtcaatgtagacaaggaagagtggaaactcgagacactatgcgatctctacgagacactggccatcactcaaagcgtcatctttgtgaacacaaggcgtaaggttgattggctaaccgacaaaatgagaagccgtgaccacactgtttcagctacacacggagacatggaccagaacacaagagacatcatcatgcgcgaattccgctctgggtcttcccgtgtcctcataaccactgacctccttgctcgtggtatcgatgttcagcaagtctctctggtcataaactttgacctcccaacccaaccggagaattaccttcatcgtattggaagaagtggaaggtttgggagaaagggagtagcaatcaatttcatgacatcggaggatgagagaatgatggctgatattcagaggttttacaatgtggtcgttgaggagttgccaagcaatgttgctgatcttctctgaagcctttcttttttctgttttttactgagaaagtgctgtgtttacccctttttttggcagcttctctatgctttgatttttgttttcaggctactacttagatttatagttcttggctaaaagcgaacataactcattacatgattttgcttttttggcaatcaagaatttcggcattatttatctttttgtgaacgtggcttacaaggaaggatactctatgagactaaagacttttctctacttgagtttcattaatgaacttttgttgattttctagttttctactcttgaatttacaataaatatatactacataaggttggggacgagccccaaaaatttccctcgaattcatgaagtgagaagcggccatgtgtaaatccaaaggacatgagatcttacaaaattttcttaggaaaaataaatatgcaaaactgtactaagtacagtgataactaatcgctagtaatgttttttttttaaatgtaacaaacaaatctcatctaaaacaatatacaaacaaaaaaaacttcgagtaactaaatagatacagtattgaggttgtgattactgcactaaatattgaacaagatatagaggtgatgtctcattctataaatatgtcaaaaactcgcaagtgacaaaaagcagaagagaaagaggttggagataaaacccaaaagcaactatctcctttttcttcctaaaaaagcagagcaatctttttttgaggtttgtttgcaagtgaagatgttcagatctaagtcatgcagagaagagaccagaagtagcagcatcaccaacaagtaccattgcttcagtcatggagaaaaatcagaatcagaaccaacaaaccagcagccaccagtgatgatgagatcttacagtacatcaacttataatgcataccagaatccaacaattgtgagagacgactccaacaataaatcgaagagaagcaataaggtgaagaagaaaggatttaagggtttgtgtgaggcagagattcagaggaagaagagagtggcttcttataatgtgtatggtgttgaagggagagtgaaaggatctatgaagaaaagcttcaaatggttcaaggagacttgttcaaacgctgtctatggtttgtggtgatccaaccacaaatcttcccaatcttcttctcttgtttcccccattgaacttgtctgtttttattcttgttctaagtagggtacccttctaagtatgatgattgctgtaacaacttaagctacgataaatacgatttagcatttacaatatacttcattgattcattcgtagacatgatgaagtatgacataaccagaagatgcaactctcagatcctctttaaggaagaccagaacaattattgcatctgtccatgaattatagctctcatttcactatttttaccaacaaaaatgaccatttttacccacaccatatgagaagatactcaatataaaaccttctttcttttgtacgtttttttgcagcccgaggaatagttctaagaacttaaaacctttttgaagcacaaacgattttagctgttgcagtaccaaacaagacaaacacaacataaacagtgtaaaaccaaatggggaataaaagtgttaaaagtcttttgactttttagtctcgccctcttttgagtttgtctttctctgaaaatcacttcttcagagtcttttccttatctatgttattagagtgtgtgcttagaggcacaagtctccctccctgtaaacacaaatgcacgtaaaacatgaggagggcctaagagaggtcatctttgtcttttaatttacacttgtcccggggtttcaagatcattcactggccccaacgactaaaaatgcagactctcgatccctttaagattagcctcatagttcttcatgactgaagtagtcgcccttgaaggtgatgatagcttgttgatctcagatgagacgataggtgagtttcgactaacagggatctttgaattggagcctgatccagcttcaacgatttgagggtttgatggctcagaatcagttcccagaactgcagcttcgcgactactggatacagcagcacgtcttgatgacccagttgcgcggagaaagctagagcttgataactgtcacaagaaaaacaaacagctcagttaccattaatacaaagaacaagaatccaagaaactaaaattcagctgccaatccttgtgtatacaagcaatacagaaccttatgtttatttcttcaaatcagcagctaaagaattggatacctgtaacatggggggtaattttatgtactcaccactacatctttagatattgcaggatcacttgaaactggtgctttttgtttagctaagcttcctgagttaaaaatttgtccagaatttcgtctagggattcctgatgaccagccagaaggtctagcttcgtcgccacctgcaaagaacacatcagatgggtgaaaaccatgcccctatagaacagagtaacatagccaaatgcgtaatgaaatttggaaaaaaactactcgaaatagatggaactacctgatggcctctcagcactggtaatggcaggggggagggcagagcttggcccaactacaggaccctggaagaaaggtacatattcagcagagtttaagtaggacgatgacattcggaaaagaaaaactgattcttacatgatgacgaggaggaggagtagaaatctgtgattgctgatacttcaagatcgtccaatcaaatacataatcaaactggaagcctaatataagcagatgacgcaaactcaaattaacatgttgattaactggtccaagttatatttgcttcacaagactagaattaacataagtgattgaggggaccaaaccttcacgaataaacaggtcgcggaaaagccgtttcaggtaggcatagtctggcttgtcgtcaaatctcagagaacggcaataatggaaataagatgcaaattcagatggataacctcggcataaagcctaaaagaagaatagaatatttaatcagtattaaaccataggtgtcaccaacacaggtatcagaacattattttacctcaatagatgtcgatactttcttttcactgattttctcatacttttgcttcttattgccagctttcagtccttgccaaggaagactgcattacattggataagtaagccaaatgccgccgaaaaagaaccaatagcaacatgccaacaggtacggaagagaggtacataccttccttttaagaagtacatgagaacgaatccaagtgactccaaatcatctctacgactttgttctgtaataaaatagcaattacctatccagaattacgttctttaaaataattagaaagttagaaactaaatgaactggtattaccaatgccaaggtgagtgttcatgctagcgtatctagcagttccagtcaagtttttgttttccctgtgatacacaaaatattagaattataattgatatgaagaaacatcatatactgcaatcatacttcctagcaatacattaaaatgattttctcatatactaatgcatcttcgtaaaaaaaggggaaataagctatatatcctgagtcaatactaaaacgacagttatcctgaatagccatatatcctgaggataaagatgactccacccttttacagggatgtgttacatagaagaattttaagttagacaacagtcacacaagctagtaaaagatttttttttttaaaaagtctacataggcgtaaataaataacagacccaaagaaaatcatagggctataaccaacctatatggaatatgctgatgatttgagtctctgtacttctttgccagaccaaagtcgatgacgtatacctgtattcagtcaacaaatcgttgaacaaataattctggagaataaacaaattttactaacagcccttttcaacagctacctgatttgcacgccttccaagacccatcagaaagttgtcaggcttgatgtcccgatgtagaaatgacttctgatgtacaaactcaatgcgattgatctgaaagaggaacaaagatatcctaaacgtttattcaacatgagaacacaattttcaggctatagacgggatcctaccatttgatctgcaagcattagtacagtctttagtgagagtttcctactacagaaattgaatagatcttcaaggctaggccccaacaagtctatcacgaggacattatagtccccttcaacaccataccatttaacgtttggaacgccagctagaaatcaaggaaaggaaagcaacccctcttggataagaaaaaagacatcacaaactacaaatgtaaacaagtacagaactagatccatacttcctccttgtaatactttgtacaactttgattcatacagcaactgaggatgcttagttttcacattttcctgaaacaagaagaaaagatgccgtcagaacatatacaacaaacacagtagccaaactacgataaatctgttacatttcagagcaaaaaaagaaatgtgaaacaagcatgaggatttgatttaacatactcaacagtcagaaccagtacaaacaggtaacagaaaaaagaaacaaccaatgttcaatacagtaatatgtatagctgtcagcctcataattctccagttgtaggccacaacaaaattttcaataggttggtcccaccagttgcaggtagttttgtcgtggactctaagaattgattcagcattaattagactatttgctcaagaatcaataatagatctcagttcttacggaaaagtcaggttgaacccagatttaaactatagaaatattggtttgatcatgttgaatactgaatgaaaacagtcatagataatcaagaggaagcttaaggaagaactcaactaaattgcaacaatcgcatgatcagagtagaaaaagcagtgtgtagcctgttaaataaaattctattcctttttcgtctaaacacagtacaccaacgttttcattccgatcgattttaacatgtaaaaggagaagctacaagctaagaaagaccaagcaataaacagaagtctttctacacataagtcacaactcacaacaatcaaagctttcttcccactttccgagaaaattcaatcttttatttaatgaagatatacgtacagactttacattgcaatactaaattctatgtacttcaattaaacactgaaaatgataaagttccactttttgagtaggaattacttacaagtttaatagccacttcttcattcgtctggatattggtacctaaaaaccatgttaaaacaaatacttatataatcatcgcagtcacagagaccacaaacgagaggtgaatcagaataaagaggataccaagatagatctctccgaatgatccaccgccgatcttccttccgagccgaaacttgtttccgactcgcggctccatcaaatcgaaagctgataaaacctataaactacttctaaactaccgaaatcgattactagccaccactcgaatccaagagcttcacctttcgccggatttttttaattaaaaaacaaatagaagaagagattggacctgaagatttgaagggtttgggataagtagagccaaaaaaaaatcaaagggattgaaggaagaagttgtcgcggattccgattgacttccggcgaaagagagtcgtcatatcaatccacgcggcgaaaatatcccaaaagggaagggatagactcagaattgcttacactctcattttaaccaaatctctcttattattcttttctttttttattttctccatggaaaaataataataattgcggagttgttgggccgtactgaacccatattgggcaaaacccggcccagaataattaattaaattaaaattaatatattagtataaagtaagttaatttattcgccaaccacttcatctctaaagtcactagaaactagaaagtaacagacacgcaaataagttggagatttcattacctaattacctaaatgccaattggtggatacgaaaccatttactaaagcaacaatttctataatatttctttgtggaaacttatgaaatgaaattgagagttatttctagttgaaatgaaaatcattttacaaatcactgctattgagagttatttctctctttttttctaaagtcaagattcacttaacagattttgtataaacaaatttatataaatgaccaattaaatgattagaggcacagaagaggcacagaagaggcacagaaggaagattctttgttatgtttttttgcattctgtcctaagtatacacaaaacctaagtataatgtgtacaagataaagaaaaattcgaacccaacaagtagaaaaaacatcagaggctactctttacatgatctcactctattataaactctcaacaaaattagcttcaagacctgtctccaaagtctgatgcatcagagaattggacctgtagaaaaacaacaaacactatacaaggctacaatgatctaggtgacattgcgtcttgagctgaaaaatgtgagagatttgactgtttcttgttcagtttcgaccttagatgcctgattttcgcatcgactctagctgtgaatccgatctttgtcttttctcgggcttttgtacgctctcgggtccacaatctcgcatcttcaatatctcttccgtagtatttgatctcttggatgatatgatgatccaatggattcaagaatctctggaatgcaatgtgagcaacgtaaggaagaactgcagccactgtgaccaacaatgtagccatccagtagataggtgcaggagcaagaatctcatcaagaatcctgtaaatgtttccagaataactcggaggcatcatactgtagatagccacaaagagataccacataccgatgcttccccatatcaaaacgtgttggatccaagtgaaatgggacatggttaacgcgatttgaacattagctgcccagattatgcaagtgaacatggttgtgccaacagcatccatgtcagctgtttggccattgtctctgaaagcttgagagtaaatgattccgatgttgaggaagaatatgacaagagatgcatagacgccattgcacatccatccaagtattcttgaccaatcaaagaagaggttctttgtgccttgttggtataaagctgggaactacacaagcacaagcgaaaaaaacacagattattgtcgatgatcagcagagattcgaaatagcttttcaagaagggagatttataaagcttacctgtaagcagatctcggaagaaacatcctgttcaaagacaccaagggcgattactggcaatgaggtaaggacaacattgaagagcaacaagtagtagtcattgtatactgattgcccggaaaacccggtgaaagcctcaaagtagaagagagtgagaccaaatgctatgtttttgtagaagaaatagcaaatctggatgtagaacaacataaggttagaaacaaactaaatgtaagagtaactaaaatggccaaaagaactacatattaccatctgagctatccttttgtagcaccagtgtccgtggacgacgagtaatcgttccagaaaccggaactgggcaatcgaaaagtcactagccataacagcctgcaaaagtaagaaggatcagcaaaaatgtcgacatggtttgattttcaatgaactttctgctagtcaagaaacagaaaacatggcttgaaaaacagaaaaggcatggtgctgagagaaaaactgaacctgcattccttcaaccccactaattcctacaccaatgtcagcttcttgaatcatcccaacatcatttgcaccatcacctattgccaatgtggtttttccagttccctctttaaccaacctaacaaccttgaatttgggaaagagcaaaatagataaatttagattttcttttttttgtatgaagtttcgggagttgcatagtcaaggaggaatgcgatgaaacgaataagggaaggatatatatatatatacataccaaagccttctgcttgggagacactcgacagcaaatgactgatgcacaatccactgccaaagccaagaattgatacttcatatcatcctccaaggcataagttagagttttcccgtcaataatcaaagcaaatgcagcatgcggatccttctcaagcttcaccatttgtacagcttttgtgagttgattcaaaatgttctctttcacaacctaacacatcagtagaaatataggagtgaggttcgaaattttagttgaaggaactttaaattcatactttagcaatatgcatcatgcaactccattagacataccctttttgaatcttgggatcctccttctgaattcattgatgttatgcagatctgtctcatgccttgtcgtagtaaactacacgcgaatctgcagttcataaaagggaatttgtgcataaaaatcactggataaaagcagattacagatatactttctagtttatgttcaaggtaaatcagagattctaacccaatgttgattgcagtttccattttgtccccagttaaaacccataacttgagcccagcttgagcaagtttatctatgcattggggcacctaagtcagatgaaaaagaaaaggaattcagtttacataagcaagacaaatatggcgttagtgtgtctgtgcaacaatgcatacccctttctggagtttgtcctccacagcagtagctcctataaggataagttctttctcaatcatatctgctcccgtctcaagcagctcatctctatcagatcctattgaagttttggccttaagaaactcagagttccaagctgcatattcatcctcatcaagctttctgtaagcaagtgcgagtgtacggagtccggcttctccatattcagttaaatgcctagtggtaggtcccaagtatgtctttccattcttcgccaaccgctcaaagatgatgctgtaaaattcaggaagaaacagttgataaaagtaaagatttattgtacataagcttctagatgtggtcaatgtgacaaattgctaacctgtcagctcctttgcatagtagaagaatctgcccttcctcatcgcgtacaattactgtcattcgctttcttttgctcgtaaattccaacaaattcagaactttgtactccctgcaatgtttttggtacttactcaggatgcccgcaaaaaaaattagagctaaactgataaacatataacatctttactatctcacctttcgattatttgccctgaaccagagaacctctcgcggataaaaacacttgactgggttctcttgaagaactcaaaaccaaactctctagcagcagcaagaaaagaagcctcatcaggtgactctgcttcataagtgtacttgccagtctcctcgttcagctcgggaatagctgtgtgacaaatagctaatatgcggaagaactgcaaaatgtcatttggttgtgattccctcaaccaattaccattcataagtctgttatcctcaaaaccaaatccctttataggagctctaggagtattatagttattatccccttccacctcgatttcttgcgtacggctactgtcccatgtaccatacactttagtctgagactgaggagtactcgatatctcaccgtgctcttcaagatccacagccatctgctttgcagcagcaacttctacttcgctggaacgcacaccataagaagtaccagcaatggagcatttcaagaaatccatctgattacatgtcaaagttcctgttttgtcagagaggatagtatgaacctgaccaagctcttcgtttagattcgatgtgcgcgcatttgcagggactccactctcatcatcatacatgtgtaagtcttgattgatgaaacttgcttgccagactttgacaacctcgatcgaaacataaagagagattggaatcaaatatccataaagcaatagagcagtgatcagatgaacaaccccagcatagattggattgatcggatttgtgaagtctataggctcgccaggtcgtaagtaccacatttttggcatgtgaaactctgtctcccaagcaaatcctgatgagctgatgcaagagattaaaataagtaggacaagaagagtgtagatgatgtagtccattgtcctttctattctgcttctcttggaaggcgactttgttgaattctgcataactttggtatcaaaaccagtaaataccacaactccataaacataggttgtattcctaagctttgagtctcttaagagaatctgacttggatccagaggaaatgtttgcctctcaaactcaagattgccaacaaaggtatagagattcgggtttggatcttcacatcttatcgtcgccatgaaattcttgaaagattcatcatcatctagtggcagtgacacttccaaagatcttttcactttcaagtttgtttcaccatctaagttcatagtctcaacgtagcaaatcccatcctcgtaactcgatgacaaaagaagcaaatcagcagggaaaaactcatccttctccactttcacaatatccccaacgctaaccttcttccactttctctgacgaaacacaccgtcacttttatgaacacaagttttccgcgcattaatcttcacgtcttgcataaacctacgccaatcttctagagcctcttttaacatactaagcccaacaacaaagaccaaaggagcaatcatgctccacttgttgaatggtgatagaggaaacaccgagagaatcgcagctaccaagaagtagagattcgcagcacggtggaactgctcgtacaacgacttaggaaagaaagtgatcaaattgtacctcgtcgtagagacataattagaacgatatctcaaaggtttcttcttgtgcatatgaggctgattacagaacacagtccggctgaaacccggaccttggattggttgagaatcttgaccttcaagcgtagctggcctaagacatccaaatgtataaagaaggcttagtcgcagcttcgatcttattctacctcgagccattccacaagaacttctctatgatcttttaacaaaatccagcactttatttcctcaagaatcagattagtgcttcatatctcatagtcctgtagaaaaatgaaccaaacccattagtaaaaatttcgaaagctttgatctttcagaaacataattaaaatggcagagaagactgaaacaaagaagcataaatttcggaagctcgtcacataattttaaacacaaaaattattaaacacaaaacatactcaaaattggtcaacagactcgaatctgaatgatagcaaatcaataaaattttaaaattgcaaatctatcaaagatgttgactttacgaaacccagagaggaaaatgaatttaccaaacaccaattatttcaaacacatttgccttcttatgactatttgaaatcatgaattgattcttaaattaagatagataaggattaagcaggaggtgatgaagaacacgcaaacgcaatttgacagctgtaaaaaaacaaaagctgagacaagatcccagaacccaacaacaagtcaagcacaatggaaaaccccaaaacgaagagaaaatttcagacaggtttagtggagatttgtcggagaagtagagaatcaggagacaaaccaggaatcaaaccagagattctgtggataacatgacaaactaacataaacccatttgagtgaagaaactgattgattcgcctagaatttgtcggcaatggttagatcaagaagcaagagcacaaagcaaaaaaaatgcagcttttttctctctctctctctatcagctgtctttttctttctcttgttttctcaggagactcaaaaaaagaaaaaatagagaaagggttttagagaaagacagagatttgttttcttgtgtctgaaaatttctcactcgtttttgtttttgtatatcaaagcgactctgcaaatctgaaccagtgcaggcactttcgggtctgcttcttcttcttctacttctacgtcttctctctctctcttcaacaataatctaattaacttaattaacaattttatactagaaaatagtctaattggtagatacgttattatcaacatatacgtatgccattaccaacaaaagagagtttttaacttgtgagagagcgctttgcaaagtaaatcaatacaaaatctggaaatatatatatatataatgtatttatgatccagctgtaattatcaaaacaagaaaaaaattgtaattaatccgtgtttaattcgaatttcagaatttaaattattttattaggcgtgactgttgaaaatttgttattttcctcaaaaacaaatattgtctctgttttctagaatatcttgattttttttaatgtatagtatttattatatccctaacattataattccattctcataataatgttgttttatatagtagtatattacattcctagttttaattaacctcctgtaatataactacaaaactatgaataaagaatttaaagaaaatagcatgtattttaatgaattttgtgttctgtgtaaagaactctcttatagtacgaaaaaaaagaatgtgtaaaatcttggagtattttggtaaaagtccataactagaaagcgtttgtttctgaatatcactttcttaagaggaaaacaaagttctagttttgtcccgacaaagaaaaaaggaaaatcgtattcgtaggtctatgatttgctgaaaaagaaaaaaaagggtatctgattcagaagcttatgagagatattccaataaagaaagaaaaaaacataggggagagagagatggtggtgacgttgtcacaacctttttctcatctgcaaaacgaagcaaatttttcagggagtggttcaaccaatccccaccgtttctttttcttgttaatccatccatcagatatatggaactccagttataaattttaaatcagaatcttatgcttgtattttcgatatggttgttagcatataaacatatacttacaaatcttaattaactaggtaaattctataaacattctacattaccaattttgagacatttggacgttggttttggttggactcataagaacatgaaatgttacaaactatatatggaaaacttcttccgtggtagatgaaattcatgttagttatagatcgggataaatatttattggaattcattgctttcactaatcgggtaagattgttttcatgtacagttacgtgatgaattcgtgtagtggagattgttttctaatatcaataactcgaatgacacacacacacacaccttaagagaaaaagacgtgatgaacaaaacaaatctgtgaatgtatttaattttacgtacattaaataaaacaatgtagatgttacattcttctaaccaaccagatatttttataagatagaaactgtgccgtgacacgcttcatattttacattacgtgtatttcgattagatgtttagatgtaattataggataactatataggtggattagtgttttggagaaagagacgttaagttgtttgctgttgacctttcaataaagcatatttgtcgacataatgagtgagtaaatagtacaaagactgtcactagccaaaatcaaagtttaactgaataaatcctcgttaccatgctaaagtgtaatattctttgaattttaaacattagaaattgtaaacaatcgaatttaaatttggatacgatttgacgtttttttattaagaaaaactcaatgaaccaaaaacgaatttttactttgttcgcgtttttttgttgttgtttttgtattaggatttacatttgtatactgtcaacgtggaatatttaaggtattgttcttttttccattcaaaaaagctttcatcaagttaactttggttcgaaggataatcacattggatcggtccacgttcatgattctatagtccttttctcgagttttgtactttcttttttttccctgcacacgatattgaccacttttttttttaactattttcactgacttttatggaccctattgcatttgttactgctaggtccccatcctataaatgttttccttttcaactttttttttttctgagtaacttcagagaatccttcaacaaaaaacgagaattactacatacatatcaaaattaggccgaaaccaaaacttacttgtggaaaaaatggcatatgattaggacattggacaagccgttgtaatgtcgtggtcaaagtccatactattgattacttcaaccaacagctcatcgtatccgttggtttgtatgactttatcaaccgaaataatactctgatcaaatcccaaatcggacgaccaaaaatcgaaacgtggagggagggatgaggacccacaaagaggagtcccacaacggaatttaaatcgttggttcatttaaaacactaatcaacgtggtggtcctctttacgtgcaacccaacacggcttggtgaaaccaatcaatccgccaaattaaattctaaattgtaagtatgtaatttattactagtatacattttgttgtattattgtagtattacgtttgtaaatatatttaagtatcatatgggcttgtctggttttaatgcgacaaatattttatagaaagaatgatagagtaaagaacttttgaagactttagaagattagaaaatgttttatttgattgatagtgtttatatttttatatctaaactctcaatccccaatatatttcctaataagaaacgttttaaatttaatatccaccggatgataaacaggtgtcgtatgctattacgtacaattcttttttcctaataggacataagaatctagtaatcatataatttctttggtcccgccgtatttatacgacaaatcaagctaactataagtctataatcaatagtggacacgttatatatcgtgtataacatggagtgtgtaaaatcattagaagactcaagtaaccatttgggctttagttcaattttcatcagttttacagtttgatagtctccaataatatctttcgttccactaactaaaactcgatttaaattatctagtatttgttttgaggatatatgcatccgaataaagaggattcaaaagtatcaaaaagtgtcaaaagaagaatgaaaaaatcataaatggcatagtggtgacgattgtaactttcttattggagtggttcgatttccaaaatcatggggaaaattaaaagttaggcacatcacattcataagagtacaagacaactctcataaaaccaaaagagtcgtttcgtttggtgtgctattttaccaatcgttaagtctatttcttttttatttcctcccattacaacaaacaaataaagttgaaaagaaaaacaaaaaaccaaatgatattttgtctattgactccaacaagataaagtcaagaaacaatcttagtgttcttagatacttttattaaagtctctgcaaaatgctatatggtcttcttctatagagaaatatcttctggttagaaatcattggttttacatggttctatagaaactctctcgaacatatgaatcgattaattctttctgatcaaaccaagtagattgacgagttcacaactttgtcatgaaaatgtcttcatctccacaagatctacattattaaatctctatgatcttcgagatagattataaacttggttcaccaccacctcactaacccgtgagggacatcaattcaaataaagttacaaatcagagtacgttacaaatacaatgactaagaaactcggtttactccaaaccggcaaaactcctctttccttataattcataaaccaaacatcaccatcttgaccatctcttaaaccaaagacttaacaatctcaattcgagttcacacaaattagcattcgattgtgacatttgcaaatgtaatggagataggacatagtattcatcactttaaaacactcttattgataaatccaagagtcacttaactttttctggtaatcgctgttaaagactccaactcaaaaacaatcacattattccaagtcttaacattctgatacgattcattacaagaaactgagtttatctaagattttcttctcacttgtgcattaacatatatacacacaacataacacagatatgatacaatttcacttctttgaagaacgcttgggagtaacagcattaaagatagcttcaatctcttctttcagtcgttgaaagaaaccaggtcctttcacataatcaattggagtgctctcatcaatgtcgtcacttgttccatgagtctctttgtcatggtgacgactcttggacttttcatgatgacccattgcctctatttcttctttaactcgttcaaacacatttggcgatttcacagtcttctcctctgtggaaatacccaattaaaacaaagggtttagattcgtgtttcataagagacaaaacagagcaacgaatcaaaaatagacttatcatggcgtgtttctattgtttctttagagaaatttccgatcaaaaccatccattaatagacgtgtaattttgattgtgaaatttgaggaaacgaacataacttgatcaaaaagtcttcctttttaacaatatgcataaacctatgatgagatctgatcgttcattgtgtttacctgatcggttttgatccgccatcgatggtttttgtcttcttgatcttgcagctttctatttttggttcctgattcggtggcgttttgcgtcagatgcaaaagagtctttacagtataaatcaaaatcgatttcaacttaaatgggccttgttgggttataatgggcctttttgtttgtaagtgagtccaaggaaaaaaaacaccagaccagattgaaattgaatcacttgcaaaagcaaaattgattactctgttttggttttggatcagatcaaccaaaggaagcgaagaagaagaagactttatacactctcgacgctattgatttcgtctgtgcagttttgtttctctatcagttagttttaaagatgagttcttcagagagtgtggaaaacgagtgcatgtgttgggctgcaagagatccatctggtcttctttctcctcatactatcactcgcaggtgagattcatatgatttagtgatcattttcaagcaacaatctttgacacacaatcatcatcatccaggtctgttacaactgacgatgtttcactcacaatcactcattgtggagtgtgttacgctgatgttatctggagtagaaaccaacatggagactccaagtaccctttggttcctgggtatgttttcaaaaaccaaactttagattatgaaattgcaccttactagtggaattgatattcatttgtttttccttattgtaaggcatgagattgctggaatagtgactaaggttgggcctaatgttcaacgattcaaagttggagaccatgttggtgttggaacgtatgttaactcctgcagggagtgtgaatattgtaatgaaggacaagaagttaattgtgcgaaaggagtttttactttcaatggcattgatcatgatggctctgttactaaaggaggctactctagtcacattgttgttcatgaaaggttgttataatctgctttcctctcttgccatttcatacttttgaaagttgttagtgcctatatgagtttagtttgagtaggaagcaaatgatttctcagtactagtttcttttgtgtttcaaatattgaatacaataggtactgctacaagatacctgtggactatcccttggaatcagctgcaccattactctgtgctggaatcacggtttatgctcctatgatgcgtcacaatatgaatcaacctggtaaatctcttggggtgatcgggctaggtggtcttggacacatggcggttaagtttggcaaggcttttggacttagtgttacggtttttagcaccagcatttccaagaaagaagaagctttgaatctgctaggagctgagaatttcgttatctcatctgaccatgaccagatgaaggtagtgaaatgacttaattagtttcttgtgattatttaggattggaaccagataatacttaacttgtgaatctatctatgcaggcactagagaaatctctagactttctagttgacacagcatctggtgatcacgcgtttgatccttacatgtctctcttgaagattgctggaacttatgtattggttggtttcccaagtgaaattaaaatcagtcctgccaatctcaatcttggtatgtttctcaaaaggtcttataatctccaattttacatacatactctttaagatactgtcatactgaaaccaaagatgtctggacaggtatgagaatgctcgctggaagtgtaaccggggggaccaaaataacacagcaaatgttagatttctgtgcagctcataagatttatccaaacatagaggtgattcccattcaaaagataaacgaagctctcgaaagagtggtgaagaaggacatcaagtaccgtttcgtgattgacatcaagaactccctcaaatagatgttgctcaaaggaaggaataatggagtctgtaataagagaataatactcactgctacaatctttattacgtattttctcgtttttcattagtaaagcaaataaattaagactactgagaagaaattgctcgtaagcttgggtaataagaggaaaagagatttacaaaaactacaaaaattcccaaaattagactttaaagagttatgggtaaaaaataaagaaacaagaactaaggtggccatctcgtaataaactctatatatatgtacctaactcaaattaaaggagattaatatcacgcgaggcatgagagataaattatttctttttccaatgtatgagttatttaatttatgtggacgaaagcgaaatgtcaatgaatgttgttaccgttaaattaaaaaaaaaatgatttttctccttccttccccaaaatttcaaatttcaaactcttctcttcttttaacaattgtaaacctttttgtcgacatcattcttcaggccaccaaagttcccagaaactttctctttcttcttcttctccttcttcttctctctcgagtttttttacaaatatattctcgaacccacctttctccgccggatctgattccaaaacctgtgaaagtctccagctttactacagatttttgaagaacaacaaaagggtttcaaatttgagcaaatgggtggctctggaaattggattaaatctctgataactaacaaaaaaaacatcactgatgatcaagtaactctcgaaaaggctctcttctttacacttgatctatctctgttttcatctctcagtaactgattctattgtttttgcaggagaagaacatcaagaagaaatggaaactatggaggacttcatcggaaggtttgatttcttcctcaaagggtttcaagagccgtggtggtagttatggaactccttcgttaggctcagatccgccgtcattctctgctgacgactctttcacggcggctgttgctgctgtcattagagctccgccgaaagatttctttcttgttaaacgtgaatgggctgctacacggattcaagctgcttttcgagctttcctggtttgtgaatttaaccactattactgagattgcttcactgttcaattgttaatcaactctttacatagtctgctttggtttagtgacctgttcattggttttaacatctgattgcaattctaatagaaagttagaaacttaaatcaaccatcaacacttaatggatcattaaactaagtcaattcatttgagcagctcatttgttgtcttctctgaagcttttgtggttaatgtttttatgaatgcgttttacaggcaagacaagcgctgagagctctgaaggccgtagtgaggattcaggcaatattccgtgggagacaagtccggaaacaagcagatgtcaccctaaggtgtatgcaagctcttgtacgagtccaagctcgggtacgagctcattgtaacagggggccttcagatggacaggagttggagaagccatctgatcaacaaaaagatgatccggcaaaacaggctgaggtaatgattatcagatatggattttgggatagaatgggactcgtgggagactaaatgtatatgttttgcaatgatgtgttgttcagaagggttggtgtgatagcccgggaagtatcaatgaagtgagaacgaagctacaaatgaggcaagaaggagcaatcaagagggagagagctatggtatatgcattgacacatcaggtaatgcattcataactagaatcaattttgcgaggattttactctctctcagagcatttgtgttcattgagtttctcaaattttgacacagccgaggacatgtccaagtccggccaaggcgagcaagcaagggagtgtcaaaaagaataatgggtcgtgtaagagcagtccaggttggaattggcttgaccgatgggttgcagacaggccatgggaaggtcggttgatggaaggtcctacaaactcatcagaaaatgcaaggaaaagcgagagcagtgtgtctgaacatgatacggttcaggtcaggaagaacaatctcacaaccagagttttggctagacctcctccaatgtcatcgtctgctacgagttctgagtcttcatcgacttctcaatccccagttcccttctcgggaagtttccttgaggaaggagggtactacagaaagcctagctacatgagcctcacacaatctattaaagctaagcagagacgatcagggtcttcgtcctcttgttccaaaacaccgtttgaaaagaaacagtcaatgtcttacaacggagatgtaaatgtaaggcgtagtgctggttcggatccgttgaacaaccagtggactgatctatacccaccagctcaagtaacaggaagacatatgtgggcaaagagccagagaggctaagcaatcgtgccttcaatcatctcaacagcttgttggtcccatgaaacacatacacggaatatagatacagaagcaacttctgtttatcttttttttacatatgaatgttaaggaattagtttcgagactacaaatgtcgttgtttggcacttggatcattaatcgtttacttctcgtatttctgaaacaatctattcctagctcttgtcaatatgaaatcaagatatgaatgccaatgcctttttatagactaagaacagaatttacagtagaattggtgagcaacaactattacatagttctaatacacatgagatctgtattacttgggataactcaggatgagtaactgttttattgctttagtggagctttcttctctcggtctgcaattctagcaggtgcgttcgagtgtgacttgaaccgtccccttcccccttcttctctcacctgaaatttcgacaagcatcaacatttgatgtagcattctcatcatgagacagagatcagaaaatagtttatgcttctgtacctttttcttgacaatttgaacaacatcttcatcctcaagatgatgaaaaagaccacagtgttgagggtagtgcctagcgcttgtgccccaaactagtgcatacttcatatccttcaccagagttctgtggacttggttacagaaatcttcaactgtgcagccacctctatcctgaggagtgacacatgtaatcaaatattactgtcacagatgttattgtgaagtacaaacatgaaaaacatatctgtaaattcttatctatacaaaataagcctgaatagtgttgaggatattatacttacagctgagaggacaaagggttcatcgaaatctggttgctggctttgaggctttgagtaaactctcacaagtcccatttcgtcccacattcttgcaagtagtctgtctaagtttagctgtttcaagcaacaccatcatttaccattagaccagactgttccagtatattcacaagtttcagactatacaggaatcagaccattatgaagaacctagaaccgcactggataggattcttatttagacactactatagtcaaaataaaagaacttgcctttaggttgcagctaataacaatagaatttggctgccgtgccagcctatcaacgtcatcgattccaacaacatctattttgttgtagacatatacacatttgatgtatttgcgattgccttcaacgacatcaataaagtcatccaccgtagcatcttcacgaaatagaacctgaaatttttattactgaacccattggacatctctcaacgaagcaacaaaatatatgatttaaagtttttatagttcttctcctaactagcggacaagagaggcacgtaatgattcttgtccgaggctgaataaaaacaagattaaagatggacttaagtacctcagcattgtgaatcttgtattcatgcagaatttgataacagagcttctcatcaatgcgagtcaagggggttgtagtgttgaaagaaatcccaccagtcttcttcttcttaaagtatatctgttagaccagagaaagcaaaacaccactaaatggtagcacatcaagatagtgcagcattttcaaagatggaaaacagaaattaagcagataaagtgaaagagaaccaagagtttctagtttataagatattaagggagaccattgataaagatgagatttacctgtggaggtcttttgttcagacgcagaccaactgcttcaagctccttagtcagtatttgcctgtggccttcactctaaaacgattttgggaagaagaagtactgagactaaaatagcaaaaacgaaaaaaagacagaaccagcacaatacttatatggaaatcaaaaccatagctcgtacttttgaggcatcaagaaccatcaacacaaggtctgaagactttgcaacagcaataacctgaaaaacaaacagtttccatctaagtttatttcatagcaagggattagagactaaaaaaaataagaatcaattcgatttaaacctgcctccctcgtccctttccttctgaagcaccttcaataatcccaggaagatcaagcaactggattttggtgtcattgtagtgaataactccagggatgcatgtaagtgttgtaaattcatatgaggctgcttcagaatgtgtgccagttaacattgtcaaaagcgtagactttccaacactgcaaatcacagccacaaacacatagtgagggactctgaagttggaacaaagacatatacatggatcatggatgggcgtgaatttaggatagaccttggaaatcctataagtgcaacacgtccatgcccatactttgtaacttcaaaaccatccccacctccactagagccctgttaggtagatttgaaagacatttagaaatgaagactaaatactctgcttcagctatatacaataagaagttgcattacttttggaggctctaagagttgtgttctgagctttgcaatttttgccttgagctgaccaagatgatactctgtccaaaaaatgtaacaatattttcattagctgaccatttcttctgcttttgtttcagaaatatatgacaaatcaatgtctatacatctatacgttatataatgtaaagagaaacctgtagctttgttcttctgcgtccgagccatctcggcttcgatctcttttatcctttccacaattcccattttctttcagaatctactactgcaatttctggagataggtaaggactgaggtatcttcactagtttcagcataaaaagaaccaacaacaatcagacagaattcaaaggcaaatcataaaatcaccaccaaattaaccattaactcaaaaagacacaaactttaaactgagataaatcatctaaagaactctaaaattagtaacatatctaacaaacaaaatctcaccactttggcatcgattgtctaccgatcaaacaacattaaaagatcgaagcttttgcatgaaaggagagaaattttgatgagttaataggggtaggatggttctagagaaagcgagaaagatacatgtacgtgttggtcgagaaccacctccaaggaataatggatcgaatacaaaaaaaggcccaattcaagtccgagtcaaacttccatggatattatagagaatcattcataccaattcaggacacagacactacttaatacttttctcataaatatatataacccacaaagcctccttagaaagttacaagtctactacagaaactgttatcttatctcacatttctcgtctcccttacttgagttgctattttacaaaaaaaactcagctacaagaagtcggaccttgtttccatttcctttctgttgctatctccaacaaacttgcttactgagattgcttctccgcaagctcccttacccgtaacagaatctgcgtaggaatatgcatcgacccatgtttcttgagacttccctggaaacacgacagtatactcataagctctcgttattacaacttgagcaaaagaaactccagttggaagctaaagggatagagagagagagagagagagagagagagagggaggtaccacgctgtttgagggactctgagcaaagcttgtcttcaaaaggtttcgccatttgtcctaaaaaacaacaagatgtttaaaccaaagccttgattgatagtataagcaaagagggttaaaaaggttgaattaccttgagatctacagaggtacgataggagtgtgatgaaaacaaatgctttttgatttcagaccacttcccggctccatattttgatacaccctcaactagttttgctatctcagacagagtccaagctcgatgatgcttccttctaagcgcaccaccttgcatgattggcacaccaatgttattctcatccgagctatttccagatgagtctatgtgctctggctccatctcttgatcaacctcagagagaatatgctccacattgttctcgtcacttgtagcaaactgcattcgcaaaccaataaagcaatgagaaactgtgtcatacctggaacaccaaattcatcttatatcaggtagatggtaaatgagatctaaccctataccatttctactatcagcaaagtacgaaatgagaattacgagagtaaggtaacttaaacaacagatatctcttacttcgttttggaccggtcgagaagcagacttttccaccgaatctcggttcacaacctcactgcttaactgggatggactcagattgaggttactctctgctgcactagctttatcttccaagtaactggaatgacatccctacacaatgttgtaaaatccttaattacattccgacataacagcaaagcaaaataatggcatagaagatgatcacttattttattatttttacatctgtgcttcttgagatagaatttggcatgtgacacaaggcacagatgtaacacgagccagatgattggaagcttttttcagttcaaaggaaaggtatgagattaatttactatattgaggagcatgagtaaccaagagacataccaaaagagccataatgttctctcttggacggcttctccggacatgagaaacataaggaacctcaatttcagatccagcaagggataccatcctggtgacagtaactctcttccctgaggagacactgatagacctgacctcagatttttcggacaacctctgatctttagaaggaatcactgacttgtcattttgctgtttatcatctgtttccgaaagttcttcaatgtatcttcgtgtaggcttcctaactcgttttgcagccctctgttcactggaataatcctcactagcgtaatagtggttgccaccgtttgaatgtccattcacatgatcagtactcgatggagcatctttcattttagtagctcttacgtcatctcccatctcctttctaatggcattcgtcacatcgttggacttctcttgatttccaattaacttgttatctttcaccctcaagttagttgttggtacatcacaagaattaataagtcccattgcaatcctccttttaagccacgtcttgtccttaacagtcgtatcacggccaaaagttgccctgaatgtttcttgcagtgctttaatcggtaaattatccaagcagatctcacctctaactctagaaaaatcaggtttttgagcagcagcagacaatgcagtttcttttggactagcaactgcgtttgagcatcgttccatcatatcagattcattcatcttgcattcatcctgcagtaaagcttcatggtggacttgatcctcctcaaaaaagttgttttcattagaacactggatattggcatctgcaggagtggaaggcatctgagatccatgtacattctcaagcctctcttcctgttcaaccttttgcaacatctcctcgttatactgcaaaaatctcaaagatggagcaaaatcttaggagtaagaccatctggtctctcatggagttcttatgaaaacattaagaatctaactgtggaaatgatacaatgccataaattttaattctattttcaacacttttgaactggtactaacctcagatcgagactttacctggtctgtatatggttgcacattatcagaatgcaataaacctgaattgatagctgaaagaataagaaaatttatcaccaatttatctgaatcctcaacgtaagatagagaaagccacagagacacaagcatatatatcaataatagaaattggtatgaaattgcaatagattgatacacatctatagtttggaaaagaaaccaaaaatttagctctctctatgatttgcatctagcataatcactctgtgtaaatatatgaaatgtttaaagaagtgcatttggatatacaatgcattcctgaccatagaaacatatgttccctgagaaaaggagcataattagagctaaactaccataggcttttaagcaagaacggttcaacatgtaagggtctaagggaaccaaaccttctgaactttcaatctgggacaaccgagaaggtatcccttcagctggaaggtaacctatagtctgacaagcatctgatgcaatatgcatatccgtctcatcgacctccacattttcttcatcggttgcaaggtagcctatagtctgacaagtatctgatggaatatgcatatcggtgtcattgacttccaaaatttcttcatcggttgcaggcactagactcccatctcctgaaacctaaccatttccataaacaacccaaaataagattttgaaaggctggctaatatatatagtcataatagacagatttctcaaatccagaagcccctattagattattttgtccccgttctaacttggaagaagttcacagaagtcagaagccacacgcagaaatcaaacaataggattaactataagagagccagtgaaaagaagacatttatagccatacccggacaagcttgtaggcaacaggatttccaatctgatttgttgaagaaaatggtgtgatccttgtctgagcattgccctcaaacatatctctgcggtcctcaacagttccaaccacagttcccatcgcaaatctaacttaggaacacactatctgcaatcccaaacagagaaaaagcaaacaaattgatatatgctcaatatattcttcaagtactaaaaaaaccaatctaccaaagcatgtttcagtactacatataactttaccaaagaaaaaaacaattcttttactatttgacagcatctctgtacaatttcacaccaaaaacctgaacacaaagcaaattctcatacaaataacaccatcagacgaaaacaaagcagccccaaagtgagaagtatctattatcaaacaaaagtaaagccctttgaatattaagtataacactaagtatacaaaattaagaaagattaaaaaattgaaattccaaagaattcacaagtttcgcaattgacaaactaagaccttgcattctcacaatcaatttgacaattttagatcgaattacgaatacaacacagaaatacaacaacaacatattaagaaagaacaaaatcaaagcttgaaatgtagaaacgaattaaaaaaaggttgaatttttattgcttaccaccggaaatcaagttttgtcgccggagagtgacaaatacagcaacaagcgattgattacactttccggttacctcaaagcgtcggagacttaatcatgtctaagaaaacagattaatctacgatgatttcagaggagaagtttcttagacaagcaaaaaaggttaaagaaaagtggaaatttttggtactgcttttatgtttggctccctttaggctttttttttttccagtgcttagagcaaaattaacaggtcccggactccaaagcgttttattaactcaaaaataactttattttgtgatttggaatccgtatatacctattcagctttggtccgatatcgaagcattgccacgtcagtaaatagcttaatatgccaaaacagagtaaactacgttccgttttaggtcacgtgtgcaagacacgccgtgtcgtctgctctatctagatcaggattgcacgccgtctgtgaatttgacactcatatgttaatttgtaatttttttgctctcaaattgttagatgtttcacaaagtttgaattattacttagtacatgatagttgaaaacataaatcaacatttctttgttgctaaataatgtccttgatccttgagacatcattgtggacttctcttctcttgcaacaatgatcattttgctgcatcatgaatggaagttgcatgtctgagtagacctgtttctcctgcaacaatggaaacttgaaaggaaaaagaaaaaaactaaacacaaaaccattaggacggtaagcaaaagcactaagttatcatggtgattaggttgggataagaagtgagtatcagaccacatcaactttagtggatctcaaactgatctctgaatgtgcaaacgaaaagaattgtcataggaaaacttagaacaaatgtcaacgatgtaaggtgcttccgaactcccaagaacttggacatagatagttcagagagactataaactccatttttaatataagcattgtcactgaatcctcttataccatcaaaatttggtgtaaggattgagcagagatggatcaatgctgagaaaacaagtaacaacaacaataaaatcatcataagaattttttttctctatgaaagaatatccagagggagtttaaatcaagatttatatgtcattaagcaagactactagtgcaatctcaagtaagaacgagctacatcataaatagataacatgactaaggtatatataatcaaacgaaaacatctatgaataaagagactcatagaagataacacaaaaaaagagagaacaaaactagaaactagcatgcacacatttttatgaagaaagtcccaaactttatcagcagaagaacgttgagataaggttgcaaaatgaaaggacttgctctggacaccttgcataacaatcttatccgatccaatagcaggtatttttgtagttatcccggtttagagaaacctctttctcatctagagggttactgtgaactgttgagagatttacagtagaagcaaggtgaggacgaaaccttatctttgtggttgcagacatggcgggtacttctctaccttcgtgtctcctcagtcaaggaccttcgttactcttctcttcttcgaatcaggactcagaagctaataaatgtcgaattgggataacatctggaaaacgttgtcttgttcgttgtttcgctaagaagaaaatcagttttgtggatcagattctcgattatatcgaaggtattctcattgccatggaaatttgaatttgaattttttatgagaagaaaaattgagactttttaactgtcttgagtttggtctttgtgtgttcttgttttaaggcggtcccaagcttaggaaatggtatggagctcctgaacttcggccaaaggatggatctttaagtggagacgacgatgaatttgaaggtatcattaaaaacaaaatgcaagatacttaaaatggttgaaatggaatctcaggacttgcacataactcttatctgcattttggtatctcatttgaaaccaatgaagcagaggaaaaagaagatgatcttgatggagagaaagacgttgtttttgtaactgatggagacagtgatttgggtcaggtgtgtttgcttttcacagaagcatcatccattggatgcaacaagatgaaagtttaaaagtgaaactgagaactgttaattcttagctgatgtagatgattatactgcaactgattgtgaaaggaactcgggttaaagcacttgtgaaggacaaaagaaaggctttggaagcttttggatcttatgttgaggttggttcattgaatatatactcttggttctatctgttgtttctctttacgttggcaaacattgagtggaattataattgtgaagttgacgactggagatgcaagcgacgagcgtttcttaaagaaagcttttaagggtgttggtgcggtcatatccccgacagtatgtttaaccaaaccgttcaccattcgtatcaagttgtacattgatctaaaacatggagcatttcattctttccttggcaggaaggtttcttatcgattgtcaagagttttagaggtgtaaaacacgcagttctcttgtctcaggtaagtatacaatctccatgactttgcccttgtcatgctcagttccatattatgagaattagacagttaatggtgatgcattagcaacaatcttgcaaggcttggaagttggaattgttttgttttgttttgtgtctgtgaggtcatggtttaatgaagctgcagttgtctgtttatgaaagcagcggcggaattcaagctatgatgaatagcaaagccaaaaaactggccgagcaagatgaaaacgccgctatatcttcaaatgtcccttatacaatcataagaacaggcaagctggagaacagtcctggagggagtcaaggcttcaactttagcgcggtaaagtcatcttataatagataaggaaaaacatgtatcttggctttaaactttagacaatattgttatgaatggaaacagggtgctgcagccaaaggaagcataagcaaggaagatgctgctcgtatatgtgttgaagcactaagtgtgatcccaccaacagggttgatatttgaggtaggattctaacattttattgatgatgcttcctatacaaataagcatttgttactgatgaggcttctgattcggtcaggttacgaatggagaagaggttgtatctgactgggaaggacaattgatgaaagtgatgcagagacagagtgacaagaagtaagcttcaaagctgagatgaacagacaatcacattatacatcatcactgcctatatctttcttttatttttgtaatcagacatcatcattgtctatatttaacaacatgtttctgttgatgaagataagaaattccttcctttatatttgatatgggtctctagatgctttgaaagccttagaattgttaattttaaccatgagtatcatagcaagaatgaaataaagtatgggagaccctaccatatacattctttcactttcatagtttcataaaatatccaaaagaaagttttgattggaaaatggatgtgagccaagaaattgattattaaaggtgaagtgaaccaaaaagttggctggattcttttgtccaaatgccaaatgaaacaaataaagaaaggaaaaaagaggctttgtgttgtaaaacaacttgaaacttgtgtaaaaatggagaaaaaagataaggaataataaaagtacctaactaaagttaaaactacaagtctctgttgtctttttgactttaaaggatcatgcaagcacaaaggcaacgaggataatcatcttcttttgctagatcagactttttagtactctttcatgtttttctttttcttattttgattgagttttataactttattttgagctaataaaggttcagatgaacattgctaaattttgagtttctgcaaaacatgatttacacatcatttttgattatcttgaagtgcataaaaaggatgattagagaacttttggtctaattattaacttgtcataaatgtatcagttggtggcagaacttgaatttcagagatatgccaaatctaacaaaagaggaactcttttatttattatctcagaatcaaagacataaacattatgtagataacatttcaacagaaattacataagcaaaactgttgaagacccttaagaagaaaacacaatattaatgtcataactgttccacaacaacaacaacaaaaacatgacacaccttaatccacaatcaaattagctttgaatctacaaaatcaagatgtttttggttatattacccggatctaaatctcttctggttgttggccttaccgtcagatttcaatgtcccggtagattcgccttccgatgaagcatcaaccgatctagcaaaagaatgagagagatctccataaagacttgcaacagttctgatattgttattgagctctcttatcaaaccaacatttcttcccaagtgatcagcttgtttcgactcatggttctgattgatctcgttgatcaaaagccggttctgatcaagaatgtcttgaacttgaacaaagctcttctggaaattctgcaacaacttaccatccatttggtatctctctccaaatccagaatacacatctccttccattcttgattccatcaaatctcaaatcttgattctacaattgcaacaaaactcaacattaaacaagtgtttattcttgttccgttgaccttgtctataaaatcttgatctcacttttcaagtaacaacacaaagcgaagattaaaattctttttaattttcagttacatttcaagaaccctcaatttcggacaaaacatcaaacacgttttcaggataaaaagagatctatatatagataaaaagagagaacaagtaatagctgatgattctataagtagccttcacctatagtgagataaatctcaacaaaagtagaaaccgattccataagattcataaaattccataaatttttaagacccagaaatcatatctaatgaatccaaaaaaagcaaagcaagattttttacaagtaagaaagactctaaattcagtttcatacctttgaaaaaacaagctccgggaagaggaagcagaggaggaaatcaagaaaataatctcgggaaataaagaaacaagaatcttaatggagaaataatatgacaattattggatgctgagaaagcaaaggaaaaggaatctacttgtcgtctgtagacaaacagtttgagacagagagagatttgaggggaatatatataaatgttcttatctttctttttttctttttataataactcttttggagaagagaaataaagatttttttggttgtacttacttactctctgaatctttaatttgcagagttatggaggttaaagatatgccagtgtcagacatctggagccggattattgtgatgacccgacccgtaacttttgttttattctctacgtcttattaggcctgtttatttcatgtaatagtagcagttgtcggacaagggtaattaaaattatctaaagttagtaagttactactttttttaaaaaatatgtcaaataatttgattttttttttcgtaaggtgtcaaataatttgataacaagtataacaatgatgataattcaaatatttaaactaattattctaagttttatttaatagggacttagaataattatcatcattcttatagggtaaaagttggatccggatttggatatttcgagtagttattattaattctaaataatttgaaaattttaaggaatttttaagtttttagataatttgaggttttgtccaattaaaaaaaaaaattgagatttggcaaattaagtgtcgaaaattggttgcatggaatacaaaagaaattaacaagaggaaaattttgttccacatttgaaaaagaaaaacatttcactagtatgtggagtttttaactcatggtccaacgtcttgggactataatataaagggtggaaaagagctactcacgcaaaatcacaccaatactgaagcacactcaccgaaccgaccaagcttagggttggaattggatagatgagtgttttgtgtccaatagcctatatatagttttttgctcaaatccgtttgaaattttatttgatttaaatgaaaggagttctaaagccatgaacacgacagatttaatagtattgataagtccataaacaccttttaatttccaagctactataggatgggagcaaaccagaaattcacaggacgagtaaacgttttgggctaacctgtgagatttttatatataggtgtgggctgtcgtagcgataaacacgacggtggtcgatgaagtatatagagttaggtttgaggccacggtacatgctcgctttaatttgacacaaaaagcctcgtttataccaaagaaaatgcaaagatctccaatgtcttcggtgtaacccttttgtcaatgcaccaggtaaagaggacgaacttcttcggaagaagtcataggaaaggtgactctaccaattatttgcttctaaaccaaagcagatacatcgttagtttgatgctcatttgagttttagatcctaattcttgaaaactagagattgctaacacaataaacctggaaaacctcgtcactctcggcttcacaatcattgcctatctgcgttctttttttaattctaactgaaattctattccttgattaaatcagtgttttaaatattttagttgatgtaaaataaattgaagtatcaagaccaaaaaactattagcaaatagtacatagccacgaaaacaaagaataacacgaaaccaacataaaagttagcataaaatcataaattttatattgatccaactgaaaattatggccaaccaacactgctaaaatcgtttcgggatatatctaaaaaaactacgagtacatgggaaacaaacttagatttgaattcaaattttatatacctttttcccctataattacagcattgccaaattatgttccttagtttccgttaactaaaaaagtgccttgaaacacaagttatcttatattcttatctcaaacccaatgcgctgaaattgcgtagtttgttgtgattttgactgcttgttttgcgccagtcgaatattttcggatcaggtatatgaaaacatgaccatataaacagtatatatatatttactaccgtaaaagatatttaacaatataaattaaggaacacctaaaacaaacgagataatcaaattgttaagagtagttggtgcttcaatgttcacaccatgtccaatttccttcaatacctctaaactcgaattcggcaaatgcctgtcaagaaaatgttaataataataagtcaccatttatacaaagaaggagagatttaatttctatgacatacactgttgtagtattttgttaatgtctattactatatttacctttgtagacgacgtccatgctccaacggaaacacattatccttatcaccccaaacgattaacgttctctgaatatcaataccaaataaatcattcaattactaaacttattcaattttaactgtttttatggatcaatgaatatcaaattacctgtgatattgaaaataactctggctcctcttctctttccagcaaattcttagctaaatcaacaagctcttgccgatttgtctcatacatcacctgaggatttataaactttagggctaattcgcaatttgtctaacttacaggtcaatttttgaataacagataaatacggggaagattcagtaattaacaataataaacagaacttacagcgatgaattgggagaggatgaaatctggaacccagtcaagaaatctgatacctgtattcatcgaaaccttaactaacaaccgtagatctctcggattactcggaacaagaatctccgatacatctccgccgtgttttttcatctccgtcatcttttgctgttgtgtaaacccaactccactactcacaatcaccaatttctcaatcatctccggccaaatcttcgctatccggtacgcaacaaatccaccgtaactaattgaataaaccgataaatctccgtcaccacaacctaacctcttcaaacctccgacgatactcctcgcctgaaactcgatagtccgatcggtgtttctcgagtacgatttcccgaagaacacaagatcagggataaagagattaaacgatttcgatagatctgagacttgatgaatgaactgccatttcgaatttcctccgtagccgtgtaacatgacgaggttagggcggttgattttacggtggccggagatccagaaatgtaatgtggtttctccatcgtttaaatcgacggtgattggacggagatcgcagaagattaggaaatataatgataagaatgtatcagcgagcttgattaggatcgggtaatcgaaattgtcgaataaacaccaaatgaggttatagaagagagtgattgcaatggagatgtatcgacggagaatatgaacgaagcttttcattgacaccattacagtggtgatgatctgaaaatatggtggtgcttgtgcatgtgtgtgtctttgaaagagaaattggttgtgattaaaattagacaaaacagagccgtttaaatctcttccggtctaatccggtttagtcggtttattccggtctgattcaattgaataaaatagtcgttgcagatttgcagttgttttccgtaaaaataacgtgcggcacagtgcatgttaatcattgtattcacaaaactgaaactacataaataactaatctttcccgccagagcctcacttatgggccaaagcctatttattataagttttgggtcaatatttgatcttttagcccattattgtcaatggtttaaacatagaaagatactattgttgtaggttgaacaaaagataagaaaaaaaaaggatctttgtaagaatctttcttaaacttgtatttttgtcgacatctttgttaagcttcttctggctgtcaaatagtgtcttttaatggttcgtcacatgtgccactggcctacactacgtaacaacacattcgtattcacaccttgtcctcgtatactctacgtcaactttaacccaacttgtgacaaaatcttatctttggctcttcttcactcataataactctaataagtctttaactacccaacccaatgtagttagacgtgtctgtcttatggacgtggaatgctctcttctacttacttaagcaacaagttaaatccgcaagaaagaaaagaaaattgagcttgatgtcttttaatttgtctgttcttctcaaaacccttgaccccgcagtctgcagtccgaaatcaacggcttcatctatgataaaaattggaaatcttcttcaaccaatagtaaatatcagtgtctacatcaacattaagatcaccagcgatctaaatgatgcagaacaggcaggcaaagaaaagaggcgttttgtttgtttctaagagtggtccttcttcttggacgtccataatggtttctaaaagcttatctccgtctttcgaatgttcaccacacagtttatcccacacctctctatataaacacccgagaccgagaggagtgagaagagtagggaaaaagaaaagaaaagtagagtactatcttcctcttaaaccaaccattcaaaatgttgcgtactatcttcctcttatctcttctctttgctctatccaatgcctctgttcaagatttctgtgtcgcaaacctgaaacgcgctgaaacccctgcgggttacccttgcattcgtcccattcatgtcaaagctacagactttgtcttctctggcttaggcactcctggaaacactacaaacatcatcaacgccgctgtcacacccgctttcgcagctcagttcccgggtctgaacggtctaggcctctctacagctagacttgacttagctcctaaaggtgtgatcccaatgcacactcaccctggtgcctctgaggttctctttgtccttactggctccattaccgctgggtttgtctcctcggcaaacgctgtctacgtgcagacactcaaaccaggacaggtcatggttttcccacagggcttgcttcatttccagatcaacgcgggaaaatcctctgcttcagccgttgtcactttcaacagcgctaatccgggtctgcagattctcgacttcgcactctttgctaacagtcttcccactgaactcgtcgtgggtactactttccttgacgccactacagtcaagaagctaaagggtgttcttggaggaactggctaaaaaaagacttaggactactccttgactaaaacaccaaaacctgtttcttcatctttttttctctttaattgattcttgtcttctctgttttgtgtgccttgtaattcttcaaaacctgtcaaaattgttacattgtatgtgagttttttcaattaagatcctgagttggtcacaccgttcatatcattagctaaaactaagcattgacatttgtgaacattccaatttagaaaaaaactccaaacataagctaacttttaggaccagactctcacatgggtttccagtggtcccaactccataaaagttagatcggtcctctgcaattattctacatgatatgtatgacatttaactctaaagaaccatacaaaaaggagacttcatgtgtaggctaacttagatctatatctggtaattatttattgcatcaacaatcatccccaaaattcagtgtttttttttctattggattaactcagatataaagaacaaattttgaaattaagtcaaaagactataaatttacagatttaagaggaccaaaattgagattgacttaactctaacttcaagctcttttcaacaatgtcgatttctgtgacaacaagcttggaatctgtcagtgtctatcattgatcttaagaagaagctgtcttcttttgaaaatcaagaaagcagcaacaactacttgcaaagctgcagctacgccggcgaagaaaagccccaccgtctttcctgtgttcaccttctgcttcttcggaggaggcggtggtggatgtttatggtgtcttctctgtctccatttctttcttcggtggtgatgtttctcgtgaatcgccttgttactctcaatagccgttataggagacggcggtggagataaggatagtggcggtggaggaggcggtggtggtggagtaattgaggaagaatcttgtgattttgagtcaacgaagatagaagcagagatgaagaagaagacgaagcagaaaagaaaaagtctcgaactttgtgatgaaggttccattggtagaaatctgagaaattacagaggaaaaaacagagtgagattcgaaatttgggatatgagctcaaaatctcagaattatgaaattagggtttctcgatttgagtaactgaaaaaccaatagttgtatagtgggagaagaatctgaatcgtttcgaggaaaagaaagagaagcgaatctgaagaagaagaaggtgtaacgtaaataattgaagaagagaggaaagatcgtttctggtgtgtttgtgttttaaattaggaacgaagagtgacgagagcgttttgatattactatcaggcccattttggatctcttcttttatattattttatttgtaaggcccatcttatatgattgcagatgagatgagagattcctacttcacttgtgtgttttaaagttggtaaaaaaaaaaaaaaatgtgagcagaaatgttatgttttataccattgttagatttttgacagatatatatgaatacaaataatgaaaaatacctagaagctatagaacagaagaagaaaaacacacacacacacacaacaccagctacaaacatccaatgtgtgattgtatattagtctagcaaacttaatattctcatatgaacatatattattctcttataatatcctggaaaagaaatgatgaaatcctaactaaacagttgaattgtagcttttttctaaaacatctttctttattaattttttgctttgaaataatttttacagctataaatgacacttgcaacacaaatctgttattttaaataacctttcagtaataattgagggaaatgtgctgggatggaagagacacacgtaaagtggattctgatgaaatcatttatctgtgaggtatggagccgatttaataaagctacacgttcgtcatcaaaaagatatacatttaacgcaatttgatatacatgtactcagtagtcagtactcacatacacagacatgtgtatatatagataatagactactagatttaatttgaatgtatgcatgtgacccaaattgcgtcgcattgaggaattacgattttcttttgtgaatcgactttgtgtaaagaaagaaagtgtgaaagctgataaaaaggcatatatatatatatatgggatatatatatgcgagataccctttttcgagcaaagcatgcataacacaacaaagcaccaaaaatctttgttcttgagaatttagcatttacacaaatatgaaacttcaaccacagtataaacttggccaaagttgtgttttttttcttaaccatttagtagacatgagggaaaatagcatgccgactagccggataattctcaaacttttggagataccaacggtgcgtttctccagctgcgtatgtcagattagcagcctacaaaataaataaataaaacaaacacccttgagaaacaaattaaagcatttcattagtggattttgcaaataagagagtgaaccataccacgaaaccaaagagtaaccagatgcttatatctgttcctccactcgatataagtaaacctagatataaaacctaaatctcagagcatcatatcattagaaaatatattttaaaataaaataaaaaaatgggagaagttgaagatatctatctactaaggaggatttattacgatttctgctaggaaatgcggacatgagaccatctcaaaccaatctccatatggaattatgtactcttttgcttgactaggatattcccggagtgatccctgcaataacgtacgttttgttatttcacaatgatgagcaaaaaactaattgttagaacttacaagaatggcgtgacagcgacgttgatgtatccatccccaaagaaaaatggctccaccaatccactggagtgatccaagcttcatcaaaggacttatagataataacaaattaaaatcatgactatggcttttcccactagcaatgaactcagccacttgacttcctacgaatcttgctacctctggagcaatattggagcagagtgacaaaggcgctgctacatagtaactaaacacacacaatattaaaagccaaacagaaagacaatcaaagtataatataaggagatgagacttacaacaatgcgccaacataagcgagaatgtgcatccgagcggaagtgctatatttgaatacatagaatgactctataacacgtctcaagacatggatctccatcagaagaagtagaaacaccgctcgccccactttaaaccgatgctcaacatgagtcatatggaaagagaaaacgtgggaacctccggccattttgcaagcatacatccaagttgcagcaagcaggagagttgtccacaccactccgacaacatagaagtgaccaaagaacttctgaggaactgtaaacttctacatagagagtataacacatctgagttacttaaaaatgctttagcccttttccacattcaacaatcaaaaacagaacaagttcgaatatttttacgcatacctgagaggatgggtgaagaatcttgcctctaccagcgaaactcaaaacgagttcacgaaaagagttaagctttgaactaggtattgaagcaatcaccaaaggaagtatagagacgatccaaacggtgatccaagcggctttaaccaaccacacaatctctacctccatactttttttttttgtgtgtgtgtgtttcttctctttgaaatcacaattagggtacaataatcaaagtatgaattaagagattccaaatcggagaagaaaagttttataataagtttgccggaaacagacgcaaaatcatgtgcaaattggagaaatttgattgagaagcaatgcattagcgaagtcagtgttttttctgaacattgcttgtgaattttgataatctcgaattaaaagtcaatgaatgaatattaaattgttaattacgtaattagggataagaataaaaacgttaacacgaaaaatggatttaaattaggtgacaacacactagctagtatcatttttttagcaaccaccacgtgtataaacgtaactacaaaattgaggattaaagttaaatttgaattcaatggaaactgaatacacaaaacagattccgagagatacatttgtcagcataattttttatatatataaaagcttaaacatgcaagaaagttaaaagcattttatctttttatgcatactaagaaatgcctatgaaaaggacataaaatgagggtataataaaaaaaatgacatttaaatattaaaaagaaaatgagtgtttgcaaattaaacagaagaaaatatggtagaattaaatattaggaaaaaggaacaaatctcatatgtaaaaatttcaatcctctttactcaaccacactatattaattaggtaatctataatttatggggaacaaatcttcttatctcaaatattaattgttatttttattaatataagccaccccacactataaatatgtttgttcttcaactctcatttaccaccattatcatcatctctctatcacgcacacatattcttcctttaccttattttatataagaaatggcttcttatgaatcacaaagagatgtcgctgaattggcgacccttgaacaaactaaaaagaatgtggaggatgtcgaggaggttctaaagaaactcgaacaaacttatttggggaaggaaaaagtcacagatgatacgcttttgagtgacgaagaaatggaaaagttcaatcagatgatgaactgtgtaaaacttctgaacaattgtttgacaaagataggacagtcattgccgctaaaagaaggagaaagagaattagttgaagttgaagttgatttcaagaatataccctaattaaatgttgaatcataacaataacgatgatggtgatatatgtcatatgttggttctttttttgtttcttgacggctagatatttgtccggctttgtaaccgagcatataaataaaataaaaattatataaaaagttttttttttttttttaacatctgatattactttagtttatctcaagaagtccatagaaaccttcaaatttccattgacaccaattattttcaccatggcatgagggaattagctcgatacgggttcaaaattaatcaaactatcaaaggcttggatggatttgattatgagttaaataagtttcacttaaatttgtaacgcttttccttaaagtacgaccacgacagaagaaggcacacaaattgaggaatcgcctctcctcaacttggtgcagttaatatatactaattaattaacacttatgttatggatcctgtaaataatgaatgcattaacttttttcaattaaaaataaaaacgaaatttaatcaaagtatatcatagagaataatatatagtggattctgataacttaatttgctaaaaaagttgtatatatgtagaccggcctcaattacttaggaatatatgtttattaaaccataaatgattaaacagactggacgaacttatttcctcaaaccaaccgtacgtgggaatagtctctccggcgaggagtttacggtgtcggttagtggccggcgccagagctggtgggagaatgtttggcctggtcgctatcaacaatcgttgagcttgaacatatcctcttcacgtcatatctatttatatcgaaattggttacagcgtttaggcctctgaatttaattgccgcgatatcgtacgcctccgctgcttcttcttgcgtgccttcatcatagttacaaaatgtgatatttaataattcaaaggctatgatataattccatatgtatagaagtggttcatactaaatgttccaaggtacaagtccttgtttccagcaactcttccaattctggcttgccaccttccatgttgatgatgcctacatgagttatacatgcatgatcatcatgatctaattccatgcatgtacatgtacatatataaatatatacaagtttcacatatatgtccaaatcaaaccttgtaactcctctatacacggaagctcccctcgaaaacccgctgctattcctatgattatgatatgtaattacaaagcgtttgttaatggttaaatgcatatgactatataaggtccataaatatcattacaaacccactgttgagtaattacctcctcaacatggcaacaaattcttgccgattcatgttattgagttcctcgatctccttttcgtaattactcaactgaataaaagagcgtcaaaggaactgatatcacaagccaaatctatgtagttccatcaaaatcaagtcaataaaatcggaaaatgattacattcaagatccaaaatatcgaaataagtatggaaactgttatgttgcatgtatataagtgtacatatataaaacacacttgcatgtaataaaggagttagaagtggagctaggtacgggaccagaaagatcaaactcacagggaaatttaagtgagtggtaggaccccaatacttcagagccgctaaatcatatgccctcgctgctttctcctcctcatcataccctcctattttagtaagtattaattctactattaaatgtttttctataattatcagaaggtaacaaggttaatttttacttcgaaggccaaaaatagggcaacaagaaatgaacgagggatctcatgcataataggttgtaaaataaagttctggcttaccaagatacactgtgattgatcaagaagcgaattcgaaagtacatacgaagccaaaattaaataattgttagtaagattattgatgcatgatagcatattgaatcggaaaattattttgtatttgttttttctgaccttgtcttcctctccttgtctgtccctccttcttacagctattatcccataagtgagcttcatatctccctgtccatctatgcctgtatacacgcacaacataaatatgtgtcgacacaattatacataatctacaaaataaaatgacaaatatacataagtaacataattgtggcattcacatttttcttacgtgtaagtttgagacatcatttaaaccaaaacaaatgtttgagacgtcattatttaataacgtacgtaccttgtaactccacgatactgagaagttctttgtccataactatcaaccgacttccgaggaacggattcctttacctgaggtttaacaaccaatctcttccgcttctcatctaccttaaccggttcttcgacccgtgcggatacattcgattcgttgatcaaatcagaacaagccccatggctcaaagccaatgatagcattgagccattggtgttataaccagtctcttcgttactaaaatgactaatattattgctcgtaccagcctcttcagtaacgtaatgactcgagagtgggaatgctggagtgccttgctctaaccaagatttgaaaaccgagaccgaaccgaccctctcaaaacctccataatcattgctaaggttcggatctaggttcgggtaatgtggtgtaactacggtttggtcgtggagaaggtaaccgggtgggtttaacctgttaaccacagtggtgcagttgacattggtttggttatggtttataggatactcggtttgatgagagtttgagaggagatcttccacctttggaacgtcttcatcatgatgatgatgatcaaagttaatatcatatctccaaactacacataaaatagaaatcaaattaagaatattaatagtggccacaccaacaacatatatataccagggggatgatgtgtgaagaagagagtaccatcggaaccgtcatgcctaagttcttcttcttcactattgcagattctcaaaggaggtgtcaatgaaaatcccaaccatttcttcatctctctctctctctctagctgtctttctcgctcttagtttatatgtatagggtttcgttttatatgatttgtagtctcatacgtgcgaatatacattaatatttttcataagtctaaaacatttaataaattatataattaaaaaggtggaaaaaagatttgagacaaaacaggtggcggtgaagttttgtcgtaagcatgaaagaaaggaagaggaagtttctctctccctcactctttcacattctctttcacacacacttgcatctgacttctagagttttgtgcccactctccctcggatcttttcgatgtatacgtatatatatatgggagatacacatgacacactacaatgaaaattttcgttctttggtatttgattaacttttccgtaaaaaaagcacacagtagcgcttaaaaaagtcagtattttgtttctttcgaaatatgttaattagacaataatacatttcttttattaatgtctttctttcgatataatttgggatattttttaataaacttaaagaacattacataatttaaaagtaaacaaaatttgtactaaaattagtagtattgcaaggaaatttctccttagacgataaaaatgtgtttttgattgctcattcaatcgatccgtttgaaaatgattctaactgtgatggagaagcctgaaatgatcttgctgttttcgcagattagacaaagatcaatctaaaagataaaagatatatatagctggagtgtttggcaatatgctatctaactcataaaatttgcctcaagtgtgagaagcggataatgtgacggtataacctttgaaaacagacacacaaaatatgatagaacaaaagaataagtgatctctcttatttggttgattatattgcatatgttgcttatagatagaaaatgaaattgtgttccaagctgttaaccaagacttagtgggtagtttgtccatactcgccacccacataacgaaatgtcgttctacacaaaaagccacaattgttttctttaacaactgaaaaatgaatttgtgattttatatcttgctacgggcatcggaaatattccaacctcttctacgaggtaatcgacaatgccattacagaacaaaccttttcttacaattacctagtttgtagtatacaaaataaaaatcgagaggtcttagctacagaagttgtctccatgaataatttcacagtaagtagtttagttatatgtattaatgtgacaatttgttttataaaacattagattaagaaagtgaaaaaacaccattatatttgctaactcacaaaacatttatacatgtctatcttaatctatcagtatgcaacacctaaggcctaaggtgagagagattcaagcccatgggctgatttactgaattcagatgacggttaattttcaattcgctggcaataatatttatagttctctgggaaaatattctgcaagctaataaaaatctgtgtataaaaaaaaaaaaaccctacagctccgtcttctctccagtctcacaattttcctcatatttataaatccgtaagggaaattttctagaaactcaccaaaaaaaagtattctttgaattcaaagagaaacccaaactagggtttccataatcccttttctactatatctcccactctcataaatccgatcgctaaaatcgccacgatccttactttctggtaagctctcaagcgaaacccactaaaagtttcgtctttttcttcttcgcatcaaaatctgataagggaagagaacagtgaaggagagaagctagctgacgatactaattcaaggcattgtttgacttgtatgcaacaaaccaggactggattttgaaatctcggtttttagggtttttgtagtggggttaagttaacacaatggatgaccttgaacaggcaatagtaattagctttgaaactggtgctgttgattcggctttaaagtctcaagctgttacttattgtcagcaaatcaaagagactccttctatttgtagtatatgtattgagaagttatggttttctaagcttgtccaagttcagttctggtgtttgcaaacgcttcaggatgttttaagggttaaatatggatctatgagcttggatgagcagagttatgtgaggaaatcagtgttttcaatggcttgtttggaggttattgataatgagaatgctggtagagttgtggaaggacctccttttgttaaaaacaagcttgcacaggttttggctactttgatctattatgagtaccctttgatttggtcctcggtgtttcttgatttcatgcttcatttgtgcaaaggtgctgttgtgatcgacatgttttgtcgggttttgaatgccttggacgatgagttgattagcttggattacccccggacaccagaagagatatctgttgctgctcgagtcaaggatgcaatgaggcaacaatgtgtccctcagatagccagagcatggtatgacattgtatcgatgtacaagaattccgatcctgatctttctgctactgtgttagattgcatgagaagatttgtatcttggattgacattggtttggttgccaatgatgcatttgttccactgctgtttgaattgattttgtctgatggattgtctgaacaagtccgcggtgcagcagctgggtgtgtcttagccatggtttctaagcggatggatccccagtcaaaactgccccttttgcagacccttcaaatcagtcgtgtttttggtttagtatccggagatgttgattccgatttggtatcaaaagtatctgctttgcttactggctatgctgttgaggttctagaatgccataagcgtttgaactcagaggacaccaaggcagtctccatggatttgctgaacgaagttctgccatcagttttttatgtcatgcagaagtgtgaggtggattctacttttagcatcgtccagtttctcctgggttatgtttccactctcaaaggcctccctgcattgaaggagaagcagctgctccacattacacagattctcgaagtgataagaattcagatttgctatgatcctatgtatcgtaataaccttaattcactggataaaactggattggaggaggaagatagaatgtccgagtttagaaaagatctctttgtcttattacgtacagtgggccgtgttgctcctgaagttactcagcatttcattcgtaactcactagcaaatgctgttgaatcttcatcggagagcaatgttgaagaagtggaagctgcgctctcgcttttgtattcattcggagagtctatgaccgaggaggccatgaaaacaggatctgggtgtttgagtgaactaattccgatgctcttgaccacacagttccctggtcattcacatagacttgttgcactagtgtacttagaaaacataacaaggtacatgaagtttattcaggaaaactcccagtacattcccaatgttcttggtgctttccttgatgataggggtttgcatcaccagaatttctatgtgagccgtagagctggttacttgttcatgagagtcgtgaaattgttaaaatcaaagcttgtaccattcattgacaagatcttgcaggtaagggtttgattttcattttctcttatctacagctcgtttgatctgaaggctagttatccatttttgtatatccgatgtattttcttgtttaatttttttgtctaactatctttttatgaaaaatcagaaccttcaagatacgttgtcccagttgacgactatgaactttgcatcaagagaacttactggaactgaagatggcagtcacatttttgaggtttgactaccacttgaagctgctgttttcatatatgtacttctgcttggaaaaaaggaaattttttcagtactctaaaaaaaatctctcaactcctaatgcgtttttctgtaggctattggcataatcatagggttggaggatgtcccggctgaaaagcagtcagattatttgtctttactgcttacccctctctgtcaacaggttttcgtttctaccattctcttgttcatgaaactttttggcaataattatggtcaggtgtactcacactctttccatgtgatatgattgtaccagattgaggcaggacttgtgcaggcaaaagttgcaagttccgaagactttcctgtgaaaattgcaaatatccaatttgctattgtggcaattaatgcgctcagcaaggtttgtgttcgtttattctagtttctgcacgtgagatttgttacttggtacttcaaattttaccctcttctgggcttgtccttacacttttgcttgcaattcagggcttcaacgaacgtcttgttactgctagtcgtcctggaattggtctcatgtttaagcaggtttgtaaacaagatggtcttttccctcttatgaatcatgtattgctttgcaacctgtctttcaatgcttttgtactttttgcaacttcagttgttgactgtaattctctgccctaattgaaactgctctgtatttactctttactgaccattggtaaccttctccgtaatgtagacactggatgttcttctaagggtgctaattgaatttccaaaggtcgagcctttgcggagtaaggtatgagtttagttgtattttattaagtagacatattgtaatcagtagtgttgcatattcttttccattaagttattgattcacaggtcagtgattagcttgttccccttttctgtaggtcacatcattcatacaccgtatggttgatacccttggatccgctgtgttcccttatcttcccaaggctttggaacagctacttgctgacagtgaggtaaaacgaaaatttcaaacctccccttattattcaatgctccactgctttcatttcctttaattaatattaagttgatctcctacgattcacttacttacctgggagtaatatctactaatcaagatacgtcatttcgggcaatgatgctgcacactaatttgattacttcttcaacaaaaagtcttactgtgtatgtgtattgttgcagccaaaggaaatggttggtttcatggtattactcaatcagcttatctgcaaattcaacagcgctctccatgatatactggaagaagtatatcccgtggttgctgttaggattttcaatgtaattccaagagatgggctcccttcacgccctggggctgttactgaggtatttcgtttgattttctttcttaactcaattttatgatctgcaattgtaacttgagaacctgctgatatcgtagcatcctttacatccagtcatatatccttttttttttggtgtaggaaatgagggaactgatagagcttcaaaggatgctgtatacatttcttcatgttatagccacacacgatctttcttctgtatttcttacgccgaaaagtagggcgtatctagatcctatgatgcagctggttttgaatacttcttgtaatcacaaggatattaccgtacgtaaggtttgtaacactttccctttggttgcatattcatttaattttgatgatctttttcgcttacttattatccacttgttttactctttgccataaaaataggcgtgcgtgcagatatttataaagcttattaaagattggtgtgccgagccatatagcgaggagaaggtaggcttgttaaataatttttattaaccttcttttcttcatgaaagaaggacaaatgtcataatcaagaactatttttgctttcaggttccaggttttcagaatttcgtgatcgaagcgtttgcaacaaactgttgtttgtacagtgtgctagataaatccttcaatttcagtgatgcaaatacggtaagcttaagaaacttcaattctcttttcattttggagttttatctgtccgttgcagttgtataaacttctgaattgtttccacaactgactgggtttcttccttcgctatgcatcgcagcacgcattgttcggggaaatcatcacggctcagaaagtaatgtatgaaaaatttggtaatacgtttctcatgcatcttatgtcgaaaagtttcccatcagcacatattccacaagatttggcggagcagtattgccaaaagttgcaggtttgttaagttttactccctcaaaacgaccataagtagataaaaaattatctcgtcttgtgcttaaacatagtctctcctttccgtgtttggtattccagggcaatgatatccgaagcctcaagtcatactaccagtcccttatagaaaatctccggcttcaacaaaacgggagtcacgttttcagatagcattcgaaatacagctagtttcatagaaagaaaggtctctcaggtcaattccgctacgagctctaatggttttaccaagaaagctctcttcctcaatttttgtacatgacaggtttgaagtcatgtgcttaatataatgttcatctctttacaggcttctccagatgtaaatagtatttgtcaatgtctacttgagaggtggcaacaaggttcgctttcaccatccagatcaaattagatcaaaagcttgagagagattcatactgttgttgatgttggttcttctcaaatctgcagttgtatcttcttacacataatcatgttctccgactcgaaccaagggccttacaagttgttccagtgcacacacacactctgaggcagatcagctgttatttcttattgcgctttgttgtgagattgtgtctataaagcccttccttttttggtcctatctccaagttttgatggtcttataactctctgcagtcgatgttttctgtttttctttgtccatgaaaatactttagaaaaaaactatgagagatcataaaagacagacacacaaaacaattttggctgaattttgttttcctattttattcatttaattaatatgaaattgtattatttttcgatattgaggtctcctcttattttctaacttattttgagacaccaaacacagattgttcttttgacaattgaagtggcaaagaaaataaaaagaggttaaaaaaaactaagataaaagagatcgaaacaatgaatttgttatatttcgggatggcattgatagataatttaatattttgtgtaaactacgtatttttacccaaaaaatctgaaatctatatgtttttaagtgttaaaaagtgtcatatccgtaaaattttaataaaaatagcaatttccaaaattttatatgaaaaatagcaaaatcaacaataacccttaaaaaataaaagagggttatatttatatattgtaacggtgaaaaatcgtcatctacttcttcttgaaaccctagttccaaaatctgcacacacactcagaagaagaagacgtcatctctctatctctgtctttctgctaatttcacgaagaatctgagaatatgccaaccatcagtgttggcagagaccgtttgttcgctgctcttggagaatcctatagtaattcaatttcttcttctccttcttctttctttctctgatttcatagtgtgtgttttctaatttcgtcttatcctctttgtaatgcagctcaggaaaaattcgaggaactgtgtttcagtttcggtatcgagcttgacgatgtggtgagtgacttcattttgatctgcttttgtgatttgattcttttttcaaatcctgattaaggttttgcatcgtatatcaatgaaacagactactgaaaaggcaataatcagaaaagagaagcacatcgatgaagaagctgatgatgatgaagaaatcatctacaagattgaaattcctgccaacaggtttataaactgtgacttttcttcttctagattaaggaattgtttaagtattaggaaattgattcggtattttgtttatatctctaattgcagacctgatttgctttgcctcgaagggcttgctcaatctcttcgcgttttcatcgagaaacaggagataccaacgtatactcttgctgacattagcaaagacaagatccttcaaatgaatgttaaacctgaggtgtgtgtgtttctgtcatagcaagtatcttctgatttggttccttctttattgaaacttttctccttttgtagacatcgaagattcgtccatttgttgtatgtgctgttttaagaggtgtaacctttgacgaggctcgttacaacagcttcattgatcttcaggataagttacatcagaatatttgcaggtaaatgacattgctagttataggatccatttcttctctcttgtattatttcaattattagctaccatcattgtgttggcttgcattttgggattaaaaattggtttccatttatttaactttgctacgctgtacacatttcaggcgaaggtccttggttgctattggaactcatgaccttgatacattgcagggtcctttcacatacgaggtgattgtctgttattatctttcctcttcttttttcgtgtctacagtcttcctctacctctcgaagaagtagaatactgatccaactttcatacaatctgtttcctttgatttatgttgacacttttgtttagttgagcttttttcgtgtctcattaactctatgtatattatttttcaggctttgccgccaacggatataaattttgtacctttgaagcaagtaagtcaatgtcattatgggttcatcaactagtatctctgttcaaaatagttacatgtgcctgtgtttctttgtttaaattctgaatcattctttctcctcggttatatagataaatgatttttaatgtaatggttatttggttatagcatgttctttttttttaatttctggtacaatttctcacttcttcgtagtgacaatctagtttgtttcatgtttgtacctaataccaatttcttggtcgcagacaaagagcttcagggctgacgaacttattgaattctacaaggtaaacagttaatctgttactttctcgtattgtgttatgacatttgttactcttgtgaaatcgtaacttctttggagcaaataatcaacgaaagatatccccgaacttatggatatgtatagaatgagatgaaataattgtttactcgctgaataactacttaggctttccgaaggcttttccttgatgtgtgaaagattacttttgtttgcagtctgatatgaagctgaaaaagtttctacacataatcgagaattcacccgtcttccctgttttatacgacagtaagaggtatttgttcttcctacttctgttcattttacctctagggtgaagaagtaaagatgtctatcaatctatgataaatactttcataaaccaatcaataattttcctactataaatgaattacgtactgaaacataatgaaagctcacttttgcagaactgtgctgtcattgccacctattatcaatggtgcacattcagcaattaccttacagacaaagaatgtcttcattgaatgtactgcaactgatttgacgaaggccaagattgttttgaatacaatggtatgttgttaacaaatcaaacctacagtgctaactgatcaatagctaactaatcatttaacgttttccaggttacaaccttctcagaattttgtgccagaaaatttgagattgagcctgttgaagttacatacgacgatggaaagtcatacatctatccggatttagctgtctatgatatggaagttcctctctctttcattacagactcaattggagtctctttaaaggtggaacaggtaataaagacatcactgttgtcaatttgtaatggttgaaccagcctcattttcttatttgagatgtcgattttagaggctactgtgcaatgattttaatcatttgttatgtgaaatggattttgtacctttcaggttacaagtctgctgacccgaatgcagctgcaagctgagcaagcaaaatctagtgataaccagtgtgccatcaaagtacatgtaccccccagcaggagcgacgttctccacccttgtgatgttatggaggtatattttcatagctaaaacccttctgtgttggtgacataatgccattatgatgattctccatataactaatcattttgcttgtatttcaccaggatgttgccattgcctatggtttcaataacattccaacaagaaagcctgcttcgataaaaccactgactttgaatgagctcactgatcttctaagaatagaggtatttgcacttccatttaactgttgcatcagctcacagagatctgtgtctgtgtttcttgttaaattacttttaagcatttgtttctcagggaaattatctattttatattttgaatttagattgcgatgtgtgtgtacacggaggtggtaacgtggctactatgctcacataaggaaaactttgcgatgctaaatagagaggatgttaattcagccgtcatagttgggaacccgcggtctgctgattttgaggttcctttcaaataatttggtcatctctttgtaaacttttccaatggtaatgctttgctaattgtttcattatatgttgaaataggccatgaggagggctctcatgcccggattattgaagacagttggtcacaacaataaataccctaaaccaattaaggtaaacccatatctctggtgccgttagctagatttgagattttagtgtcccgtgaatgataaatctttttctttctgttaaagatttttgaaatcagtgatgtggtcatgttggatgagagcaaagacgttggtgcatccaatcgtcgccatctcgctgcactatactgtggtgctacttctggatttgaggtatggatttcatttgctaactatgatatcgtcgttatgtaacttattttctcaagtttgcgcaacttcatcaattgatatgctttctctgtataattcttgattcagcttatccatggcctggtcgataggatcatggaagtgatggcaataccatttctaacaatccatgaaaataacgtaccaatcaatgaaaaagacggatactatgtaaagctctcccaagtaagctctcctttcgatctgcaagcatcttaagatttttcattatcgactaactcaagatcctaatctatctctcttttgcgttctgcaaaaggaacccgagtttctaccgggcaggcaagctagcatcattgtcagagggaaacatattggtaactttggaatcgtgcatcctgaggtatcactcatttaagtctccttgcttgatccaaatagctgcaataatttttcaaatcgtttttcttttcttttgtttccatcaggttttgaacaactttgacatccctgatccatgctcttacttggagttagacatcgaagctatcttatagaaaaagaaaccaaccaaaatgttttcttctctttgtgcaatatcgttatctggattatttgaagttgttgattttgtttggttagaggatctagaacacgcatgtcgagagaattactacaaatatttaactgctctgctgttttttaccccatttgtaagatccagcttttattttcaattcgattgtaattttcatttagaatttgtttagtttcttaactgacagcaaatttttttttacaagggataacatgcctaatttttatagccaaataatctagattcttagaaactaagaacgaatctaaacactaaacaaactctaaatcctaagttttctcaataaaccttaaatttataactctaaaccctacaaaagtggcctatccttttaaatcctcaagtctttctagttgttctattttatgaactttgaagtagtttgattttaaagtgacgttgaataatgaaaatgaggcgtagaagactattgtggcactccgcacttgtatgtgtgtgtatgaggatatatgtgtaaaccagaaagggactcaacgactggtttatttttaggaacttaacgagtttcattctttcgattatagtgtttattatatattcaagcaaagtacatcataatacacgtgattaattaattatcttgaccctaataaaatatcgatgagaaatggaccaaggtcaaaagcaacctctgatgatgccacactccgcggctgccacaatttttatatctttatgtatgttccttttttcaaatatactcaaaattcggatccaaaattcttttatatatatatattgaaaacacctgaaatcatgattacatttctctcttttttcgtttcttgatctttttataaacaaatttttcttcatttggttctttcgtatggtaagaaaaggaaaactagctagaagtcaaaagtttttttacattaattcaaattctaatacactttatatgatatattttcatccattccttcgttttttaaactttctatcaccactaagccgatttgattgaattgaatgcattgatctcattcatattattctcattcaaattcaaaatatatttctgtaatgatgaagtctagtgcaacttgatattccaagtcaaaattagttaaaccaaccaagttatcagttcggttcaatttcaactatattttgcatcattggataaaacaacaacaattaaaataacatagttggctattctctagaagaagttgatgaatatctgagtacgtataatgctaatctgatacaaagatttaactgactaaaaatgtgaaaatttggagaattgtctttctacttcacatcaccacgtgctaattgtgtcactggactgtactaacacatctttgttttagcccattttcttatatattagaaggacaatcccactaatccggagatgagcatgtcttttggcagaaagttagtaaaaaaaactcgcaagtatatatctaaatcggaatctaacagtcaaaagtggtcacatgtacaacaattttgactcgaaacttctacgtaaatgcaaattcagcaatgagagactcaatcctcaatatcccaaattatatgaactaaaggggtcatttggaagttagaacaaaattttataggggtcaaacactaattttaaccaaatattttctcaaattcaatcaaattacattaaaaataactaatatataaaaattataggggtcatgtgacccccttcatcccttcttaccgcaggcgagtttgtttgagccgacttagatcatcactataggatgtatcactttctcgttaaactattaacgattgccaaactttttgccaataaaatataatgaaaagctacgtaacttttaatatagagctttcaaatctccttaaaatcagattcctcaaaaaaaaagctcttcgatactatttttatgggattaaagaaaaaggagagactacgttaagattttaaataaaaaatagacaaacgaatttgtcaattgaggttaaaatatttggcaagaaagtttgttgccatgtcgctctcaaaatactttaaaatgttgaaaagtaaaattgatgataatgaacaaattgaccttaacgataatcgaaaatctcccttctcttcgtatttaactactattttattgaaaaactatgtgtgcaccatctcataccgtcatacggctaccacgtagaatttattcaaaacaaataatacaaaacaaattcgaactaaattttcttgcgcatgcaacatgtcttttttgtgactcgccacgagaagatttagtggaattataatttcattatacaaaattagtggaattctcaactaaatgaaaaaaaccttgaattattttaatctccaaaacaatttaaacaaaaatggtagatcaatatcagatgaaatttctacaaattgtgaatatactaattacaatttctttttctttaatcacaattgtaggagaaaaaataaaatataattgactgagttttatatattaaaagttgtattttcttttaacaactcagcctaacgaagaaaacaaaggataccgttgtctcaagtcaatggtgtggccaaaggtattgggatcacattctaacttcacaaagagaaaaaaataatctaacctctttattattttgtttgttaaattaatccaacctcttgattaatattatttttgacagaactaacataatatatttagcagaagcaaccatgtcttctagaagaaaatgaatatatgctatatatataaccaattcattaacaacttacaagtgtatgatatagtacagtaagcaaaaaagtatgagatggcttgagatagtcaaagatttttctaatagatccaaatatgtatctggaattgtctagttcacgttataataacacattttacctatcttcttcttagaaattattacgaaactatattataactaaccaaaacatttttcatttgattatatgcttagtggcaaatgccatctttgatggctttataagactgcagacttactttttggagtcttcaccaatctatcacctctctctttctctctctctccaatttctcactaacccttttttcaaagaagtttccatatataatctctatatgttcattcattcagaaaaataaaataaaaaccattaatcaaatatagacaaaatcttgtgaaagaaaacaaacacagagagattctttcagtttcagatgaaaccaatgagattttcttggaagaatatatgtcttcccataagctgcatcaataacacaaaccagaagaagactacaacaacaaacccaccaaaggaaaaacttcttcttctctccagacaaacctctgttccaagcagagtctacatgtccgatttcagcaattcaaccatctcactcaacgacttctcaaactctttcttcataaacattcacatattcacctacgaagagctcaaaacgatcacacaaggcttctcaaagtataatttcctcggtgaaggaggtttcggggaagtctacaaaggtttcgttgatgatagcctcaagactggtttgaaagatcagcctgttgctgttaaggctttgaaacgagaaggtggacaaggccatagagagtggctggtaatgatttcttctccatctgcatatcaatgaatcacatttcaagaattatatagcagcttatataagaatggaaccataaaactaatagtaaacgtttcttcgagattctgcaggctgaagttataatccttggtcagttgaagcatccacatctggtaaatttggtcggatactgctgtgaggatgatgagaggcttctagtatacgagtacatggaacgaggcaatctggaagaccatttatttcaaagtgagttggttaaaagaccaaaaccatacaaaaggtccaaaaatgattgttatagagatgcagattactaacaatatgagtactgtttggtgcaatgcagagtatggtggagccttgccttggttaacaagagtgaagattcttctaggtgctgcgaaaggccttgagttccttcacaaacaagagaaacctgtcatatacagagattttaagccttccaacatcctcttgagctcggtaattcgaatgcttcggtgcctattttgcatttccatatatctgttatcatgtcaaataacttaaaatctcaatatctaaaactttcaggacttcagctctaagctttcagatttcggcttagccacagatggatcagaggaagaagactcaaactttaccaaaagtgtaatgggcacagaaggatatgcagctccagaatacatctcagcaggttaaagaacataacaataaggctacttgtcataaagccggtgcattattagcttacatgttttcttggtgaatttcaggtaatctgacgacaatgagtgacgtgttcagttttggggtggtgcttttggagatgctaacagctagaaaggcagtggagaagtaccgggcacagagagggaggaacctagtggaatgggcaagacccatgttaaaggatcccaacaagcttgaacggatcatagacccgagtctcgaagggaaatactcggtagaaggcatcagaaaggcagctgctttggcttaccagtgcctgagccacaaccctaagtcacgaccaactatgaccactgtggttaaaaccctagagcctattctagacctcaaagatatccaaaacggaccgtttgtgtacattgttccagtagcaggtgtaagtgaagttcatgagatcaaatgtaaggatgatgtcaaagtcgtaaaagaggaaacagagaaggacgcaaaagtcttcccacgacaccgagcaggtcgaaggaacagacgtaaacacaaggcaatgaggtctcgtgcagtatattcagacactgctctatacaagagtctaggaaccagtttatataatccagccaactaaattgatgcacaaaaagcaaaattatttaatttttatacaggtatagtatagatattaggatacgttagtatacagggaatatacgaagaagttgtgttagagaaatgaagataccataaggtttcataaaattctgcacatgttgtgatagaaacgtagcttaaaaagtgagctacatagatatttagcaatcaattttcaattttgtaaccacagatgtataagtctgaattgtatgcgtgttcaaaagggacagtattacttggatttttttcaccacaaagattccacagcaaatcctaaattgactgtagttcaccaactaagaatttcagtggtaagcatgttattcctagtcaatgtttaagtatctgggtacatacgcaagcatgtttcaatttcagacaaaacagtttcacatgaagccaaagattagattacataccttggtgatgaagaaaaaagacttctcaatcttaccaaaccccactcaaaaagacgtgtaggaaaactcttctgtggttgctttcgtctcctcgaatttctatatggcctgattgacaaacgaacaataagaagcagccatttggtggatcagtctttttcaatggagacttcaatacctaacagattacgtcactaatgaaaactgaagcaattgagagaactttgatgaaccaaagtgattatccaattttgatgagatcagtaaaacattacagatctacatctactactggcactggcttacatcatcacttaatctagacacattcctgttagcttctaagttcaataggtagacaatgatgtggaatctactcagtatctcggattgattgattgattgagtaaaaaaaaaattctctaccattacacctaagattcttattaacagcttatattagtaacactaaaagacattccagaaaatcttcaaggcttgaatgccacactgaagcaagaagacttccaaataccaaaatatctccaattaaatcaacttcttctttcttttcctcctatgcttctttttgactactccgcttttagcatcctcatcagtttgatctcgtagccagtccgcatgatacttctcatcatacggaacaacttctccatcgacaaacggctctcctgcaaaaaaaactatgaatgttttaagaaaaaagaaagatctacaggtactaaatttaagagctacaactcctctagtccaccaaagaaacccaacaaaatgagaataagcacataatcctaaaattttgagatataatggttgcaacatacgagtttttcacaagaaagagcaaaacaaacctccgtatctattgtcaccatccactataaacgaatctggtaaaacccatttaacatcaggcagagctgcaatcgaatacaagccaaagtttcaacatttgccacgaaactatgaacaagtgaaccaaaactccaaagaaagaagacgagatcaaaatgttcttacatctaatcttgtaagtcaaaggttcatgaatcctgcagccaaatgcatagtagtactttgtagatacagagtatatcgatctcttagcttcttcttcgctgcaaacaacaaagcaacctcaatcatataccaaaaagcttcgatttttaaattaaaaactggacttttcgagtgtgatcagtgttacctccctagagccatggctagggtttcgacaaagctttggacaatgtgatttcgagttgggtatccattgggaggcttcatgagaaccagccagtgcttgtaatcgcatccctcgactaaactcggtactcgaattaactcagaccaactagtcgtttccgagttaatagaaccagagttaccggagaatggagacaacggagaaagtcggaaccggacggccgccgtcaaatttaacggtcttctgatgatcctcgccattgataatgatggtccaacattaaaggcgatgaaacttcaataaacgtcagagcctccgaagaagctagaggttttcgttttattttgaagactatttaaaccgatttttggtttggtttggttttggtccgattttttacggtttgatacgagccgatgccaaataacgacactgtttgtgttgatgatcactttggttttgattttaatttgattgatggtaaacgaccattaagaattttaattatttaaagccttgatttttaattatttgtgtcgcctacattttaataaatcaacataataaaatccttgtaagaattttacaatatcggcaaataaaccatactgcgtcaaaatctaattatatacttataaaattctctatactttgaaaaattgaataattctaaatagatacactattaggcactcctctacacgtaacacccggttcagaactcggagccatcaactcatacggtaacactcccgcgccacagcgattcctacggctaggatcacgattcctcttgtcaatctccttctctatccgtccgatttccgccgagaatccataaaacgcatctacgatctcagcatctccagtccatatcgacggttgttgtctctctccgatatactcctcatccggcgaatgtgtcgacaatgtatcaaccaccgccataaacttcgtcgtttgcaataaactcggcatcgacgagaaaaaatacttttgaggatcttcgataaaactcgtgaactcgggatctgactcgtcgggaatcaaccgccgcattagcggtggtcggttcgggacgtagccaccgtaaggatattgtccgaagttgagtgccgcgtgttgtgccgaggcgagccagatgatggtggtgatgacggagacgagatcttcgacggtggaaagcttcggccaccactcggcgtcgcggtgatcagcgtgacctacgttgattgactcagagtaccaggcttggagctcagtatcggtttggattaggttcgagtttgcgtaataacgttccacgtaggttcggacccaagtttggattgcggaccataataagagaccgtcgttggcgtatgggtagtcttcaacaagtaatttaagcccatgtggttgtgttgggtctggaacagccatccccctaaaaatgaaataaaaaatttaacaaaaaaaattgttagattcaaattgtatatgaaaagaagaagaaaaaaaaatccaaatttaaccagacaacaaaatatctatctcactagtcactacaacaatctattactatgcccactacattatttatcacatgagtatgattgaaaccattagaaactgttggagctagatttcatgtaattctaataaatcagaaatgtttctaacactttttaagttttatgcatcagatttagtttaatacttaagtttctaaatttaataatgtacagagacattaccttcggatgagatcagcagggagaccttccatatcaaaccgccatttgttcttatacgcagcggaactaatctctagaccgtattgaccagcagtgaagcacgactcgatcacaccgtccgcactaatcaaagtctgtcgtgccacggcattgatctccaaagtgtacctcatgtgagggtctaataatttgaatatcggatgcattgcgcttaattgtctatgagcagctaatataaacggttccaaacacgcatgagtacgtaaccaatgattcacaagctggtggacaccagcgtcattggacccaacgtgggccttggctagctgccacatccagttggaggttgcgtctactggaggtgtgaccacgcgcttggacttttggtttgagcttgattgagaagggaggcttagctcgatggcgataggcttgagtgtaccgagtcgggtcaagaacaatatggttcgagtcgcgtaagccttgcgtccatcaagcgcgttgattctatctagaaacggtaagtatatgtcatggtagtccaccataaacaaacggttcgtctctaacgcctgaaaattcaatcaaaagataaacaaattaataatattactcaaaatttttttgtctttgtgtaagttaatgagatgatgtatattcatacttgttgtacggttaagccatcaagttgaccgatgatgtggtcttccgtgagagcggagtgaagacctggtccgtagatttcagggtcaagattgctgaccggtggataagacgtgactcgttctatgttgaccgggttgatcccagctatggcttggcgtgcgaactcgtcatctcgaagccatgcatatttatcctctacattaaagtaaaaaagattcattagacaagttaaactatataataacaagacctataagtaagcagtttaaagagctagtaatataaaacagaaccacgcttttaattatataaaagcaatctcttacaactaccaccaccagtccaccactatagcaaaatttatcttttagtggaaacaacaaataaacaaatgaatagagcacgtgaatcatatttccttgttgaagggaatctaaagggaactttcactgttggttccaaatacacacggaagtgatagaactatagcaaaccataaaataaaggtaatgagaatcattaggattcctttttaaggattggtccataaacgggcatgtgatggcacatgtgttaatctttcgaaatatttttcagataaacgaattagtgacataattaaatgttgtaatagctgtcaaaagattaaaagctgtaagaaataattaatgtacttacttgaaactattttaggagtgtcgtatctaagcaagccctcgcttgatttttggagggtagtgacgatcttcggtaaagggaatttcttgaacatatcatcttgaaaccctaacttgagaagcaagccttctttgtaaagactatcgatctcaccaaagttagcgaagtcctcagccaaaatgctagcttttagtgaaggtataaggttatgtaaaaccgccttaagtctacatgcagcaaaagtgttctgcttagactcctcgaactgctcatctcttggcacatacatcggtaatggtttctccacccgcctctcagacatcatatcggtgtcggttgaagaccggccggttcgacagcgtctagggtaaggaaattcacggccaccaagtgtgggacgggctagttcacgtgatatgtccggatttcctatgtcgttgtacacatcataatcgtagattctgtctgataattttctttctcctttaccatttcctcttagattctccaattctttctcccttaatgttcttagaccggacggtgtctcgctcggcaagtaaggctgcggaagaaaattttcaacaacagttaatttttcaatccaagatatgtagttggacgtcacatttgttaattaagaccagtcttggatatttggacccaccatgacatgactatatgatattcacaaattcacattaaatgtgattttgcttatgctttagtcaagatttaattaattacctgattagtgaagagaattc

SEQ ID NO: 1245 - DNA, 70836 bp, Arabidopsis thaliana
aagcttatgtattgtcctattagctccattgttgcgtgtattaatgtgagtttggagattgatgatcatggagttcgacgtttggttcttagcactgatcagtctttcgttgttaagtttcagaaggcttatgattcaaactccaactgtaatcttaagtctaactcgagaatgttcctttttctctaagtgttaaattttggtaaattgttatgcttgagagttgagacaatgccaagtttgtgatgtaaccaacggtttctatgaaataaaacgtagttattgtgtgttttataatctaatgaattatcttaacacttaagtaacaactaacaatgtactatactactatgaataacctagaaaataattctttgtgggttaattaatattttataaaatgttggggtaatttagagaaaacatggaaatatatactatttattgataactccaaaactatgctatatttcactttggtgcccctcgtttgtgagagtatgtttggtccgtcgatgcacatggaagcagcagagatagtccattcggcggcgcgttttgaagctgagaaaatgggcaaggaggatgaggcggtggaggagatacgacgtatgagtggttacggcggagatgtgatagtagtaggtgggtttccggcgtcggagtcggaatctgaatctgaatccgatttggcggcggcggagattatggttatatgggctattcaagggccaacttcttttgctccaaacacactcgttgctcaatcttctcttgagctgcgtctcgacgcttgtggccactcactctctattctccagtcgccatgttcattggtaactccttagcttctctgtttcagtgtcaaatttctcgcttttagggtttattgcaatcaagtttgcgtctttcggatccttaacgagtttgtgtatatgtgtcttgcggctatcatcaaacctacattgggatgttgttagaacatgtttactgatacattcagcttttgttaagtggatttagcttaacattgaagaaagtgataaactttgattcttcttgggttgaacatgaagcgtgttagaactatctgatggttgtttgtttttgtactgtgaagaacacgcctggagtaaccgggtcagtgatgtgggacagtggagtggtgctagggaagttcttagaacattctgttgactctaaggttctttctcttgaaggcaagaaaatcgtcgagttgggttctggctgtggcttagttgggtgagcaaaaaccgctgatatttctcttctgagaattactattaacgtgtaaaacatttagttagtttcttctttcagttgtatagcagcacttttgggaggcaatgctgtcctcactgatcttccagatagactgaggctactcaaaaagaacatccaaaccaatttgcaccgtgggaacacgcgtggatctgctattgtgcaggaacttgtttggggagatgaccctgatccagatttgatcgaaccattccctgattacggtaatcatctcggtttcattttttctccttttgccttgtacataccattctcacaccttttatttgctatgtacttgtagtattaggctcagatgttatatacagcgaagaagctgttcaccatttggtaaaaacgcttttgcaactttgcagcgatcaaactacaatcttcctatcaggagaactacgaaatggttaatcattttctttttgtggttttcaatcatcttatataacaagaacacaatgtctaattttgcttgctcgttctttctgtcagatgctgttcttgagtacttcttagaaaccgcactgaaagattttgcgatcgggcgtgtggaacaaacacaatggcatccagattatcgcagccatcgagtagtgctttacgttcttgaaaagaagtcgaagagatgcctcgctgatgaatcttcgcttaatcaatcttgttagccattgaggtattgtttgtttacacttgacaactgaagtagatggccctaagcgggaagtatagttctggcctgatccttccttgcatatttgcatacatctagcttatagagtgttacagatatactaatttttattttaaccttgttttaaagtgatcttgaagaatatctaagaaacaaatgtactcttcttctttacgtttaacttttttttgctgttgtaaaaaatggattcagatcattgaagatatctggtctgcgttttaagtcagacacaattatagagcaaaattaaaattttatgtattgtttctcactaaaatgtttaaattaaaatataggaataattgtctttttatgatcgcgtgaagtgaggacgattgtttagtaattttatacaaggttgcgacattttaatattttgatccattaaaaaaatataccaaaaccgaaagataagagagttttgatagacgacttttttgtgtataaaagatgcagtaattgttgtccttaatgacattgctaatcagaaactgaaataggaaatggcaaacaacaacgtttactctgttctgaagtcgctgcttctgcttcttcaccttgtattcttgagtaagcaacatgttgactctgcctcaatcgtcaaattccttcctggttttgaaggccctcttccctttgagctcgaaaccgggtttgttttcaatctcttcgtttaattaaattggtgttcttagtttggagataatttaaaatccgtcagatactgtttcttgtgaatgaaggtatattggtgttggtgaggaagaggaggtgcaactgttctactacttcatcaagtctgagaggaacccaaaagaagaccctcttcttctctggctaactggaggacctggctgctctgccatctctggccttctttatcagaatggtgagatcgaaaacatggataaactccttcttctgcgtctctggttactgtctgtaaccctatatatgtaaaatataaccagggcctctggctatgaagctcgatgtttacaatggaactctcccttctttggtctctactacatattcttggacaaaggtaatacaaaaaagtgtgtagtcttgatataaccatcagcaaaacccaatgatcatttcttgatcacttctctcagacttcgagcatgatattcttggaccagcccgttggaactggcttctcctattcaagaacgcaactttttaataaacctagtgatacaggagaagccaaacggatccatgagtttcttcaaaaggtaaaataatgacaaacttaattgtctcttgaagccaaacggttcttagtaggagccttttcctattgttgttgtttgtgcagtggctaggcaagcatcaagagttttcctccaaccctttctatgttggcggagattcctattccggtctggttgttccagctaccgttcaagaaatttcaaaaggtatatgtatgttttatgatatcaatcccctaagcccttttctcaaataccattattgtaacagaagaaacatgatggtgatgcaggaaattgtcaatgctgcaatcgtccaataaatcttcagggctatgtgctcggtaacccgttaacagactgtgtatatgattgtaactaccgcgttccatttgctcataaaatggcactgatctctgatgaactctacgaggtatatacgatgacattttgttttttttcttgtcctcacaatgaaaagctgttcaaaaacactatgttgttcccagtcgttgaagagaacctgcagaggagaatatgtaaatgttcatccacatgacacagaatgcttgaaattcgttgaagaatttaacaaggttaaacactagagctgatttcgtgttgtggatctgccttaaattaataaataaagattcatcactaaattcagaccttgtgtggttatttttatagttaacaaacagagtatgcgaacgacatatattacattcatgttgcgaaactgaaactccaagttgctatgtaagtaatccatatatcttgccctctcttatctgttaaaccctttgagaatatatctatcatacacggttgcttttgcagtcttataggtttatgctaactacctactgggccaatgacgaaaccgtacgcaaagctcttcaaatcaataaggtaataatttattttaaggttcttggtaaaagcacagtgtcattattataggaggatctacgattgcaggagagtataggggaatggacacgatgttatcgcggtattccttacaatcatgacattaaaagtagcgtaccttaccatatgaataacagcatcgatggttatcgttctctcatctacaggtcagagtttataacccttttgctgatcttttgtccctatcaagattcaagactattgttaaactgtaaggtttttggtgcatagtggtgatcatgatatccaagtacctttccttgggactcaagcttggataagatcgctcaactattctatcattgatgactggaggccatggatgatcaaagatcaaatcgctgggtatatacgggtttttttttttttaaaacgggttctcttattcttttgttttatgagattcgctttgaagtttattcttgatacttaactggcagatacacaacgagttatgtcaataaaatgacatttgctactgtcacagtaaatctttcttcttctttttttttttttttttttttttttttttttttttaattttcttttaatccatctgccatttttattaacttgtattgagttgtgggtgttgattatagggaggtgggcacacagcagagtttacaccaaaggaaacctttatgatgttccaaaggtggatcaatggccaacctctgtgaaagaagagagtgacttttacgtacaacggacaagagattgtgtgtgattctagtaacacattttccaaatcaatgctgcctctcggcccaagtttctcatagagacaaatcaaaatgatgtggattcatcatttctaacatcgactctatgaaactgctttagctatttctcgatatttcagttgtttcttccagatacaagtgaggttcctttaataaacaatggtgaaggaaaatcgcagattttaaaagttttaacgaataccaaagtagtaaatcgaatgtctaacacgttaagcttgaaatgaaatgggtgctataaaataattaagtaaatctcttaaaaccacacgagtccaaaacaataatattagtggattggttaattggtctatttttgtgtggacctttttttttttttgttttttggtgctttaaaaaatggattcagaatttcagatcattgaagatactctggtttgcgttttgaatcagatacaattatagagcaaaagattaatagtataattatatttctatgatcgcaaaatgcgaggacgattatttagtaattttatataatactcaataattttatagtccgtttatcattgacaattcattgttaatttgttatacagggtgtaaggataaaggttgcaagattttatccattagaaaactgtgacaatgtgcgactttttttgggttcaagtataaagatgttgtctttaaagacattgctaatcagaatctgaaatacgaaatggcaaacaagtatttttcctctgttctgaagtcgttgcttctgcttcttcaccttgtattcttgagtaagcaacatgttgactctgcctcaatcgtcaagttccttcctggttttgaaggcccccttccctttgagctcgaaaccgggtttgttttcaatctctttgtgagattaaatctgtgttctgtgtttggagataatctaaaagacatagtatactgtttcttgtggatgaaggtatattggtattggtgaggaagaggaagtgcaactgttctactacttcatcaagtctgagaggaacccaaaagaagaccctcttattctctggctaactggaggacctggctgctcttccatctctggccttctttttgagaatggtgaaatcgaaaacattgataaactccttcttatgcgtctctgattagtcaattatatatatatatatatatatatatatatatatatatatatatgtgtataagcagggcctctaactatgaagcttgacgtttacaatggaactctcccttctttggtctctactacatattcttggacaaaggtaatacaaaaaagtgtgtgtattcttgatatgacgatcagcaaaacccaatattcaatatattcttgatcatcattttcctcagacttcgagcatgatattcttggatcagcctgttggaactggcttttcctattcaagaactcaacaatttaataaacctagtgattcaggagaagccaaacggatccatgagtttcttcaaaaggtaaatggcaaatcttgatgcaacgtttctttgtgcatggagaaactaggagcctttttctatatttattgttgttgttgtttatgcagtggctaggcaagcatcaagagttttcctccaaccctttctatgttgccggagattcttattccggtttggttgttcccgctaccgttcaagaaatctcaaaaggtatatatggtatttttaatatcaatcccacaagcccttttctcaatcaattattataacaaaaaatcatgcatgatgatgcaggaaactatgaatgctgcaatcctccaataaaccttcagggctatgtgcttggtaatccgttaacagactatgcaattgatagtaacagccgcattccatttgcccatggaatggcactgatatctgatgaactctacgaggtatgaaacatgcatgacatttgcttcttttttcttgtccttacaacgaaagcggttttaaaaaaatactatttggttcgcagtcgttgaagaaaacctgtaaaggagaatatacaaatgttcatccacgtaacacacaatgcttgaaattcattgaagaatttaataaggtttacacactctagcgcctttagtaaataaaaaggttcatgatcactaaattcagagttcagacactttttttttgtgtgtggttatttcattttagtgtacaaacagaatactccaacaacttatactagatccgttgtgcgaaactgaaactccagattgctatgaaagtaatctatatatctaaatgttctctgttatactttggtagatttatcggtattcgagaaaaggaatttgtatacttttgcagatttatcggtatttgctaactacctactgggccaatgacgcgactgtgcgcgaagctcttcaaatcaataaggtaccaaatttatttttaaggttcttggtaaaggaacagagtccttctgataggaggatatatgatttcattcatgcaggagagtataggggaatgggtacgatgttatcgcactattccttacgataatgacattaaaagtagcatgccttaccatgtgaataacagcatcagtggttatcgttctctcatctacaggtgagagtttaacacttgttttgtccctaacaagattcaagactaaaacttttgcggtttttggtgaatagtggtgatcatgatttggaagtaccttaccttggaactcaagcttggataagatctctcaactattcaattattgatgactggaggccatggatgatcaaaaatcaaatcgctgggtatgtaaatggattctttttttattctttccctataggagactcactttgaaattcactcttgactctcttgcttggcaggtacacaaggacttatgccaacaaaatgacatttgctactataaaagcaagtctttcttctttcctattttatccactcgaatacattttaattgcggatttttttaacttgtattgagatgtgtgggttttgattatagggaggtgggcacacaatagagtttaaaccagaggaagcctctatcatgtttcaaagatggatcaatggccaacctctctaaaagaggggagtacctgccttaacgtataaaggaaaagaaaatacgattctagtaacacatccaaatatatataagaacccttggccttataaatgaatagaatttaaactcataatttgtaagcaacatgtgtgttgcttttccacaatcttggtatagttgcatttcacctttttttttttcagcaagcttgttttctatttgtttgatgcaaaagttaaattacatatattgtatcaataagtatcacaattatagagctaaattaaagttatatatatggttatcataaaatgttttaaactaaaatattatacagtagtataattaatttgttatgatcgcggtttattctttaacatagttttgttgtttagtaattttatacatggagtgaggatcaagattgcgagattttaatatttttatccatgaaaaaatgggacaacgttggtgaagaagccaaaactaaaagataagagtttggtaggcgacttttttgggttttagtataaagatgtagtaattgttgtccgtaaagacattgctaaccagaatccgaaacagggaatggcaaacaactacgtttcctctgttctgaagtcgctgcttctgttaatttaccttgtattcttgggtcagatccatgttgattatgcctcaataagcttatataatcgtgatcgtgaaaaacgaggatgatgaacaaataactttgtattatctacgaggtgtgaggatcaaggttgcgagattttccgataaaagaatgcgacaaggttggtcatctagccagaattgaatgatatatagttggtaggcgacttttgttttgggttttagtataaaaatgcaataattttcaagccatatattattgctaatcagaaacttgaaaagaaatggctaactacatttcctctgttttgaagtcgctgcttctgcttcttcatcttgtcttcttgattcagcagcatgttgattctgcctctatcgtcaagtttcttcctggttttgaagggtctcttccctttgagctcgaaaccgggtttgttttcaatctctttgtgagattaaatctgtgtttggagataatctaaaagacatagtatactgtttcttgtggatgaaggtatattggtattggtgaggaagaggaagtgcaactgttctactacttcatcaagtctgagaggaatccaaaagaagaccctcttcttctctggctaagtggaggacctggctgctcttccatctctggccttctttttgagaatggtgaaatcgaaaacatctttaaacttgttcttttgcgtctctgattactcgttgtaactctatatatgtacatataagcagggcctctggctatgaagctcgatgtttacaatggaactctcccttctttggtccctactacatattcttggacaaaggtaatacaaaaaagtgtgtattctggatatgacgatcagcaaaacgcaatgatcaataattcttgatcatcattttcctcagacttcgagcatgatattcttggatcagcccgttggaactggcttctcctattcaagaactcaacaatataataaacctagtgattcaggagaagccaaacggattcatgagtttcttcaaaaggtaaattaatgacaaacttaattgtctcttgaagccaaacggttctttgtggatagacagtttagaagaattttcttcctttgttgctgttgcatgtggtgcagtggctaagcaagcatcaagagttttcctccaacccattctatgtcgccggtgattcttattccggtatggttgttccagctaccgttcaagaaatctccaaaggtatatatggtaatgatatcattctccaaaaccttagtatcttctaagtgaagaaccatgatgatgcaggaaattatcaatgctgcagtcctccgataaatcttcagggctatgtactcggtaacccgataacagaacatgcaatcgattataactaccgcattccatttgcacatggaatggcattgatctctgatgaactttacgaggtatgaaacataacatatattcatgtccccacaattggaaaatataaaataacaagcaattcaaaaacattgtttcgttggcagtcgttgaagagagtctgcaaaggagaatatgttgatccacgtgacacagaatgcttgaaactcgttgaagaatttagtaaggttacatattcaaccgaagaatcatattttagctgttgtgtgtgtgtgtgtctgtctcccttagtaaataaacaacatcacttttgtggttattgtgtgttttagtgtaccaaaggagtatgccaagaagttgtaataaaaccattgtgcgtaactgaaactccaaattgctatgtaagtaatccaagtatcttgccctctcttaaccgttaaaccatttgagaaaatatatatatatatatatatatgtatacaaggttgcttttgcagatttatcgatatttgctaactacgtactgggtcaatgacgtgaatgtacgcaaagctcttcaaatcaacaaggtaccagtttgttttttaagttcatggtaaaaagaacattgtcattcttataggagggcctatgattgcaggagagtataggggaatgggtacgatgttattttggtattccttacactcatgacattaaaagtagtgtaccttaccatatgaataacagcatcaatggttatcgttctctcatttacaggtcagagtttaacctttttacgatcatcgttgtccctaaaaaggaaccaagacttatgtaaaatattgtgtgggtttttggtgaatagtggtgatcatgatttgaatgtacctttccttgcaactcaagcttgggtaagatctctcaactattccatcattgataactggaggccatggatgatcaaagatcaaatcggggggtatataataataaactgattttgtttttaaatggcttctcttattctttcgttttataaggctcgatcacttcgaaatttactcttgactcgtcttacttggcagatacacaaagacttatgccaataaaatgacatttgcaactgtcagagcaagtctttcttctttcctttttttaatccactcgaacatttttattgcggtttaaggtgtattaagttgtggattttgattatagggaggtgggcacacagcagagtacaagccatatgaaacctatatcatgttccacaggtggatcaatggccaacctctttaaaagaagagagtggccttttatgtataaaggattagagtttatggatctagtaacccattctccaaatatttaagatatgatcgttgtatgcaagcttggtttgcctcaagataattgcaaaagcttaggttttttttccttatcttctgacctgtataaaaatcttctaaacaaacgttgcacttgatgtaaaaaagttttttcgaataaatttaacattttattcaaaaaaaaaaaaaataataaaaaaaaaaaaaataagaaccctcggcctcataaagtcataatttgtaagcaacatgagtgttgcttttcaacaagcttggtacagttgcatttcactttatacaaaatatatccgttgtccttgccaaaaaaaaaaaaatatatatatatatatatccgttgtctgaattaaggtttttcatgcttttattgattgctggatcattgaatgtatgcaaatgagatttgaaaaaaaataaaaaataaaaattctgagatgaatgggatccaaattggatgaaatgaaccagttttctggaaagtaatctaagaatatttacaacattatatttgtgtacaattgcttgatttttcatgtacgattataaacaaaattttatagtcataactctctttgtgtttctctgtttactttgttcatcaaatctggaataaaaacatttttcctatgtttcttttaacatttttacagatcacatatgtatttttatatcaattgtttttaaaggtaatcttgaagaagaacgaaaaaaggattcagatcattaaagatatgtaaaattaaaaatttattctaatacttctatgatcgtgatcgcgaaaaaaacgaggaattaacaaataatttttgtattatctacgaggtgggagaatcaagattgcgagattttccaattaaaaattgcaacaaggtttggtcatgtagccaaaattgaaagatagttggtaggcgactttttttttgttttagtataaaaatgtaattattgtccttaaaaggcattattgctacattgctaatcagaaactgaaaaaaacaaaaaacaaatggctagcaactacgttttctctgttctgaggtcgctgcttctgttaattcacactgtattcttaggtcagcaccatgttagttctgccacaattatcaagtctcttcctggttttgaaggccctcttccctttgagctcgaaaccgggtttgctttggatgtcttcgttttattaaatccgtgttctgaatctgagtttggagataatgtaaaaaaattaggttactgtttcttgtgaatgaaggtatattggtgttggtgaggaagaggaagtgcaactattctactacttcataaagtctgagaggaacccaaaagaagaccctcttcttctctggctaagtggaggacctggctgctcttccatctctggccttctttttgagaatggtaaaattgaaaaaatcgataaacttgttcttttgcgtctctgattactcgttgtaactcgatatatgtctatataagcagggcctctggctatgaagcttgatgtttacaatggaactcttccttctttggtctctactacatattcatggacaaaggtaatacaaaagtgtctagtgatacgactatcaacaaaacccgattgatcatcattttcctcaggcctcgagcatgatattcttggatcagcccgttggagctggcttctcctactcaagaactcaacttttaaataaacctagtgattcaggagaagccaaacggattcatgagtttctgcaaaaggtaaattaatgataaacttaattgcctcttgaagccaaacggttcttagtaggagcctttttcttttttttgttgttgtggtgtagtggctaggcaagcatcaagagttttcctccaatcctttctatgttggaggagattcttactctggtatggttgttccggctaccgttcaagaaatctcaaaaggtatatatatatatatatatatgattttatgatatcaatccccaagaccttttctcagtcttttattataacaaaaggtatatatatatatatggttttatgatgatgattgcaggaaattatgaatgctgcaatcctccaataaatcttcagggctatgtgctcggtaacccgttaacagactttgtatatgattacaactcccgcattccatttgctcatggaatggcactaatctctgatgaactcttcgaggtatgaagtatgacatttgcttttgtttcgtgtcaccccaatgaaaagcggttcaaaacaaaactttttgtccgcagtcattgaagaaaacctgcaaaggagactatagaaatgttcatccacgtaatacagaatgcttgaaattcattgaagaatttaataaggttacacactcaaagctgatgttgtttgtgccgtacgtaaataaatattcatccctaaattcatacctttttgtgattatctttatttagtgtacaaacagcatatgtcaacgacgtataatagatccattttgtgaaactgaaactccaaattgctatgtaagtaattcatacaacttattcttgccctctgttaaaccatttgagaaaaatatatgtatacaaggttgcttttgcagatttaccgttttttgctagctgcctattgggccaatgacgaaaccgtacgcaaagctcttcaaatcaagaaggtaacaatttattttaattttcttggtaagggaacaatgtttcttggtaagagaacaatgtcattcttataggaggatctatgattgcaggagactataggggaatgggtacgatgtcattatggtattccttacaattatgacattaaaagtagcataccttaccatatgaataacagcatcaatggttatcgttcactaatctacaggtttagagtttataacccttctgtccctaccaagattctagtcttttgttaaactttgtgcggtttttggtgaatagtggtgatcacgatttcgaagtacccttccttggaacccaagcttggataagatctctcaactattcagtcatcgatgattggaggccatggatgatcaaagatcaaattgctgggtatatataaaccgaatttgttcttccgttttatgagattcactttgaaatgtattcttgattcttacttgaatggcagatacacaaggacttatgccaataaaatgacatttgctactatcagagtaaagtctttcttcttcttttttttatccgctccaatatttttttattgcggttttctaacttgtactgagatgtgggttttgattgtagggaggtgggcacacaatagagtttaaaccagaggaagcctctatcatgtttcaaagatggatcaaaggccaacctctgtaaaagaggggagtaacgtcctttacgtataaaggaaaagaaaagtatgattctagtaacacatccaaaaatatatacataaggacccttggccttataagtgaatagaatttagggttaagttaaactcataatttgtaagcaaaatgtgtgttgctctattcaacaagcttggtacagttgcattttaccttcttttttgtcaacaagcttgttttccatttgtttgaagcaaaagttaatttacatgtattgttattaataagtgtcactaaagatatttaaattatatttttaatgataaaattatatgttggtagaggacaaggttggtcatgtagccaatatttaaagatagacttggtagacgactttttttagattttagacttttagtagaaaaatgcaatagttgtccttataggcattattgctaatcagaaacaaacaaaaaaatggcaaacgactacatttcctttgttttcaagtcgctgcttctgttaattcaccttgtattcttaggtcagcaccatgttgattctgcctcagtcgtcaagtctcttcctggttttgaaggccctcttccctttgagctcgaaaccgggtttgtttttgatatcttcgtttgattaattcgctgttccgagtttggagataatctaaaaaaacgtagaatactgtttcttgtgaataaaggtatattggtgttggtgaggaagaggaagtgcaactgttctactacttcatcaagtctgagaggaacccaaaagaagaccctcttcttctctggctaactggaggacctggctgctctgccatctctggccttctttatgagaatggtgaaacaaaaataaacatggataaactttttgtgtgtctaggatttactcgttttaattctatagatgtatataagcaggccctttgactatgaagcttgatgtttacaatggaactcttccttccttggtatctactacatattcatggacaaaggtaatacaaaagtgtataatgatatatatgatcgagatcatcaaaacccagtgatcaatgtatattcttgatcatcattttcctcagaattcgagcatgatattcttggatcagcccgttggaactggcttctcctattcaagaactgaactttttaataaacccagtgatacaggagaagccaaacggatccatgagtttcttcaaaaggtaaattaatgacaaacttaattgtgtcttgaagcaacggttcttagtaggagcctttttcaattgttgttgtttgtgcagtggctaggcaagcatcaagaattttcctccaaccctttctatgttggtggagattcttattccggtatcactgttccggctactgttcaagaaatctccaaaggtatggtttaatgatatcactccccaagcccttttgtcaatcaaccacttctctcttaacagaatgaatatacatgatgatgcaggaaattatcaatgctgcaaacctccaataaatcttcaggttcatcggaatttctttgcttctatatatagtacacaccttgtgatgataagcattaaaaatagatagttgaggtgaataggtgattaggtagataggaaagaaaaatattatattgagaaaacaagaaccaagaggagaatgtgcaaaactgagatcaacgggaaataacatgcatagtagactcgtagtaaccaaatattatgttatttaattgtgtgaccatatttgctatatatctaccatgcatgtgatttcccgttgtatttgtttgacattctatttgtttaattattgtgcgtaaataaacattatactataacattctatttgctatatgtctgacaaacattatattacgtgcgtaattttcgtaagtagttaattaactattttaatatgttgcaaaattagacaaaaatatgatatattaatggataattcacgtaccgttcataagttcttatatattgtaccaattatattttagtattatttgggaattttattgatagttttcgtccttgattcactgacttacagggttatatgctcggtaacccaataacagactccaaaattgatggtaacagccaaattccgtatgctcatggaatggcactgatatctgatgaactctacgaggtatgaaattaatgaaatgcttttatttcttgtccccacaatgaaaacttaataaaacaagctgtttaaaaactctaatttgttttcgtatagtcgctaaagagaatctgcaaaggagaatatgaacatgttgatccatataacacagaatgcttgaaacttcttgaagaatttaatgaggtatatataccgtatacgtacacggtacactcgtcgaatcttaattgatgttgttcttgtgtctcactaatttagtctccttgtggttgttttatagtgtacaagtaaactatacagatcacatatattatacccattgtgtgaaatgacaaatccggattgctatgtacgtaatccattattctctatgttacccttaaatcactgagaaaaataatttaaagatgactgcttttacagatttatcggtattcactaagtcactactgggttaatgacgaaaccgtacgcaaagctcttcaaatcaataaggtaacatataagttaaacttaatcctaattgaaatatatatgatatagcaactaaactaatgaacagcatatgatgtatataagagaattgttttcactaatttaagcatgatttctaattaaaactaataaacgaatgacatggaaagtaaattcttacaaaatcaatgttatagtttaatttaacttgtctattaacatagaaatattaagtaggtgtgtcaacaacaaaaaataactaaaataaaacaatgtataagtatactcaatcgatgattgcaggagagtataagggaatggaaacgatgtgattggagtaagccatacactaaagacattataagcagcgtaccttaccatatgaacaatagcataaatggctatcgttctctcattttcaggttcagagttgaacctttttgctgattatttatacctaccaattagattgaagtatttgtaaactttgtgatgttttcggtgaatagtggtgatcacgatttcgaagtacctttaattggaactcaagtttggataaagtctctcaactatgccatcgttgataaatggagaccatggatgatcaacaatcaagtcgctgggtatactaatctttttcagtaaaccaaactaggattcttttgtttaattgctatatcagactcaagtttaaatcactcgattcttccttgcagatacacaagaacttatgcgaataaaatgacatttgctactgtcaaagcaagtctttattctttttttccactcagacatatttttatagtggttttaaactgtattttcttacactaagatgtgggttttgattatagggaggtgggcacacagcagagtataagccagatgaaacctttatcatgttccaaaggtggatcaatggacaagctctgtaatagaagaaaatgtggcttttaccgttttacgtacaaaggacaattgttgggtcgttgctatatggttgacggctatatttgggtttattttgaaaagattatttgtttgtatgtttttatgttagaagatatttttttttctttaagtcgaagggctatttagcaaaaaacctatgaaaaacaaactaacaattatcgagaggtgtttggaaagaaatgatcagaaatttgtctttctctctttcttttgtactttatagatagaaacattttaacaactgcatatataaaagtcaatgatccaaaggcaaaatttctacaaatggtaaaacgtcgtcatttatgcagatatggtaaagtgaaactgttgcagaaaactgagtaaatcaatattagaagaatgttcatgtttatttttgtaatgaagataaatctacgactctatgtcttaagccttttaacaaaaaaaaaaaaaaaaagagagagataagtctatgattttgtgcttttggatctcttgggctactctaatagaaaacagattttttgtaggatcgcattatcgagaaattaaagttggcaatattgagaaagaaattttcatcacttgaagcacatactgacatctactcattaaattaaaagttttataattcccaacaaagatgatcatgcacatggcaaattgaatttatatatgaatatttgcctagagagaaagataaatacatgacatgtaaggattaggatcggatcaaagtctatgatctattacgtgtccattaattaggttggttaagtcaaattgaactgcaatagacactcaaaaagcataaacaaatcttggtttgcattctttgcaaattttctatatctgaaaacgttattgaaaccattgagcgaaacataattgttttaagaaattcgagttgtaatttgtcaggaacggagaaaattgaaaacatgctaaatcaaactagaatagcagcaaattttaatccaaaatccacacgtcaggacacagtgatctcgactcttaagttaatagcttccaccttcagattagtcaaacactttgaaaaaaactgagcttaaccaaaatatataaatcaaagaaacgtgtgtagaatgttcgtagatatgatcatgatcatcttctcaatgtgtagtatgcttaaattcatataaatattgagagtttaaagttcacaagctaagcatacactagctatcaagccgcctcacctactctccaatatccattggaataatcatacttacgtgtttataaataagtattacatcaacccatatcttcttcatccacaaataaccattggctataattatgacaaaaactaccaaaaccatgaatcctaagttttacttggttcttgccttaaccgcggttctggcctcaaacgcatatggtgcggttgtagacatcgatggaaacgccatgttccacgaaagttactacgttctccctgtcatccgtggccgaggcggaggcctgactctagcaggccgcggtgggcagccatgtccttacgatatcgtgcaggaatcttcagaagttgatgagggcattcccgtaaaattctcaaactggaggcttaaggttgcgttcgttcccgaatcacagaacctcaacatcgaaacagacgtcggagccacgatctgcatccagtcaacctactggcgggtcggtgagtttgaccacgagaggaagcagtacttcgtggttgctggtccaaagccagaagggttcggacaagattcgttgaagagtttcttcaagatcgagaaatctggagaggatgcttacaagtttgtgttctgtcctcggacttgcgactctggcaatccaaaatgcagcgatgtcgggatattcatagatgaacttggcgttcgtcgtttggctttaagcgataagccgttcttggttatgttcaaaaaagctaatgtgaccgaagtttcgtccaagactatgtgagaggacaactctcgatcttttactttgactactcataataaaacctctatgttttttttttgataaaacacccgctctctgttttcttgaaaactacaaattgaataaaagctagtgaagcacatgcctatttattaaatcttcatcttctctcaatcttaatgcccgatataaatcaaagggatagagtggacgtccatttaaataaaaccagctaacaatacaagcccctaattattgttgtgtatttaataagaaaaaggaagcttttaaacagtacccgttctctagagaattctgatgatggtagtgatatagaaaatgataaaaataattaatactctagtctctagattgactaataactaatgttttcatttagtctaatgactttagttcagtttctctttacataatctaattgatttttttatatatttaaattctcttattctttaatttgaattttatttttgtttatataatagcaaaagtgactgaatcaatttacaaaatgatatttaggtaatttaaaaaacttttgaaaaattgaatctatgaaaggttagtttgcaaaaattctgcgtagaaatttatagaaaaatattatttttgtcctcaatgcatggaatcagttaagggataattttatgcaaaacaaagaaaggcttatgaaaatgtgtggcgttgcaaaatttttactagaacaaaagcaaagttgtggaaaacattgcgaaacgtgaggaacacactaatgttcaggtacgaaccggaatctttcggtttacctaatatgttatcaaaacagctactcaaagatgggcctgttttgggccaacgagatttgtttcagtcgatatcaacacaaattagtaaattaaagttctacgttttatcggtgaaagtcaacggtttcacagatccctggacctaaacagtttttttaaaaggtataaatttttttgctgaccaatatcgtcttcttcccgatctctcagcttcttccatttacaattctaccctttgcctcttggaacctttgaacgaaaatggcggaaacgatcggctcaggtacatctttcttttacttcttcacctttctcaattgaatctttcgtatgtcaacatgcgaatgttctggaactaaaaatgtatggacgatatcgattgattttgtatagtgattgattttagatatcgtcaaaacctttagtctttaatttcgcagcgtttttataattgtgcagaggtttcgtccatgtctgacaaatctgccaaaatcttcgtcgcgggtcatcgtggtttggttggatctgccattgtccgcaagcttcaggaacaaggtttcaccaatctcgttcttaaaacacacgccgagcttgatctcactcgtcaagccgatgttgaatccttcttttctcaagagaagccagtttatgtaatcctagcagcagctaaagttggtggtattcacgctaacaacacctatcctgctgatttcattggtgtcaatctccagattcagaccaatgtgatccactctgcatatgagcacggtgtgaagaagcttctcttccttggatcatcctgcatttaccctaaatttgctcctcagccaattcctgagtctgctttgttaacagcatcgcttgaaccaactaatgagtggtatgctattgctaagatcgctgggattaagacttgtcaggcttataggattcagcacggatgggatgcaatctctggcatgcctactaatctctatggtcctaatgacaatttccacccggagaattctcatgtgcttcctgctcttatgaggaggttccacgaggcgaaagtgaatggagcggaggaagttgtggtgtggggtacaggtagtccgttgagggagttcttgcatgttgatgatttggctgatgcttgtgttttcttgctggatcgatacagcgggttggagcatgttaacattggaagtggtcaagaagtgactattagagagttggctgagttggtgaaagaggttgttggttttgaagggaagcttggatgggattgcactaagccagatggcacaccgaggaaacttatggacagctcaaagctcgcgtctttgggttggacacctaaggtttctcttagagatggtctgagccaaacttatgattggtatttgaagaatgtttgcaaccgataagttaatggtttctcttctcatatatacacaactattgagtctcaggtaaatcagcttatcaccacattgtgatttaaacctttctttgagattcgagaattgcttttttttttatcaaaattgattcatttagagataagacttgcttctttatacaacattgtctgaggaattttaattttggatctccgagtatggtctattattagctctcttctatacaaattatcaaaacagttgtaagaagtttcaagaaaaacatttgatatctcactaatttggctatccttgcaagttgcaacgctaaaatgacaaataatgaattctcggcccaatgggcttacacaagccttgttaaagatagcgtgaacaaaacgcggctcactagccctaacctgtctctctttcgcttaccttcttcttcgtcttcgttggctcagtcacttgacttcacggccccgctcaagctctgacacgaaactcatttcaaattaatttaataaaaccttaatcacaaaaggggcaaaagcaatcgccggcgattatgccttctcctccggtgccggagacggttgtgagccaccgcttcgcagcttttcttatctggcaatcgattccttcatcagccatcttcttcttcttcaacattttcctcttctcaaccacttcaatcatttcctttctcttcactttcctcgtcttccattcttcacagcttctattctccgtctcactagctctcctctcttctccgactccagattctcctctctcccctctccaattcgctgtcggtcttcaccgtcacctctcggatcccgagttccgccgccgtgctcgcgtatcttcacgcatcgtgctcttcgtctgcgctacttccctcgctggattctgctcctctgctgtgttttgcttgtctagtgattcgtttggacccattggaagaatagggtttaggggattagtgactggattgctttacgcagtcctctttgttactaagcaacgatgggttttggagtttcctatcattcaggttttgtgtctttgcttcttgatttatggaatgtttcatcaattttgtatctttgctgattcttacttgtgttttttcaaaacagcgtccaccgttcttcagcttcaagattggtcttccttcggctctaacacaagctttgaagctatctggtgtgctttatgtgttgtcgacgataatgctattgtttctgctagactggtcaggtgggcttgtgtctgtatcgaaatttttgggtgagcaggtcttatcttatgccggcagtttctgtttgattctctcttgggaagtcactcaccatatacataaggttagttaagttttctctgttgatttgctattgatagatgtaattggttggtcgtatagccgtttagattggtggtatagtgtttagtattttaagatccctgtagcttattagtgaacatagttgaggttagcactcagtattacttgagtgatgcaaaacttaactgagaaaaatttgaaaagacgacaagttagctgtgtttgcaatcaaatgttgcattgatagtatgtgtagaattgttttcctgttttgttagtcatttctgtctttactatttatgttttggaagcctataccaaggtctgtctgtcttctgtgtatgtggatcagttcaaagaagactcatataaatttgtatcgatatgtttacttttcttgaataacttaactctattcctacctaaacaactttaagtattcatcggtgagtttgctctgtgtattacttgttacatccataaacttcagctacttttccaggttctagatacaaaagaagttagttataattgttgttttcatatccaggttctgcacacaaaacggttcagctttgctcctccaaaaggatctgctgcagcagaaacgaatccaagcgagcctcttcttgctgctttagaagggagcgctccaggttccctcgagcagtctcttgcataccttgatctctacatggtgtctcagaataatgttgacacatggcgtcgtgctgccttctttgaggagtccaccgagacgtacaaaagagtaattactctatgcttgaggcctttggaagagcttgcctccaagttagcttctgggctagaccacacctttactgaaaaaggttatcagacaccactccagccaccaaccgagtcctttattgatccaaaattcggcgaatcacttaagtctttccaggtaaaacgaaattcaaattttgatcccttttctatgtgataatttcttcatgtagctgtaaccaaaatctgtttgctctgtatccgatatttgcagctatatgcatggtgtgctcaaacatctgcatccctgacttcaatctctcacaaggaagacaggctcggagtagctcaactgtctggtggaaacgctgatgttgtctcaacacttctatcgcttttgctagctatcgaaacgtttatggggaagaagactaatcttcaatcacctcaacaactgatgggacctgctagtatcaaatgggcgacctcgagtatggtcagaaaagacgttaaacccatcaaaaggagtattggcgcaatgtacgcctacgcatatgcagcgacagatgttttgaggatatcagtataccagattctatccacattccgcgatgaaatgctcaacagcgacagagccggacttcttggtagagattggattggaagcaagaaaccaccttttggaacaaacgacatgctcctacagaagcttaagctcttcctcgagttccaagcttgatggaagattaaagaggtacaattcctcgattaaatgtggtaacaagtgtcatcatgattcaagagctggatagaaaaaggaactagagtattttgttacatgatcaaaaagccttgtattggaaaatgaaatccctcgattttgcagaaatttgggattaatcttgtttttggtaaactagaaaattatataagaatcaaactttaatggtaagttttgcatcttaaatcttgattacataaattttgcagaagactctctatatgcttaacagtaactaactcttacgcaatttacgaaggaaaccaaaattagaatctgaaatgggccagagatttattagggcccatggcgtggctaatagtaatatcgaaggagagatcgtgaccgttggatgatgattaatataataattgtatagtggttaaagcttagattggctacattacacatcgcatttacttaaagggcaaaaccctccagcgccgcttggatctctctctcctctgttctctcttcccttatcttcttcttatacccttcgaccaacgaagaaccctagaaatcgattaacaaggtaagcccacttcagcaaatcgttcactcatttcatttccaagatattcgattgtttccttctgatttagcacaagggtcaagatcatttttttgtttttgttcttcctcgattcatatgttttttttcattgattactgtttttgatattggttatcttgttttccaataacttgttagttagttaaaagtaatgtttgtgtaatggtgacctaatcgattgaaaaaattgaaactttaggttaagctcattgtaacaatacgagctttgttcttctcgctgcactgttctcataatcctagtgtaatcaatttgtgggttgtgactattgctcagtattactgtttttgtcattggctaattaataacagtattagttattgtatatgcttaatttataagatacattttgggctaaatgggtttagctttgtgtgtttgttttgaaaaacagatgaatagggaaaagttgatgaagatggctaacactgtccgcactggcggaaaggggacagtaagaaggtatactcatttatgtcttttctgtgaatttgtgtttttgccatttttcatgttatattctctaaacattttgactctcatttcagaaagaagaaggctgttcacaagaccactacaaccgatgacaagaggctccagagcactcttaagagagttggagtcaattccattcccgccattgaagaagttaacatttttaaggatgatgtagtcattcagttcattaaccctaaaggtaaaacatcaaattttatggctttataaatctcaggtttcgtataaaatttattgtattaatggttgttgtgtctctgttttaatgttgctatcacagttcaagcttcaattgctgctaacacatgggttgtgagtggtacaccacagacgaaaagtaagtgtttgtatcctcattgttgatccaatactattctcggtttatgcatagtctaatctcggaatgtgaattatcctgcagaattgcaagacattcttcctcagattatcagccaacttggtatgcagcattaagtgttacactctgatgtcctttcccaaaccagtggtcccttaagttaacattttgttttcttgctttgataatcgcaggaccagataacttggacaacctgaagaagctagcagagcaattccagaaacaagctccaggtgcaggtgatgtcccagcaacaatccaagaagaggacgatgatgatgatgtcccagatcttgtagtgggagagactttcgagacccctgctactgaagaggctcccaaagctgctgcttcttagaggaggaggaagaagaaggagaagagctcacctgcaaaacccatcataaaaatgtttgtcgctcgacctcttctgagcactgtcagattcttgttttctctaatgcttgcgaacagaaagacttggttttattatcacttgatgctttttggtccgaacagcaattttccttttattaaggttagatcgctttttgtttaccacctgttcaaatgagtactactatgtcctgtcgcttcatacacttcttgcaacacagtcctttgttttgagtcaacgatgtcttgagatgaacaatcaacagtttcgtacatttaaatggaaattccaaagattttacatatttccaattattggatgtaaacattccatagaaatacaacactctgaatgcaatcaagtaatcatgattgtttcgttttcgatctcttccgctttcccctgttgtgctagtgtttcgtaaagcggagcgtttcgagtttctcgtagccagagactcacgatgccgctcagcactgatgcaacaccaaacacgatgaacgacatcattgcgctttcccttcctaacgcaactagcagtggtgctgcagacgctcctagcataaacgcttgacgcaaaagtgagacagcagtgttcctaacgtttgttgggaacagctctacgcagtagacatataggacgtcatacgctgtcgaggatgccatgaacccaaccgcctcaactgcaagttgtaaccattttgccacagatatcgcacggatcacgcggtggatcgagagaaccgcgcagagcagacacgcgaatccggcgaggtatgatgaattcgagaatagtggacggcggttcatgaccccgaggaggaagcttccgatgaaaaccgctggaaactccatcagagcgttaacagcaacagttaagtaaagattgaagttgagattttcagcatttagttgaattccataataaacaaagccactgccaaatccagccatcataaccattatgattcttttcactgcccattttgttttccaaaacttctccgatgatgaagtttgatcatctctctctggaattggatcgactaggcttagatccgccggaagttgtttcccgttgagcctcgcgagtttcttcaagaccaccatggcttctttattacgtcccttgacaagaagccatcgaggagactcataagcaaagggcaggagacaaaccgcgtatccaagaggaagaaaggatatgatccggtaaagatttctccaggactttctctccaagtaagccatgagtggtagagatagaaaacctaacgtgaagaagaagaaaccgtattgccctacttggcctcgccactttttgccaacaatctcagttgcgagtacgatacaacaagacccaattcctgatctaaagaaaccgttggcaaaacgcaagaatgcataaacccaaacgtttggtgaaaaagagatcgcaaaggccgtgacgaaagttaatacacaagagagtaataaagtcttctttcgaccaaaccatgaatcagcaagatatccatacacaccagaacctgtaaaataaaacaaaagaatcatgtaaaagagcccttaccaaaccaaatcgtatttaacaaacttaagaagctatatatccatagtttttatgatccataccgaaaagagatccgatgaagaatagtgtggaaggaacagccacaagaaatttatgttgacatatgagattccactcagaaacaacagtgtcactctttggtccaatccattcccattctccactggccaatccacacaaggaggcaccctccacgatggcaccggttgcaagaagcctcgccgcgggctgagcatcggagaaaatggatataagagtggtctgagcatcgaagatccaagcgatagagaccaagagagcatgcaagatctgagcaaacccaagtgctccaatgtgttgctcgatcacctcgtcaactgtgagtgcgtacctattgtttggtagctgttgttgccttgttgcttctcctttctcggttgctgatgaatcgtttgatatgttcggtggtgtctccatgagctttggaacttcttgttttgaaggttccattctgtttatgttgtttcaggtggaaatatatttgttttcaatttaggtttgtgggattgattgatatatgtcttaagttagcgatggtatatatacacatggtcgaggagtgttttgcatccaatttctcactctctctaataaactaatcaaaaagcaattgtgcataccgagtcattaaaattttcgtataaacaatttaactttcttatattgtgttgtctatattatctgttgcgtttgattggtacacgttcattaagttctcatgatcatttacaactctaaattcaattatcttgaaaagaagaattacttttgattcgtgacattaacaaaaatgcaactctctctttttccttcttgttttatttgtctatacttctctttcatctttttgtctacaaatgtaactcatttttctttttgcaacaaacgtaactcttttagttcccactaattttaaatatattggaaaaagaaaataaacgacaaaggttacggttagaatgcatgatgcgtgacgagaaagagaaaaaaaaaatttatgatgcatgaggacaacacatagctaaaattacaaattgaataatatgatgtgtaaccaatgcatgtggcttgatacttgtcaaatattatttcgatcgatcgtgatttccaaagtttggttcgttttgcgggtttttggccgaataaaaacatgaaatttgagtttataatttgcaagaaacccgttgtaattaagtgaacgtatattcatccgtaagtacttgagtgttacgtatggcatactgcatacacactctttacaatatacatgtacggttcagcgattatgtgtgtagtactagatttctttacctaaaaaaagtaaatgagaaatctaagccaaaattatagttgatccgttttttggcgtttaataactattattccatatagagagataatgaacagaaaaaaactatcaatctgagtaataatgaaaaatggaacaaacaaatctgagaaaaagttgcaaatagaaatatttacttgtaaaacttagctagcataacttttagaactcaattttattcggttttcacagactctgcaactacttaagttttcgatttaggttatccaattatcaaaaagttgttgcataatggcattattaaagattagttaattaaagaggtgcgatcatcccaagagcccatgaagaaagtgggattaatagtaggattaggacattacgtgatgtggggggtctattggtacgtaatatattttcgtatatttgatgtacctatctctatcttcctttcttaattaagtttttcctattctctagaatgtgaaaattcattttccttttcaaacctaggtctaggctctatatgactatacctatgtaagtttttgcatgctatcgatcaatacaaaaaatttccgaaggtcgttttccgtgatagaatcatccttgtttgttgtatacaaaacattacacaaacacaaacatcactaacaaatatatatatttggacttattactccatctggaaagcaacatatcgttcatgaatcttcgtcacgtgaatattatttgtttgtgttaatggtgttaattagccggaacttcttatataaaatttcaatttggaatatagtaatatgatctcgagggtgaaaatgttagtacttgtgattacgtccgtctagtattatcgtctacgttagtataatcatctataaacttttttcttgattaagatatacctttttttaggaggaatatgcgtagccaaagctcctttttcatgtgtttttctcgtatgtggtgacaatttgcgtgtgaatttgttattcgtttatatatcgtggacagatgagaattaaagtgtttatgtctatgggatatatggcatattctacttttgattccatgggactgttatgtacatgtctatagttttcgaagtcttttgtatatactataaatcgtggaattataagtgttaggaggcaacaaaaattgagaaaacaaattcctgatatcattttgaatacaagatttggatgtttctgtcgagatatatatgcaaacataaaataatcaattcaaatcggtgtaacgaagaatagcgattcaatgatcgaagtgttctccattcttcctgaaagaaggagagactattgttcaaaccattttagtgcgatctcaatcttggccactatatgtgttatgaatcccaaaataaaagaacgacgttaatcttccattaattctggaaattagtctagactttggtaaagcatttacccgattattgaaataagagtatttggctgataaaaaagaacaaatattaataaattatgttcggttcgccatatatggaactaagggtatcgtagaagtgtaattacgaaactatatatgtcaaccagaatttcacaaaaataacgagtaaatctttaattcagtccgaacatacacgcacatatccatatatgtattatactataatagctaatgctaagcatacctatgtacatccgagtgttagtgaaccacatcacattatgttgcaaagtgacataagaaagaaaagaatttagtctgtctttcatcaattagatgaaagaagcataaaaatgaggaagaccgaatatacactcactagtggaagaactagtaatgacacgacataaatgcaatatactaccataccaaatgatcatccaatcgttacttaaatccatttatatttgtcttcttatcaattattttccacaataataaagaatttgggatatgtagtacttgatcaataattagtggatgacgagttgtgggaacactccaaatgctctgttaaagttaggcaagcctatatctttctataaaaaaatataaaaacactatcacttggttcacaatctcttgacattaaaggtattacaacctaattgttaaataaaaatcaacaaataaatgaacacaagagaaatcattgaaatgttttgcagttctgtatacctgtatccccaaaatgttttggcagtttaacctacagttgatatatgttactaaattataaaatttaacatgagagaactctgccattgaattgaatatatatttttttcctatttttgtttctcgatatatctacccaaaaaaataccaactcacattagtagattatatgtcgacctctttcaattccatttagaggtaatggaatataattccatttacaggttaaagatagggaaaaatggaggatgacgaacaatctaagcatttacattttagttaccaacatatatccttcctattttacttttttagatttttacctgattatgtatcactcagtataaggtattttcctaaatgcccgatttttttttcaatgaaatggtaatgacgttttggacaaatttgctaatatctaggatggagacaaattcttgcatttagacgatggaattgtgctagacgtgactgcaatcggtttctattatagtgagtttcatgaagaaatgctaccctaattctcatgctttgagtaacttgaaacttaaaaactatccacagttagttagtaatcaccagaagatgatgcggtacggtgaaagtgaaaatcacacttgaggttacaccattttgatctgtgaaagagcaaagctttcagatcaaccttgtaagaagatagtccttgagatccattgattcacatggatgctatgttacaaacctgaagaccaaaggacctgcatgaccctcgtgctctctacacttacagtcaaacatgtaatctgatcttgccgggtcgtggttggaccggcctgtccggatattttagttcaagaacattaaatgtaaaaccattcccttaatcaagctgctctgttttgaaaacaagaatgaagaaacataggaaggagatgagagaataaattgtaaagtccaattatcaaagatataaatggtaaagaagagaaggtttctataatagaatcagaaccagatagtgttttccactcttaaagattaggcattggatgtgacaaaaacatgatccaaatcatatttctcagacgagtatccgagctacaatgaaaaaagactagcaataattcaaactgaaactttaaatagaattagaaaaataatacaaaatcagataatttgactccaccaactctcatgccaacgaaatgcaaaatgcaaagatccacaaactaaaaacgattagagtgttaaaccaaaaaaaagaaataacgactagagttccataatcatctagctgaaaattgcatatgaaccttaacatgcatgctttctgattgtcagactcaagttctctaaggacagttgagtactatccagcccatctctgttgaaacctcataaacgtccgtattatttggtacacaaccttgaataaaaatcttttctgatctggataacaagtagtctccaatgtgccaacgagaaaactccttgaccaataggtcgacaatagcattcttgttgcattgcctatcacgtcaagaaccggtgtgcagtcgcagattatagatagttgatgaagttgcacaccaatgtaggactaaagtgccaaaggctgcaatgattcttttgtcaaagaaataaaaagatgcatttaatcaaagagataacaagaaaatgggatacactagagtcaatttagtgaatggttattggtcttccatattaggtgtgtctttattagtagtctcctaaaaactgacgttttcattgttgttttattcttgtttatatagtgaatgattatgagagactaattatctaaaacatgagagatgttaactaacttgaacatttatcgataaataaaaagaaaattagatattaaatttttaagtaccatttcatattgatattggtcatacatgatacaaccctgaaaatacaacacatacaagagaaccaagaccgtaaaaactaatgcaggtgcgagtttattcgaataaacacaagatcttcttgtcttttacttgttttgaggtatgatacataaacaaagaattgccgcgaaaaaagaagcaaatactttatcaaaaagaaaataaatgggcctcagaaattgagctaagcctaagcccaagcgagttattgaccataatttgtagctctgtagtcacatctctgagatgggcatattcgttgcatcacacggtccaacacatataatcaataacactataaccacttcactatagtacaacgatttaagtttgttgataataataaaaactccatagcgttggcgacatagcgactcggagtagtgtgatgaggatacgacaacatattggacacgtgactttagctaaacaaagtaacaaaccactttccccacgtgttaaaacaaacaatatcattttcagattgttttttcctttctttgacatctcaatataatttaaatcttttataggaaaatgctctttcacaaaaaacaaaagaaattgctgagagctttctagaatccaacttgatcatttacactttttattagatgctatagcatctattttagagactatgtagtgagttaattaatcatttcaatgtccactatccattttcttacactaatctataccacacatgactccatttacctcgtcggtagaattttttaatacagtttcagtaattgctaatcacaaatgaaaaaaatacttagaacattggaaattagtaagaatacaattgattttgaatgaaagaatcagcctcgagcgtgatttagaaaaataaaataattgataagattttgaataattaaactgggaaaaaaagaagaaaaagaagacagtgtaaagaaagaaagaaaaattgaaaagaataaaaaagaagaagcaaaacgcgagagaccgacgcagttttggcaaacacgcgtctgtctagcagtaaacgcactgctccgacacaacactcttcagtgttcgcatacttcgctcttcttatttcactctcacattctcacattcttaaaaaattatttattgtacttgtgttataattatcttccttctgacttttttttagtctgataattaagtttacgtcggtattgactcctagtctcctatgctggattaaatatgacgtctattacaaaaaccttcaacagttcaaatcaagattgaaacactttctcatagcaatttaccttttgctatcccaattttgcaagttttgactttcagcatattagccgaaaacaaatgttgcagtcttgcagatgagatatagatatatatagctaaatcaggtatacttaattctcagaaatatgtaatatcttggtattaagtattcactctgtaatttcctgttaatgaatcaatttaacgacaaaataaacatgacggatattagttattttctcatttcaaagtaaattattttagaaaataatgttttattagttcctcaaaacaaaaactagtgatgaaatagtaaaatcacaattccaaaaaaaatgcttaaattattatttatcgactgagaataagaacatttttctttgttagagctctaaaaactatataatttgctatatactatatatatatatatatatatatttttaaaacatatataatttgctatcctataagatattctttgtttgtgagaaaaactagaaatatatatatatatattttttaaaatagagatatattacctataaaagacatgtaatatctctcataaaatatctacataaactaaccagtaatcagcattaaacaactctttccgtttattatatttgtgtctttacagtttcttaaaccattatattaaaaaaaaacattaaatatattacgtcaataacaaaacttacgaaaaaaaacaaaatcttattaatggctgttttcgaaaagctttatcactcaccgcacaattttaaaagggtttattttagttgttatgcctaacgtcctcgtgatctccaaaatttcatttaatccatatttagctaattatcttcttagataaatacataatgcaaaaaaaaggtcatcaacacattcgatgtataaataaccaatttaatttttatttgcaatatgactagatttttggtgtacttgtaaatttgtaatgacgtaatcatgtccacattttctaattttttttttctttgctatctatataaatatacaattatgattattatgtaataataaatatcgcaatccactcttttttaattcagctagatacgagttgtctttttttattaattatataatttatttatttgtgttagaaagaaacaaaagtcttcagtttcatacttgaggggggttttggtttattaaaaaattggaaattaataacataataaatcaaataaaaaaaggatcagagtgagtgaaagagaaagagaaagagaagaagcgtttcgtcctcttcgtttccttcttccattaatacaaagcaaatcctactctgaaagcttctttattcaacctctctacttcagtttctctgtccccatttttcatctgagagttaaaactgtaacctcaaaatctgagataaagtcaaaaaaaaaaccccagtttatgattctcattttctctttataatcgaaagcttcgatttttaacaaaacccagaatctgtgttcttgtttttttttttttttggtgagagttatcttttttttttttggaatattgggtgagaatctgagtaatgggatttacataaaaagattctatgtaaatactaaaataatctggaaattattaaatttccaaactttgtgttccattttgtggactcaaatttgtttataaagatctcaaatcagagagattgagacgaccaagaacaagcagaagaagaagaagaattgagagaatgtggtggtggtcttcttcaactaaaggtcgttcgaatctggagaggtttcttttaggaatcactcctaagcctccttccttctctcttcctcaggtaatttttttttttttaattcttcattctcttagactaatccttaatttgggggtaaattaaggtcttaagcctcaactaatcaaattttaaaaaactattttaatcgattgtctctccccacaaatctctcgtctctaatcagcagattttgtcctaaaggtcttatttttaatcaagggtgatgtatcagacaacctagaacttgtaatagtttaatgatttggtgtgagttttcagatgagatttgggctatagagacaataattgcatggtccatcaaggagaaaaattatctatgaaatctatatccaatttaaatggtgtcacatcagtttatggattctataacaccacgtggaaacgtgcgacagaattgctttactcaactattttttatattactattatattcagtaatccattagctaagtactgagttttggttgaatcttcttggttgctttggtatatcctctggttctgtatcattacaaggttgtcttattcagtaatcttggtttatatctctgattatggattaagagctcaatacatgttggtctaataacctaaagatcatgttgttgcatttacattttgggggtaattaggagttaatgatagctagattatcagctaaacattggctttcagtgtgctgctttgtagtgtgttagtttcagagctttgtgagttgatgatattaacaatttgtggcaggaacagggaaaggaggagattgagtatttcaggcttggtgatctctgggattgttatgatgagatgagtgcgtatggctttggcacacaggttgatttaaacaatggcgaaaccgttatgcagtactacgtcccgtacctatccgctatccaaatccacactaacaaacccgccttgctttccaggttacgtttcccacttgattctgtgacattttagtctgttgtgatgaaagtttgactatggaagtattagaacatctcttgatggtttgttcttgggtgttgcaggaaccagaatgaggtggctgaatctgagagtagcgagggttggagcgatagtgagagtgaaaagttgttgtcaaggtcaatgagcaatgattcaagcaaaacatgggatgctgtctctgaagattcggttttcgatccggatggttcaccgttgctgaaagatagacttggtaaccttgactttaagtacattgaaagagatcctccgcacaagcggattcccttaaccgacaaggttctcttctctcctttcattttcatttcttagtaacctcattctcagttttgaaacgaaagtaacgttcttggttcttgttcagataaacgtattggtggagaaatatccgggactcatgaccttaaggagtgtcgacatgtctcctgcaagttggatggctgttgcgtggtaagtagttctttgttaagttaacaaaacccttcctgtttggttaactgctagaaatagtgattgagtgatggtttgatgaattaggtacccgatataccacatcccaacctgcaggaacgagaaagatttgacgacaggcttcctaacttatcatactctatcttcgtcttttcaaggtacgtatgatcacttcgaattcattgctcagtaacaagcaccattttctggttttattaatggtgttaaaaatgctgcagataatgtggtggaaggagatcaaagcaacaacaatgaagaaacagagttttgtgaagattccgtaataaacaagagaatgccattgcctccgtttggtgtaacaacttacaaaatgcaaggagatctttgggggaagacggggtttgaccaggaccggttgctttatcttcaaagcgctgcggattcatggctgaaacagctcaatgttgatcaccatgactataacttcttccttaactcgagcttctaaagatcaatcgggtcgttcgtatgtttatccttctccaaaccttaaacaaaaaaaaaagacctcataaccctttttctttgttgttttcaagctccttttgtttctctgtgttttttgttctttttgtttttgtctggctcgttgtgttgttttaggtagcaaccgccatcgcggagttttttctccttttgcaagccaatcatggaagtttctaagaagaaaacagagcttttttttctttttttttaacggtgttgagaaaacaagaaagttgttttcttttcttgggtgagagatcatgtaaattgaccttgaacagaggactctgttttgtacttttctgtctaaaatatataaaaaaatctgtctttcttgtatgtcggtatgagtggaagaagaagactgtttttgatagatttgatatgtcctttcgtttcttttcaagattttttagtgttgaatatgatgacgatgttgtcatacaatatttacttagtaacagttgttgcatacttttttttctatgttctttataatttaatttaaattgtttctatgttcttttcgaagcttaaaagaattgtgcaatcccaaactgaaacagtcaaacttactagttcaacaaaattgttttgctatatcgggctgatatttactgtcgaacacaggtaaaaaagtatttattttatttttttgttgaacacaggtaggtatatgcctacatggtatacaaataatatagacagtttcataacatttacaattgtaacatactgtttttacaatttttgttgtcgttttcttatttatcgtattaaaattgatcttatcctgaattttaaaatttagataactgacaaacgaaaagattaatgctaattgtatatgaaatgaaatgtattgttgtacattttaaattatatagacaatttaatgatatttacaatcacaaccgatcgttttgtcaatttttgttgtcgttgtattatttattgcatttatatcgatcgaaccctaaattttacatgtaattcacttacaatcaaaaataattaatgctaactttatatgaaattacatgtagtaaatttaaaattatattgacaatttcttctttgcatttttgttggcattttcttatttattgcattcaaatcgattaaaccctgaaatttaacatgtagatcattaacaatcaaacataattaatggtaacattaacatgtagtaaatttaaaatacaatacacaatattttgatataattttgagtttaaccaaattatccaacctataaaaacacatgcaatggattcttgaaatctttatgtctttagcgatttgaaatgaatttatgtagattttcatgtgtacacacaataagtaataaaatctaaattatcatctacttaaaataaaaacataaaatttaatcataaaatcaatactaaatatatcaaatcagtaaacaaaaaatcctatttcatattaatatgttaagaaataaacttttatgattttttttttccaaccactacatttatggttgtttttcaaatgttttcttatgattttctgagtcaatttttcgctttttgttagctggatactctctcttctgataatggtcttttgtttttcaaaaaaaaaaaaaataataattcttttttgagcaaattatttggttggaaattgcaaagtttatcaatcaaattaatctcatcctccttcttcttcttcttcttccaagtgacatgaactatacaacattacgcgttttcttctcttattgattccttcgtaagaaatcttctccactagttgaccaatcgagagacttgtggtcttcccggagatggtttcgtttacgggtttcgctttcgtatttggaattctacttgggattcttgcgatcgttacggcggaagttgtagggtttttgtatcttctgaagcgattgaatcggaaaagagatcgtcaggaatcgaattcgagttctgatccaaacttcaagagttttgatcctcgccaatccattgattttagtctcaacaaacaggtgatcagttttaaagtttctcgttagttccgcagtgtacattgagtttcttgcattggtgatctcaacgaaaccctaatttagttccgattagtcagaattagaatctggtggttttggtattgaggcaattttgatgattttctctatttttagatatctgaagtggaaggtgtttgatttcattgtgttgatgcatttgatatcttatatctctcagggagtgatctggatattggaattagatgaaaatgtaaaagattggatgaaggagaaattaccaaaagagcaaaagaagaagagagtagatctcttggaggtacatccagttaggagatttgctcgcatcaaagatcataagctcatcttgtctgattcattagatggccctcagactcctattactttgaaaggttgctttgttgacgctgtttcaggctctggaccaacaaggaaatggtaagactctcaaaaagcgtattaatcggatccattttcgataatgtttcgagtttcgtattcatactcctttgttttatgttatcttagggctaaaagatttcctatacaagtagaaagcaaaacttctgtcttgtataaaggaaacagagtgttttacattttcttagagacttcttgggagaaggagtcatggtgtaaagctcttcgtcttgctgcttgcgagaatcaggaaaggtttatttggtccaccaaattgaaagaagatttccggaactatctggcttcccttaatgctgcctatccttcttttatgaaaccatcagctgggtttagttttgagtcattggacaaggggcttaaagcagatggtccttcatcaaaggttcgtttgatctggaagaaattttcgaaaaagtgctcaactaaagtgaattttcccccgtcgattcgtgacgacaagaagacttcatcccgttcttaccaagattcacaatctactggtagctctggaaagagtacctcagcaaggaggatgcaagataacatcccggaggaaactgatgtccaagttatctcacgttcttggagccatagcagtcatgcatcagatgtagattcagaagacaagtcttttgatgaaggaacattggcattgaacgtagtattatctcggctgttttttgatgttaaacagaacacagtactgaagaatttagtgcgcgaacgaatccaggtctgttccatgaatatgaaagctttcactgaatgaggatattggttgcgttcatttattatctaactattgttgtgtttaaacagcggataatgtccaacatgagaattcccagctacataggcgaattaatctgctgtgacgtagacattggaaatctcccgccttacatacacggtacgagaattcttccaatggagatgaatggtgtgtgggcgttcgaaatagatattgaatacactggtggtgcgggacttgaagttgaaactcgggttgatgctcgagaggaagatttgcagaaaggcatagctgagggaaagttgcagccaaattctgctggggatgttccaccagatctccttgaaggtcttgcagattttgaaaagcaattaaatgttcccggaggaactgttgatgcacaagatgtgaaaagtggtggaactgataaagctggttagtacggtatttgctgattggttttatgtaatcatctaatccattttcttgtggttttgcataatgcttagaagcattagactaaggatgagaaattatatttattttcatctgtgcagatgaatcgaagggtccaaaaggtacaaaaacaggttcgagcaatggatccaagtggaagtctatgctgaagaacatcgttgaacaagtttcccaggttgatcttcgtttttctgttatgtttagaagacagtttcgttgcttgttgcactcttagttccctcactgcccaagcttcacaagctcggattgtggcatgattaataggatctgcaagcagaattagaaacacctttttcttagctcttgtagtatcttagactatctcgttttgtaaaactgcaggtcccaattactttgtctataggggtgtcttcgcttcgagggacactgtgtgtacacatgaagccgcctccatctgatcaactgtggtttggcttcacaagcatgcctgatattgaattcaaccttgtctcttctgttggtgaacacaaaatcacaaacagccatgttgctatgttcttggtcaaccggttcaaggtaagctgttgcgttttttttttgtttatgaaggaattcctaactaaccataagacaaaaaacaaattctgcagacggcgatacgagacgtcatggtgctccccaattgtgaaagcgttaccattccttggatgacagctgaaaaggatgattgggtcgaacgcaatgtcgctccattcatgtggctgaatcaagactccaccagtgatcgcgaaaatttggaagctgcagaagcgaaatctaaagctgacaagccaccgacttctgaacaaatgcagaaaactgtcaacatcccgcagaagcctagaattgaggaagaatctgtgtcggctgacactgcaccatcagctaattccatagctctcctagtagagagtgacaaatccttagaagaactcaagactccactgctggaaagcagcgaaaagcatgatacaatagcgagaggaggcagtgcgggagatataattccgggtattggtcaatcaccgtctatgtcgactgtttcgggtgaagaggatgattcaaattcaaaaggaaagaaaatgggggcagcaaaggcgaggatgttcgattttaggaagaaagtgggagagaagtttgaagagaagaaacgtcacgttgaggaaaaaagtagacagattgttgaaaagatgagaggaccttgacacaataacaaggagaagaagcttctttctttctttttcaggtttcagacgaacacaaaactgatagacagaagaaagtcaatagattagagtataggtattggtacttgtattcatgtttggtaaaaagatatcgagcattgcgaaatcgttctttattttttattattacaacataagagtagcataagaaaaaaagtatctatgcaagtgatctcatcatacagacaaagagagcttgaacaacgaacaaaagcagtggtgacatgaggaaagttccatctagtaatcttcaggggccaagggctggtgtacaccatgtgcgtggtgggtaggtggttcggtgggtatgaccatgtactcatatataagggcggctaaagcactaccgatgaatggtccgacccaatagatccagtggtcatgccatctccatcccaccaacgctggaccaaaagctctagctggattcatcgaagcaccagaaaatggtccacctactaagatgtttgccccaactatgagtccgattgcaagcggtgctatgatcccgaggcttccacgttttggatcaatcaaagtggaatacactacgtagactaagccaaatgttaaaatgatctctaatacaagtccattaaccgctccaacacctgatgctagacggaaaccaactggtctctgcatgaacacaaactctttttaagtcatataccctatattaatatggtaggttccatcttaaaaagcattgcaacactaagtactagctagatatatatgaagttgactagtgttaccatgccgtttgttgtgagccttaacaagagacaagcgaggatggctccaagaagctgagcgatccagtagtagatggcgcggatcgctgtaactctgcctccaacaagagcaccaaaagtgactgccgggttaacgtgtccgccggagacattaatggctgctgaaacagcagcaaacagagcaaacgcatgagccaacgctactaaaatcagccctcctggtgtgtttgtccccgcatgagccgcatgttcccaatacaacttatctaaggagaagaaaaaaaaagtcagaagtctgaagtcatatcacatatgcaaagactcaagtattagagtcagaacggtgcttgtacgaaccgagagagaggatagagccttcagctgcaaagacgaagacaaaagtggagagaaactcagctaaagttgctctaatggagtcagggtgtgtagcctcatcggctctaccgaaaccgtatgctctacgagctgatgttgccattatgatcaaacacttgaaattaacaacaaagtgtgaagaagaaagagagagatagagagagtttaaaagaaaccaaaagaagcgaagtcgaagtaaaaagggacagatgtgagacttgagtgtcttaagctggacacgtagctttaaattgcatgcaattacttaaccataacttagatgttttccttaagagttggtgttcgtgctgctttcttatcttctcttggtgagttatttttggacgaaccttattaggttcgggatatataatacatgtcctcgtgtacgtgtttatgtatgtgtatgtgttgtgttgactaagcatgcatgtgtgccaagtagataaacaagcatatgaaccttctagagttgggaaaactgtgagattgcacggtttcacggcagattaatcggaagttaatgaaattgtaatatgttctttatgatttgatcgtttgataattctgcaagtcaataattatttcttagttcaagcataacatgtgacaaatgattttcacttttaacctggtaaaatttcggcttctttcttcttaggcttcaaatgattttggcgggtaactgacaacaaaaatgtttgacaaaaaaaaaacaactgtttacataatgttttctgtcttctatagaatctttattaccatcaaatgaatttcaaaactgtgatctccattgaatttgatatcggagtgtgatttcttcaatcaggcgttgttagatccagaagcagcagccgcagccgcagccgctttcttattctccctcttcttcttgtttttaagagcgttcttgctcatctctctgtattaacaccagaggagtctccatcaacataagagcgacagtttttgagatttatgtatgtattacaagatagagacttaccctgttgtgcttattccaagtaactgcaatttcaaataataaaaactatcagagacataatgatatgtgatgccaaatgttcaatcgaaaacggtagtagcagtgtatatttaaggccatatggttatggacacgcatatttaagggctcattgagagaaacttgagttattttcgttttttgtttcaagtatgagacagaatcatgactgtatggttaataattagtaatttgatatcacgggtgattattgaaaagttgttgagttacctcggcttgaacagcagctgcatgcttagcatgcggaggtcgatatgcggccggtttctgtgcaataggattgggggcaatagttttcttctgagctgatccttgtcctaagatagataagtagaaattggttaagaacatgataagttaacaaaaatatctcataattagagacagtttcaagcatttgaaccaagaatttccgaccttgcgatttgccctcgccgagtttcaatgattcaactgacttgataagttcactgatgtcaccgaacctctctggagactctggtttccattcagcctgcaggtaaaaatcatagcactccagtaagacaattataataatcaatgtatgcttttcaaagctgtttaagagacacatacctgatacagcctctcaaacatcttcttataataacgctttccgtcgtagttgaagattttcatccttcagtcaggacaaagacgaaagatatagaacacaactttaaaccaaggagaaaaaaagaataataccatctctgactggttggttcataagtcaaaagtgatggattaaaataggcgggtatgaaaacaaacaattgatgcacgatgcatagtactcattgtatcactcaattatgagggaagaagtattaacatacccattgtcaatttgacgtcttggtgctgttgaggcagtcaagaaataacgcccgtctggagaccattcacttgtcacagaccactcggctttattacttcctagctgcttcttatttacaacatcccagaaggcctgaaatataaccatttagaaagaatcgtttagaatgtcaattgctgacttattgtcacccgagaactgaaaaatatgaacaacacaagggatcgttatttaccatatcaccaggcaagttaccgaatccagccacacataaaactgtggaacatcgattgaaagttacaaaaacaggtatgtacagaaatcctctgtttaagaagaaacaaaaacgagaggacaacagaaaacagggatgaagaaaagcatcatacctctcccttttgggttccatcgaagagtgttataaggaccttcgccaagttccatcaatggtttacaattcttgtcaaagattgtcacacaagcaggcataactgaagtcggagttgagggaaagcaatgccagaaggagtatatagatccaaatcgaaataacatcttaacaagaacacaatgatattaacatgtcaatgaaaaaacattattcctaaatgaactcgtagagataagtcgttatagctgatggaaaaaggatacagccatatacaacagcaaactctgaacccgaaaaggaccactgaacatcatgaactggtccttctttacctgttaaagcaccaaagagtcagtacaaccaacaatcacaacagcagatacataaagcttaggacttacgtaatggaacaaggccctcatgtgtgccgtctattgtaaggtagtgtagcttcgtttccccatagtaactttggttggtcttgtcaacatctgattgtacaaccactaggagtccagtggaaccatggttccaactaaactgcacagaggaacatcggaaaaagctacgtcgagcacttggctggctctgcaattcttccccacatccaaaaatctggacactgcctggactcccctatatatgaatgaattaacatgttagagttgcttgtctatagaggaaacatttatacacatgatgttctgcaacttcaggaatgaaaatagactactttgtgagagagaagactgcaacagatttaacatatagaagaaaagatgtctttttttgctattcaaaagtataatgcgatagcccaagcagtgaaaagtacctttgattctggaacaaacacagcaacatgggaagctggcgttttagaaagctcaaatgcagcaatcccaggaactctgatccgggatgttattcctttcgagaaatctttcgggtcaaagaattggacctcatttgtagctaaccggcacgcagaagattcatcaggacagaagcgaattgatggcctatagagcaaccacagaaacactcgttattataaaagcagcataataagcacaaggactatctataattgatgcatcatatatgatgccaataaagcactgagacctgcttaccatgaggctttagtaatggatttttggtaatgactgtgtgctagatcccctgtctcagtattccaaatggagacattcttctcttggggagtagtgggtttttgaaaagtctgaagataagtcccacatggagatagctcagcagctgtaacatttgctatagtgaatgaccgcacttctgtcaagctggtggcatcatagatactaataactccatcagatttcatcgccattaacttcgatccatcaacactgaacttcgtgttagagcatgaaactcgttcaagcttgagagtgggctggccattagtaaatggaggaccattccacacagtgaagccttcagcttctctaactacacagaaaagcgactttagataagagagagacatttaaacataactcgaagaatgaaattgagtttcagagatatgtacctaaaatctccaacgacggtgaagaactcattgcttacttgatacacctaatatataatgcaatgatgaaaattaaaatcccagaattgatacactggttacaaattgaagtcaacataaaagctctcaaatttgtactgaacgtataaaaccctcatcatcaattacacagtgatcgcggtagaggaaacgataatcaccaaattactttactggattgaagtaaagtaaacaacttttatatcacaatttctcaaaggtgaaatgcaagaacaggaaaatctgaaactggagaagaagaagaagaaagcacctaaatgaagcacgcaataacggagacgatccggtaatcgacggcgagagaagtcggtcgctgtagtggccggcttaagctctgaaccgtataaagagataccctaacttaaatttcatcagccttttgaatactctaggtaaaccagaaggttactgtatatttataaccaaagagaaaaaaaatcagctttttttataagctagaggtttttagttctctgtgtggagtacggctgcattgtttctaccaggtgaatctcttgctaattcgattcaaattaggtttttttccttagagaatcatatctgtttataaagagtcggctttgagttgtggtacgatttcgtatttggtctctttactagatagttcaccaactgctcgacgtaatttctcaatgaatccctactctctttttcataatctccggcgaaactacctgtagattgttttagatattcatatataggttattgagctttattctgtctgttatatactgtcactttctcaaaattcaaaattttggatatcagaagtcccaattctgttcaatgttttcctattgtaaagaaattgactttttacttcaacaatccaaatttcttcaccatttgtctgatatttgtatatatgtttacttattggatgatttcatcagtaatttgtgggatttccaagctccagtttttcgaatatggcggaagtaagtcttggtatgcttatagacattgtggacgaagagtggatgagggacactttgcctgatgatggtaaccctttttcctcctacattatacctcaagatcattgtgtttctcctattttctatttcataagagattattgttgcagatcttccattgcctccagtgcttgctgttaaaactgatgatactgaagaaaccagtatggctctttgtttttttctttgctttgctttacagtttacatagctttatgattcttaaggtctaaattctttggaatatagtcttttcttaaaactgctagctgtgaatccacactggtgatgcatttctgatccaagatgttaaacacccatattgagaccttgaaatgtcataaggaaagtaatggagacacatacgtcactttttgtgtatgtttcaaacatagtaaagctcaaatttgagctttgtttcagagggtttctgagatttaacaactttcacttccaagatacctatgaatcttcatataagcagcttgactaatataatccctcacattgtgattgtttcagatcaggaaactcagcaagcagatgctgaaacttggcgtgatctagctcttgatacacagtaatagcctcttaagtacaatggaaaattcttacaagtcttgtttctcgttgtgtatgatcaaaaccaaaactgttcctggctttgtatttttttttggtagaagaggggggcgaacccccatttttattaaaactgaaaaactaaaaaaaattacacttgaacgttccgggggtacgcagaccccgctacattgtcgtgaacaatcgacataacactatctggagtagaattaaacaaatgaaaacctaacggtaaaagaaaagcatagttagctaacccatccgcgagatgattagcttctctataaacatgcgaaatccggactgaccagtcctttgaaagtaagccatggcacaaccgcaccaggaaggacagcggatgcgaatcatcaatccctgtccgaagaaaacccactaccatctccgaatcaatctccatctccaactgtgtgacaccgcgctcccaagcgatatttaaaccgtaatatgctccccatagttccgcaagcggagccgaacaaatcccaatattcaacgaaaacccataacaccaatttccatccccgtctcgaactactccacctactgtagctagtcccgggttaccacgcgaagccccatcagtattgagcttaaaccaacccacccttggcggagaccacgcaatcaatctctcctccctagctgtccgcgtcgtcactcccattttgtgcacatgcgccttctaaacatccaacgcacgatccttaataaaacgaacccgatcccgacacttcctgttctcgccaaagatgttaccgcaacgccatttccacccccaccatatggcctgcgaaaaagtgaccgcccatggacaaccattaatctctatctcctctcctaaatttgcatagatccattctaacagcgatttcgaaaagaaagaagagagtctccgtgctggtaacaagcgggtccaaattcccgccatcgccggacagtcccgtaaaatgtgtagaattgtctcctccccactcttgcatactgaacataagctcgaatcacataagtgccgtctgtgtctctcaacattcgtcatcaacacctgatttgcagccaaccatatgaacactcgaactctttcatgagctacaacacgccaaattctagagaaaaaacgcgccatctgctgcttcgaactccagtccaagcttaaaaaagaataagctgacttgactgtaaatttaccattggaacaccctccccaagacaaacgatccctagcccctgtcacattatccaccaccaaagatagtaacttgagcttcataccttctgtgatatacggcgtaagcctctgtaaatcccagcccactccatctctccaaacatccacaactttaaccgcctcccagttcgccggtaattcgcatgttaccacctcacataacggggtctgcgacatccacctatctttccagaagaggatatcaacaccatcccctagaacccagctcaaacccgagaaaaccacctccttcagacccacgacaacgctcctccatgtagaagaccatgtacctttagacaccatccacgctctgttatgaatatcaccgacacggtacttgcttctcaagattttcgaccatagactcacatcatcatgaagtaaacgccacccaattttcgagagaagagccgtattcatctgtgtagagcaccagatgcctaaccctccatcctgttttggcaagcacacacgatcccatgcaataagatgttcctggctttgtatgatgaagacataattgctactctacttaatattaaaaaaaaccttggtggcataaattttaagaatttgtcgctgacgtgtctcgtgatgattcgtccacgtggttggcaaacggctcctatttaaaatctcaaaaccaaaaaaaaaaatcaagcgaggaatatgctgagcttatcattgagtaatcatgttcctccattaacgctcttgagccatgaacgaagaatcctcaagctccaaagtcgatcgtctattctctttcaccaactcttccacactaagttccttctcctgtcgaattcttcctctttgtcttcttcacatggagttgttgctatttcggcatctccgtcttcagtcgcagttccggaattagaagacgaggaccacttcgatgacgaattacgtcgtctattggcgctcgtaccggaggagatacgccagacactgaaggagcaccctgaaattagtgaactcatagagatagtgttggatttaggtcgtaaacctctggcgcgattcccttcaggtgactttgttatctccgacgatgctgttagagttaaagatctggaattcgctgtttctcaggttggtaagtgttcttctctggtgatattttcgtctgatgaaacatctatataatagatgcttaataagaccatgaaactgctcaggttggtgagtttactaatgataatcgagctggaatcagccggacgttgcatcggattagtgcgataaggaatcggaaaggagaaattattggattaacttgccgtgttggtcgatctgttagaggaagcgctaatttgctgcgtgatcttgttcaagatgggaactcattgttgcttattggtcctccaggtgtggggaaaactacaatgattaggtttgtgttagtttcttcctacattgatctgcttgctcatagttcctttagatcatggatttgatatgtagtcatcattttgctatttcagggaggtagcacgaatgctaggaaatgactatgagaagagagtaatgattgttgatacttccaatgagattggtggtgatggtgatatacctcatccagggatcggtaatgctaggcggatgcaagtccctaactctgacatacaacacaaggttggttagtagtttagattgagctttgtgtatttaagtgtggttggagatggtttatatgtgtttcactttacttaccttcaggtgctgattgaggcagtagaaaaccatatgccccaagtaattgtgattgatgagattggaactaaacttgaagcgatagctgcaagtactatagcagaacgtggaatccagttagtcgccactgctcatggagccactatcgagaatttgattaagaatccttcattagaccttctggttggaggtgtacaggttagtcatcatatgtttgcataccgttcaatcccaagattggtcgtagtttggagattctagtttgacattattttgatgagaatctcttgcaaattgttattctagcataattcaatgccaacatagcactgcatttcttatccaaaaattggtttaggagatatgtttccgtttccgcacgtgcatcttgatatattagctaaacaagagatgacgaggcacaggaactgcgtagaagatttgaattgagtgagatcatgttgtggtagctcaaatggtcaatgtttttggacaaaatattttctgttgactcgttgttcagccctgtaaagatgcattctataataacttttatttcagacatattgatggagactttttggcagagtgtaactcttggagatgaggaagcgaccagaagaggtggccagaagactgtccttgaaagaaaaggtccttcaacatttaactgtggtgcagaaatagtttcaaagactgaagttcgagttcatcgtagtcttgaagcaactgttgatgctatcctcgcaggtagattctgtcttttttaagttggaactgttagtagatgcaaagtacagatacataaatgcagcatatattttgattcaacaacattttaagattctggcttcagtgaacttttttcttttggctcatcccctggctaaaaggtcgcttaccaaacgttgaaatccgcaaaataaagtctcatggagtggaagtgattatggagaaggaacctttcatcgacgagaagactgtggataagaaacatgaagaggaaacattagatgtttcgaagctcaccaaggaggaaactgtctctgaagtccttcaaactaaggagataactgaagcagaatcttcagagaaagatacattgatgtatctatatgtctatggggtaaaattataatgacttttgcagattctccagtttttaatagtctgatgctatctctgttaatttccaatattaatacacttattcgtcaatttctcccacccagattgcagaatcaactgttcttcaggcaatcaaacaactagagatggaaactgcggtagagttaactgacgacattagtgaagcagaagccttactcgcgttgcaagcaaagatcaggaagaatccccggattaaatcatttgctacatctcacggtatacctgtttatgtaacaaaggtaaaaaaataactaagaatgtcttgttcttcaaggtttttagtatcagcttccttaccaaaagaagcactttttcttgcagactaactcaggtatccaagtggccaaggcgatacgggcattactaacagattacgaagacggactcggagagtttggatcagaagatcgtctaaaactatctgaaaaaatggacgccttagaagtaactaaagagctagtcaaaaaaattctttgatagtaccacagttcactattgcttaacattgatttgtttatatgcaggaagcgagattagcgatagagcggatagtgataccgaaaaaggaaacaaccgatttactcccgaggccacctaggattgtgtctcttcaaggaaagctagtcaggaagtataatttacgatcagaaagaaaatggagaggggatgagatgtatctacggattctcccttatagcacggaagaagatagagacgaccgtgaagatgaaggagagtttggagaagcgaacggggaagagcttgacgagttaggtttcgccaccggcgagtctaatgactcaccctctggcatcgataggttacctctattgcctgattagttttatttgttcatacattgttacagatacacttttgtgaatgagaaaagtcaaaaaaaagaaaaaaatgtcaactgaaaaaaaaaatgaattgggtaatttatgaattgaaactcaaactagtctcgaaattttgtagatgcctaattttcactaaaaacgcttagctcgtcggaatttgacttccaactaattttgttcttaaaagttcttggaaaactcgcttattttcatagcataaatcaattattcatgttaaatttagaaatatcatactcttaaaaaatatagttgactttacagcaaatcaaacactttgattgattttgtttcttgcagatcctttaaaaaggatgggggtaatgaagttgtgtgacctgagtgactctatgcatatctaaccgtcattagaaatttctttaacttatctttatctccttttcagagatcatgatccattttaatcctatgattgttatttaattcaaaagataattgatatataagcatataacactagacaggaatagaaatgttattaatttatttatattttcgagttgaatggaagaaaaagtttagataaaataagaaagtgccgtccagaggaccactgtgggaggtagttagcgataccttaacaaccctgagaagaccgactatctatacactttactagtgcttttattacacgcagattttctatatcccaaattatgtaccattttgttgaatgaacgataggtttgtacacacattcaatttgttttcttgagtatgttacttctccggtagattatatccttatgcggtgtaaatcgttccaatttttaatatcgtggtgtttcatgagatactggtccaaactggcaaagtgtttcaaattttatcaaatgacgtaatggttaatatgttccaaaaacctataaagaaaaatgatttttctggtccacgaacgaaccataaagaaatggatatgtttattctattgacgaacacaattatagacaatgccggtggctatttagagcacatgcctcaccatgtattaaaaaatgatcatattcatttttgtcagcgggaattattcatattattagctagaacaaggtaactgaatttgtattagtaacagaaaatacgttcaaatgttaaataagtagacaataacgtttatttatttaccatcataatttgtaatatgcataatgcatatgttgttgaacgatgacattttaggtccatcaagttttgtatattgctttcggcatgtagagcggtgtaggtagaggaatgttttaaagaacgaatgtttagatgaatgaatgatgggttaatgtcttagcatccaatgaacttccatctttttcatcacatttttccttacacattttgtaatttggtaaactccatgagttgtttcattactcaatcaaaaaacaatagagtattctaaactaatactatacaattcgtatctcgactgtacaatctaagattcttgtaaatccaatctaacatatatattttgtaagaatcttttgtaatctcaaaaattaggtatttctgtcatagttttttttatatatattcttgataataagctctctttaataggtgggttgaagttagtgttgtattcactttttctacgagcttcgaattggtgtttcacttaattagtctataaaactaatgtgccacatttgtatccacaaaatccaaaatagttcccgttaatacaaattctatatcataaagagttttcaactttattaacgaatataaaatagcgtgattaactttgtcctatactctccatatttaattttacagggaaaaaaaagagagagatagtgatttggacctcaactcataaatcttctcctagtttttctttttaatttgaaatttcaatatcacttagtatagagagattcatatatggttgcttcgattattttcatgttaatagaatccaaattcaatcaaagacattactcagatcctttgcttcggagttacgttagttaactcagatggtcaactagataagctaaaggccaaccccaaaaaaaggcggcaaaagtcttccacgttggtcttattgacttctagctacgacaatatataaaaattgagcccattcacatttgtcccccatatatgccttttttatattatggacttgttttagttggtttatcgttcaaatgcactctaattacaatcttttcttcccctactaacacatgtcatcctcaacacttcacttttttcttgaaattttcctttgtgggtatatcctatgaaagcatgaatatacatctacgtttgataatgaaatcattcgcattattctaaaaaggttttcatacttcgtataggtttttctgcttaccacactcatacacacagatgtatataaatattgatagcttactttgatatatatttatatcatgaaacgttgacaaaaggaatatgtatgctgatctcgaatgagcactttggagaagtttaaatctcgtcaattataaatctccttccacgaccgccttagttttttttttctctttgccttatctattttataatgtatagccagccaataagttatcatttcaatgagattcatcatgatcccaatgccattctctatataaattgtcgcaaccatgtgatgaaaaaacacaacaacccatctataccatttttctagctaaaattaaactaacacctttctaaattgaaaccattgtcacataacacatggctaacttgaaattcttgctgtgcttgttcttgatctgcgtttccttatcgcgttcatcagcgtctcgaccgatgttcccaaacgcagacgggattaaacgagggcgtatgatgatagaagcagaggaagtgttgaaagcgagtatggagaagctaatggagagaggttttaatgagtccatgagactcagtcctggaggtcccgatcctcgccatcactaagtcttattctcgtagttttgaattcgaggatgtatattttgttcttgatcgagaaccggtttagaagaaaacatatcgatcctctttgtttgttttttttgccttgtttgttcgttcggtgtaaccaatatattgatgtatctgtttcgttacacatttatgatttgtgcatgctttacgtaccttatacattccactatatagtagtctagtagagaggaggactttgcatataaattgttatataacaagaaagggtaaagaaatatagtatgataagggaggattgaattaatttaatttatcctgttttttcagtctctaatggctcgtgtagaaaagtatatattatatatggactcttttgcctcatcgtccaccaatgaaatatcacataaagagagaacgatagtgattgaagtttttcaaaaagaaaaaaaaaacaggggaaaacagagagaattatactttttaagagcgaagcaacgtcttcaaatcttcaatttttcagagatcaaacccttgaaatgctgctctttacgaaactcattttccaaaatctctttttcatcactttcgttacaaattcacaaaaagttacaagtcgtgacaagcttgagcttaagtatgtgtatgaatagtgtgaccaaattgttttgcaagagatcaagtaacttgttacaaaagaaatgattcaacgtaacttacaaaactataccaatttaccaaatcagttatctgtggaaagagggtacctacagtacctctcatttttcatacacataaagaatctctcataagccgaagccatttgagtcgctgtaaacatcgaaagagcgtatcccttacaagctattcctttcatctccaaaaccctaggcccatctcttacaacagaatccaaagtctcaacaagagatctcacgtttggagaaaatgtgtacccaaaacgctcgtccacaaccactgtcccaacaatgcttggataattaggtgccacgacaggtttcccacactgcatcgcctcaatgatcgtcaaatcaagcccctgtggtctcaacgtcggattcacaaacacatctaaagcgttgtagaaaccagagagctcctctggctctaaagctcctaaaaccctaacgttttcgcctaattccgcgtatcttttgccccaaggaccagatccagccacaagcaaatagactttcgggtgcattttaacgagcaaagcaaacgcttcatatagaagtggatgtcctttgtctctcaccaaacgtccagacacacccatcacaatatatgtcccattgtcaggaataccgtgtttcgccctgaacctagctccagattcaggagaatacacgaacttggtttggtcaacaccgttgactataacgtgaacttttctcttaggaagttgatagatgttaactagtacctcgcgcgcgctgttgctaatgcaaatatgctgtttatattttgggaagaatctgatttcatcgacgagtctaggcatcgtttgttgaagatcagagctaggacgatcattggaaagttcttgaaaaagatttgaatgcataatctcgtaccagattccgtgccatgtcacagctatgtcaccattaggcaccattttgactcgccaatgaggcagagaaacactctcagtgtgaacataatcaaaggaatgatgatctagactgttgattttatggaagatctcaaaagctcgagagtggttaagtgagccgtgttcgtttggagcaaagtagacatggagatctcctttgttgtagtactcttctcggttacttctgtcggaagaaaccgtgaagacgtgaatctcgtgacctcttgaggcgagagaagtgtagagtgtgtaagcatgacgctccattcctccggggatcgaaccaacaggccatgacttgcagaagacagcgagtttgagcttctccgagattggtccaagtgagagtttgttccaagggaatgtcaggtctcgaagatctcctgcgaaaggaggattttccggtgaagaagtcaccggagagtaatcaaactgtgagaagaaaatgtagtaagaagaacaaaagatgaatgctaaggtaatgattgttgtgaatctgaatgaaaatgaagtggaagaagaagaagaaagagttgttcttgaagaatggttcttgaaggccattgttttggtttatttgatttttgtgaattgagtgcaactattgatgttgattctttgcttaaatttcggatctttctcgagttattatatcaaagttcatttctcaatgacattgcacatggcttagctaatttttatatggtttttacattcaattgaaagtcaaatctctcttaaccaactgagatttgtaactaaaccgggatatcacacctaattagttttcccggtttgatattttgttttgtacacgtaggcgtgtgattactccgtcacactttacacatgtgtaattcccctaatttatcgggtttctttaggcgcgtgagataatgcgcgtgtgtctacgctattcttgcgacgctgtgcttcctagggtttcgtcgttgcaaacacagtcaatgttcatgaaccacggatcctaatctccccgatcttcgattcattgtttcagaaatccccaattactgtctctgtgcgtaaaatctctagagaaaccttaaaattttccgttcagagaaattgtcaacgaaggtaatggcgtctggtcctatagctggtggtggagtttcgaagacgaagcataaatggagtgatagtggcaacaaaagccaaaaacgatccaagcccacggtggcgaattcgaattcgcttgggttggaagataatcatcagatgatgaagataagtttaagctcaatttccaagcttgaagttaggaacttgaagcggaaactacaagctgagcttgaggaagttaggagcttgatcaaacggctcgaaccacaaggtaacaacttcgctcccgtgccgaacaagaagctgaaaacagcaaacggtggtaagaaaggtggagtacatggagctgctgctgataaaggtactgttcagattttgaagagctgcaacaatttgcttaccaagttaatgaagcataagtctggatggattttcaatactccagttgatgtagttacgcttggtttacatgattatcacaatattattaaggagcctatggatttaggaacagtgaagactaggttgagtaagagtttgtataagtcacctttggagtttgctgaggatgtcagacttacttttaacaatgcaatgctgtataatcctgtggggcatgatgtgtatcatatggctgagattttgttgaatctgtttgaagagaaatgggtgcctcttgaaacgcagtatgagttacttattaggaagcaacaaccagtccgtgatatcgatttccatgctcctgtttcgacaaacactcataatgtagaggcgttaccgttacccgctcctacaccttccctgtctcctcctcctcctcctaaagtagttgaaaataggactttggagagagctgaatctatgacaaacccagtgaaacctgcagttttacctgttgtccccgagaagcttgtagaagaggcgtctgcaaacagggacttgacgtttgatgagaagcggcaactaagtgaagacctccaggatttaccttatgacaagctagaggcagttgtgcagattataaagaagagaactccagaactctctcaacaagatgatgagattgagttagatattgatagtcttgatctggaaacactttgggagcttttcagattcgtgactgaatataaggagagcttaagcaagaaaaaggaggaacagggattagactcagaaagagatgctgaatcttttcacaatagtgtgcacgaatcggtgagagcaaatacctaattgttattcacttctcttacttttaccatataactcttactgggctaatgatatcatatttcttcttccgtcttcacagaacacgctagtaactggccttgaatcgtcaaaagttactgaattaggtgaaattttaattcttaagatagtatcaagctcttctatattggtcgtttagccccactacaataactcttctttaatgtttttgacacttgaaaaggtcatgtggcatctactgttcgacaagaagtaaatgttggaggatcaagtagttctaacagttctagtagtggctcaggctcgggttctagtggtaaatgttgaagctggtttaccttcttctcccttatgagcatcacagttccaaacaagtttactcacattcctcttttcgttatgcaggctctgacagtgatagctcaggacatgaatctgataccggtaattaaccacgattgtgaaagtatttagcataggtgggagccatcgtggtgtcaacttccaacttttttttttttttttgcatctcttaaaatagcaaagctaggttaccttcttttccaccatcggattgtttctgtattactgtattagggttcttgttaattgtatagaaaagtggacataagtcttttgtttcgggcttgtgtcatcaattgaacaggcttgttctgtacttcttagttggtttttttttgtttggtcttacgttcaaatttgtgcattgattttcgaccagtcttgctgggccagatcggagaatagtttgacctcaaaacccaagcgagacctttattggcaaatttgtgttgttttcagtatcatatcactatttttagatcaatcaccaaaacaaaggacatgctacctaatgtagaaagatcaccaactggtggttgcatggaacaaagtcgtttttttatgcttgtatgtgaagacatacgcttctctcaaacatccaacatagattcatcagctcaatagcaagaagtagttctaaacgagctaattactccgagaagtctgtttcaaatgtctatacaaacaactgcagattcgaggatgattcaatccatcttccaagttgtgcttgttagtcttctagttctaggatccgtgagatggatacttgatgaactcaagagcaaagaaagtcgaatatccaaactatatggtttcagacagaaagaggcagtgtttgtcactaaagaggatcagcttgatgagagctgcaatgtctttgaaggacaatgggtttgggacaatgtctcttatcctctttatacagagaagagctgtccttatttagtcaaacaaacaacatgtcaacgaaatggacggcctgattcttattaccagaactggagatggaaaccgagctcatgcgacttgccaaggtaagaaacaaaaagcatgtgttgtttcatgatctcagattcaaacttgcgcagtgtttaaaacctctgagatgtttcaggttcaatgctctgaaactgttggacgtgttgagaaacaaaagactaatgttcataggagactcagtgcagagaagcacgttcgagtcaatggtctgtatggtgcaatcagtaattcctgagaagaagaagtccttccataggattcctcctatgaagatcttcaaagctgaggtacatcaaaactcatcttcctagaagagattttcaacatgaattgtaagaaaaaaggctaatatggtttcttatactaaagtttatgcaattgatcaggaatacaatgcatccatcgagtattactgggcacctttcatcgtggaatcgatttcagatcatgcaactaatcatacagtacacaaaaggttggttaagctcgacgccattgaaaaacatagcaagagctgggaaggggttgatgttctagtctttgagagctatgtatggtggatgcatcaacctaagatcaatgcaacgtaagctatataacgcataagccatattcgagttgcttgcattacagaagagcttagaaggaaaacttatacgcatatgcaggtatggagataccagtgaagtccgagagtataatgtgacgactgcttataaaatggcgttagaaacatgggccaagtggtttaagacgaagatcaattccgagaagcaaaaagttttcttcacgagtatgtctccgactcatctatggtatgttccttccaaacacaaaacataaaagattatagatagtttttagagcaaaccttttcaatttccaaagacatggagagtgattttggtgtgtgatcttggaaggagctgggagtggaatccagggagcgatggaacctgttatgatgagttatatccaatagacaaaagatcatattggggtacaggatcaaatcaagaaatcatgaagattgttggtgatgttctaagcagagttggagaaaatgtcacgttcctgaacattacgcaactgtcggaatacaggaaagatggacatacgactgtgtatggagaacggagagggaagctcttgacaaaggaacagagagctgatccgaaaaactatggagattgcatccactggtgtttgccaggagttcctgatacatggaatgagattctctatgcatatttgcttcgcagtcaccgcaatttcttctgatcccttcttggggagtgttaagctcaagtttcttaagttttatcaacaatgggtttcattttgtagcagatatgagtgcaagaaaagataggataatttttttggtttattcactgtcaaaaaagcttcaatctcagagcagattagctcatttatgtttaaatatagtaacaggagtctcactcaagataaaacactggccggattttaactactatatgaaatgatcaaaactctcacaatagctcccactgggaatcttctgattcaagtaaaagtgagcttttggagtctgtggcttccacttgttgagactcttccttagtggccagatcagaacccattcccgcatctccgtaccaaatcggaagctgctcatattccttctctcttcttctctttgaagttaaaacgtccaagacctttctctgatgataataaaaagggtaaaattaggcaatgggatataactaatgcttttctcatgggattaatgctaagtttttagaaggtttttggtcattgactatcattattgaaaccaaattttcaagtctaatatcagtcagaaaaatctgttatcaagattagcattcactaacaagaaacaaggtttcaagtttatcacaaagaaatatctaagagaaagagggagaaagcaaggaaccttgaaggatctgagtttcttggtcctaagatgaatggcataaagctcactgtcctcaacatacaaggggtcttctcgagattccatgccgcacagttcagccatgatcctaacacgcactgtgtcattaacatacgagggttctttttgaaatgcaatgtccttggtatccaatggagtaacgtcagatttgcaattattaatcacatcatctggattatctacagaaattaagaaaaagtgttgcacatgttagaaaccaaaaaacaaaaaggcatgaagaggttaattcaaggttttacaacttctagtgaacaatagcacaaccagaaatgagtagaacttcaaactagagaaaatatataattgaagcactaacccgcattagaggatctcatgttttcatctggaaccttggtgacgagtggattaagacttgaatcattatccctaaaacacccaagtgcagctagaacggggccatcattacattttactacagtcccaaaactttccatagaactttgagtagattgagattctgtggaaacaacatctctgcacgatttaactttaacttcttctacactatcctcgcctgaaaaaacccaagagtttccagcagaagatttctgagaggttaaactgttactgatccaagactcatcatccgtaattattggtttttcatcaccaagagtagtgtctgatgtcagattagcatcacaatgctcttcgagcaatggagacttagagagtatttcttcttcagaaaatttctgaggggttaaagtgttagtgattagagactcatcatcggtaactattggtccttcaccaccaagagtactggttgatgtcagattagcatcacaatgctcttcgagcaatggagacttagagagtatttcttcgtcagacaaggaggattcaactctaacttcttgtacactttcctcgcctggaaagacagaagagttttcagcagaaaatttctgaggtgttaaagtgttagtgatctgagactcatcatcggtaactattggttcttcaccaccaagagtactggttgacgtcagattagcatcacaaagctcttcaagcaacggagatgtggagagtgtttcttcaccatccaaggaggaggctgatgaattctctccgtgagctatattctccactaaaatgtcaccttgaactcgttcctcaacccgaacatgtcctaaaatgtcaaagttctgacatggcggtgaatcagaaggactattacaacttggtgaattagaaagacttttagtgatatgcgactctttatcagtaactattggttcttcatcaccaacactagcggctgatgtcagattagcatcatgatactcttcaagcaatggggatgtagagagtctttctccatcaggaaatatctgagactcttcatcagaaactaattgttcttcatcactaagagtagtggttgatgtcatataagcatcacagtactcttcatgcagtggagatgtagattctatttctccatcagacgaagaggaagctgatgaattatcctcaaaactatctctttgaactacattctctttcaaaatatcgccttgaactcgtttctcaaccaaaacatgtcctggaatgtcaaagttctgatgtgacggtggatcagaaggactttcacttcgcggtgaagcaacacgatcatgacgtccttgtacattagaagaatggtcctctgcaacttcctttgattcacctctaacatattcgaatctcggaggttcacttgatttcaaacaaagcgtgctctgtgccaacataagaaaaccatcactcattctctctattctttagacattattagctaaaattgataatgacaatcaaacaatggactaacctgagaagtgaaagagtcaacctcaacaagcaaattttccaacttgttgtagattttactaaaccatgctcgtcctttagattctggtcccatgatggctcacgctatacgaaaattatgcagcaaaaatataaactttggttaggcaatatcatcagaataataaagagttgaaaaatatcatgttattccaaacttgatcgcaataagaagatgaaagtttcaaacaacaaaaacaggtcctcactaagaaacagctcaaaaatcctgaaaattttgccatcatcactaatcactaggtctagattttatcgaaactcagatgcttaatcggaaaagatgaataatttagaaaaactgtactatacagctatctcaaatttgtgacccgagcacgaagatcgctgaaaaagagaaactcatagacgcatcgaattacataaaaaaacgagactttgagatgaaaaacagagaaagtaatcaaaaggagataaaccctgaaattcaaagtaaacatagatgagaaaaacaaggaaagagagaagaatttacctgagaaagtaagaaggaaagtacaacagaggaagaaacgagaaaaaggcctcaacataatcatcatacaacaataaataaatactaaagagcttatttaagatttttttttatttttttattttttattttttgagaaaaggattctaatttaggattacaaccagatccataataaaaattcaatttagagaattaaaaaaagaaaaaaagaaaaaagtagtgttattggtttgtgatttaaatagtgatttaatgactttaaatgttactagaatctattgttattcaataataaaagttaattaagagtttggtgttattagtttgtgatttgtaaaaaatctttataactctaggttattggatttagaatttgataaagttgttgaaaaaaaaaactttgggttattcaactaaaacaacataattttttttattattaataaactaaattattatattattaatttataattttatacattttcgtcataaaaatatcgtcaaaatagagaaattattcgtgaaactttacaaaattacgaaaaaaactaattaacaaaattatataatactctctaccaatttctcttcatttatttactttatatgattttaaatcatcaaaattctttttaaactagaatccaataccagcccaaagttacatatagattccgggcttttattgggctacctatctaaagttaacgggcttataaaatttagtaggcccaatagaaataaagtagtccgaatgggtcatgaatcatgcacgccacaagtgaccaaaacatgatcatgtgtacgcatacgttttgaagaagaatgatccaaaataagaagacgtggattatgccacgtggaggggaatggcacaaaagaggcatgggtctgacgataaatctacctcggggagtgtgcatctggatgatccctctccatcattctttccatcccaaattctttatcttattttaattttgttgaaattccattcacattttatgatgtctcatgtatatatatgcaactctctcaacaaacacataatataaatatatttacctacatcagattcttcatacacattgtaatcaatagaccatagagatttacatggcgacttctaccttctcttctcgtggggcacaaaccatgaacaccatgttcgtcaagtaagtttaccttaaatttagtgttgagcatatgcattatttgtttcgtgcatgtcaatctttacgcataaaccatgctaattttctctctattcatattgattcttagatcatacacttttggttgttatgatcgtttaattatgtatcatgttatatatcattaacacatgcaatttgcatatatataggccgatgcttaggaaatcaattcacaagaagagtgcctcgcatgatatagtgagggatacggtgaagactgagggctctagctccggagaggaggtgaagacgatgagaggcttctacggcgccggagaaacgtcgtcgccggcgagtagttgggtgccacatgaaggtacgggaatatactatccaaagggacaagagaaagtgatgcaagatgtgcctcctcctccagctggcagccacgcggacgagctcgttaattggttctcttgatccattagtctcgagtgactctcttctcatctcgatctcgtcgaagactcgaagtctctatattattgtctattgttctaatgggaaaccataaaatatatgtgtaattaagtggaaatatattgtcatataaccaatgataatgaataattaatgatgattacaaaatgagttacgtaccaaactaccaatgcatgtagattaactgctgccttattcataatgtaccttctaatgactaactaaagctttgatccaaaatccaccaaacaaaaaacttatatccattcttacaaattggaattgctatagtttcagacagatacaaacatgcaagtagtaacaagtggggccaaaactatcttttgacttcaagaaccacagaattagccactatcagacgagaacaaatggctcttcttcttcaaaatcctatctttgggagaaaagtataaatctttttttattaaattgagggaaaaaggtagaagctt

SEQ ID NO: 1246 - DNA, 90444 bp, Arabidopsis thaliana
  modified_base (16989)..(17048): a, c, t, g, unknown or other
aagcttcaagagcccatctagagagagaactccatggtcctctttctgctactagcttataaaaagttgtcgcctacaacaaggaatttgaagtacaaaatccatcaatgaagtattcatagtgctcagagcaaaactacaaacacaccttaaattgatggaaatagaaataaaagcatgacacagtgaaaacttaacagagatttctataattggttatacgttttagcaaattacaccaccccaacctcaaatagtaaaaagaaaattcttgtaagattgtgcaagaatcttgaaatattgccaatgagctccagtcaattaatcttctgaagtttaaaagttaacaaaagttggagtttcattttaacagaactgcatagatataaaaactatttgtatatgacattcatggtacggaagatagttaccatttccaagttctttgtaagtccaacgcctgtatggaacatcttggcgagttgataaaaagcctttggttgaccagcattggcagcaacaaagaaatatttggttgcatgcctcacatccttcttgactccagtgcctttaagatacaacactccaaggttataatgcccgctaggatcttcattattagcagccatctcaaagtattctctcgcctgcacttgaagggaaatatcaacgggatatctttaggtcataagatatattgaaggaaaagtcaaaacaaaaactgcatctacgatggtttcagagtgccactaagcgactctttatatgtcctgatcaccactaaagatgagatgtgcttcagtttggtactttaattgttaagactaatttagaatgttttacatacagtcaaaaatctatcccatgtctcaattccatcatcattgtttctaagtaaaactaaattcttcaagtcagataaagaagcaagcctagtaagtatgaagcaaaagttaccttagtgtagtttctcttatctactccatagcctttgacatacaagtaaccaaggccattaaactcctctagcataaatctcccctaaaagttccattgacataggctctcctttctctaccgccttcgaaaaccaatacaacgccttagcgtgatcacgccttaatcctctcaaaccaaagtaataaaacagtccaattttgtgcattgctacagaattccctttctctgcctggtattccaatatctgaaaatcctcatcttcctcccctcgtgacttccttagtgcatctttattctcctctgttccaatgtggattctaactggctcagccattggagaatccttggatatcaaaaagctattcactgctgtctctgctagttcagcatataactcaacagctttatcatacatctgtgaaaaggatcacaagaaaccaaaaaacttcaaaattagataagttccaattgaaatgttcagtgttgcttgcttacattttgtcttagatatctaaaagcaagtgccattttagactgcatatttcctcccgcagccgcgaaatgatgatgcaaaatcgatttgcttcggctcgtctcacgcatcatcccaatcccgtatacgaaccccatcactgattgtgcgtgtggatctcctgacgaggcagacgaatctatctctgaaaccgcttcctccatcaatgtagtgtttccttcactcgcagccgagagaattttgtggagtccggagtaatactgcggcgacgcagaggcgtggacggtggactcatttgtctcgaagattcgacgccatgaaccgggatcaagctcctcttcggatttgggttcggattcaccaaactcatcgaaatcggaggattcgtaggcgccgttatcattaaaacctccgttgagatcttcgttggagagaacgagaacgaagggacgggcttgaacacgatggatgtagagtgagagtgtgaatagagatatggctatgatactctggcctgagactctcattctttcttttctccagtttctcagtgtttctcagggaagaagacgaaacaatggatgagggtaatgacgtaattttatcacactcccttatattgccacgttgattattatcactcatacaataatcatccgccacgtaaacatgtagattagccactaaacttatcattatgttgttaattttttttacaagtgttgcactggctaaggtttgaaatgggctctcttggagtaatccttaattttcaaattttcatcagcatttactgagattttatgaatattgttctttacaaaatttccatagaaatgaaatgtaaattaaagattttatcatgcaatcatccaaatttagttttgaatcttacatacatgccacatatatcacaacaaatcagacaaaacaggtaaatataaaccatgaaattcataataaatcttgcataattaacaaacaagattatttctatgcatgattgatctccacctatttatatgaacattgtaaacaacaaaagacaaataacaaacaaaaatggagattaacaaatttctggccgtagtcgtagccgtcgtggtcctctactccgtcgaagcgacggcacaaggaggaaaccctcagttgacggcttgtctgcagaaactgctgccgtgtcagccgtacatacattcgctgaatccgcctcctccgccatcgtgttgcgggccgatgaaagagatcgtagagaaagacgcaccgtgtttatgcatcgcttttaacaatccggaggtgctcaaagccctaaacctcaccaaagagaacgctctcctacttcccaaggcatgtggagttaatcctgacgtttcactctgctccaaaatagccagtgagtgatgattattcttctatttataagatcccatagatatataacttaatcaaatatctttgataagtatacacgacgttattttaatgttttttctctattgtaaatgaagctccttcgcctattgcgtcgccgggatcaaccaatggttagcactaattcgtgtttattttcaattttgttgttgttatacattttgttgaaaaaccccccataaaatacacaaactctattaatattttatcaaattaattgacatggggctttttaatgagcaggaacctcttccgcttcaactatcagcttcaatcgatttagctttctgtctgcttttgtggcaatgatcttcttctgattatgtcattttttaatttataattatatgtgtgatgactgtgtaattcggtcatcagaatgtgtttaagtatttttgttttaatcttttatatacaatttcgaagtttatcctcagtcttgatatgaaaaggtatttttaaagaacataagttttggccaaccccaaaatcaccaccattcatatcagaatgacgatagttccaaagtgtctacctgactgacaccgaaattattaaccactgggatatgtatgagacattcgattgccagcgtttatgttgtaaaaaccaaattcaggttaaagctagaaactatacaaacatgaaacatgtaattgcatcgacaataaccaaaaacatacacaacaaaaaaaaatgaagaaaaagaattaactaatgaggtttggtactaaaaactagttcaatatttattttcaaacctcacttcctatccaactcaaaacgaattcaacaataagtaaattgattcatgtttctaaaaatgatggacattgccatgtaaatttaatcttatacataagaaaaatataagatttaaagttaggcccgacacaataaatttgaggtccttgcgctggaaaaaaatgtatcatttgtcccatgttttttagaaaacaaaaatggtacaatcctaattttaatagatttcattcaaaaagaaaagtaaaaaatgaatggaccatggctataccacctccagcacatatatttagagccaggctgttcacagtcaaagttaccaattagtaatattttaattaacatatttatatatactaattaatgctgatacattttcactgtcccaacattagatacctgatattttatctttatccagtggagactaacttataacagtaaggtatcacaagattataaggaaatggtaaacttgtcacatgtatatactggtaattagtatttagtcaatttttggaaatccaaattcagacattttggattttgtagccttggtcatatcttggtcttatcaatacattcaattgtataataacaaattcagtaacctacaaaaaactactatactaagaaacaaaactttacctctatgtttgacctgccctgtccaatagttgtatccaccaatatttcctagctaagttaaaagaaaaaaccttccaatattttctctttatatgagataaaatacactcagcaaaacaaacactgcataacaaaaagaaaatgaatatcacaagaattctcggtgtagtcaccaccgtcgtcattctctactccgtgcaagtcacagcacaatttttcggagacgttcaacaggcaatgagatgcgtagcaaaactaatgccatgtcaaccgtacattcacttgtcgattcctccgccgccattgtgttgtaatccgatgaaacagatcgccgagaaggatgtgtcgtgtctatgcaccgccttcaaacatccagacttgctcaggttccttgctctcaccaaagagaacgctattaaaatcctcgactcatgtggtattaatcatgatccgtcagtctgcaacaagactaatcgtgagttctttttatctcttattagctttaatcaaaatgtgtgactattgtattaattgcatagattatatacgcgttctgatattgatgtttgttttcttaatgaagcttcttcgcctgctgcgttgcctgaagctgcgactagtggtatgcatttacctactccatatcaaaattgaatttgttggatttgctattcggtttaacgttttattaattgtttagtaattaaaataaaatgatgaaaattgtgaaattatataatttttgtgaactgtgattattttgatgtgactttcttattgaaacagggaattctttcagcaccaagaaaaacacagctctagccatcacttttttcggattttcttttgtatttcttgggatgatcatttgatttttttctttgtaattctcagagacatatatatatatatatttttttttgaattagctgacatctgaaaaaaaagattccagtattaccgtctgctaaatatgctaagcaccaatcaacttagaaagacctaagaaaatgagaagagcacacaacaatttctcaatgattgaaagatttatcaggttctaggatttttctactgtgacctcaatgatggttagactattataaatgattgaacgaaaacattaaggaaaaaattatatttttttctaacgattttagactgaacgaatatctttcatctatcaattccccccccccccccccccccacccccacccccattatgtttgtgatattgtagctcctaacgaatggtgagaattgagaaacacgaatctctctttttggcatgagcaaaaaaatagcaaaaatctgtctaaaaattagatttcctaatttcttttaaaagtcattgctaaaaaacactgtttggtaaaagcagaaataaatcttaaaattagattccttaattccttataaaagtcatttgctaaaaatactccgtaaataccgtgttggcatgaacacgtgttcatgttgtgtgtgtaatagaataatgggtccctagaatatcagaaacagacaagcaaacgagtcacccacttgcttgctactccacgcgcctttaaccgcgtctgccttccactctcttcttcttatcccgcgttctttggaacttggacttgggttcgttgacatcaaactttgaattttatttgctaaaaatgtgatctagaagataaagaattaagtattttgagattagtactaacctagtcctaacttcttatctgaatttgttaaaaatcggaggatttctcacgtgaacttatctgaaaacgataaagactgaagccagaaggttataattaaccgaaaaaaccgaagtagtcaattcaatacccgaaacaaaagaccggaatctcgatcacttaaccgaactaattgaccacaaaaataaactacttttaaaatagatgaacgaagaagcgcgtgagattttccatataaagacgctcgcaaacccaatcctctttcacaaatcacaaatcacatctcttcatcttcctcggtttatccaaatcctcattcagacttcatcaaatcgtttcttgcttccgatccgaaatttgcggcgggaaaagaagataacatcaacaaaaaaatgatttctctattcatctcaaacttttcaaacttatcaaacttatctccgacctttgataacatgaacatgaacatcccatcgaagaagatcgtaccggtaccgacaccgagtgagaaagttgtctctttggtatctcgaaccggacgagatctccaacgttacaacaccgcagggtatcgtcaagtcgtcgggtacgttcaattttaccaaaccctaattttaaaattctaggttatgaatttgggggaattttggaatctgattagaaattcgaaatttattgcagatgtgtaccatatagatacaagaaacacggaggaggagaaattgaagtgcttttgataagtgcacagaagaaagggaaaggaatgttattaccaaaaggaggttgggagattgatgaatcaatagaagaagctgctttaagagagacaattgaagaagctggtgttacgggtcagcttgaagaatcacttgggaaatggcaatacaaaagcaaaagacatactatgattcatgatggtcatatgtttcctttgcttgttagtcagcagtttgagatatggcctgaatctgaattcagacaacgcaaatgggtttctttgtctgaagcgattgagttgtgtcagaattcgtggatgagagaagctttggaagctttcattaaccggaaatgccagacccaataaggataatgtagcatctctgggaacaaagagctcttcatttggaagcagatgcatataattgaagagcaggtcctcaagtttagtgttctgatttgattcattcatttgttaatgatgttagtagactaattgataataactgattgttctgaatgattgtcttcacaacatgtaatgtgtacatatataaaatggatcaatctcatagatgtaataacgacttggtcttcacttttgatttcttatgattttcaatttgttggtgttattttttgaaaaaaatgcagattaggcggtgatgaataattattgacgagaccaaggaaaacaaagtaagattataacaaacaaacaaaaaaaaaacaatttgaatgtttcgttcattgactaaattttcaaccgtggaaagaagaaagtaccaattctaccctcaattaataagtttaaggggataggggtccggaagttggggaagaagaagaagacggaaacaatggcaattagcttaggtagagtcgtcgttccgtcgtgtaccatttctggagatcggctcttcatacctaacttctcggccatctgcagcgtctcttgtggacgaatcaatgtcggaaccggcgtaatttctgctcgtcgacgccgtgacattggcggggttttaatatctagctgtctctctacggattcatcttcttctccaccgtcttcttcttctgggccgaagacgaaactctatgtcagtggtaagttagttcccttccttgtttctgtttccaattcttcatcttgcatatatcccagttggtgaatgatgttactgtattttggaactttttggttatacaactgtgattcttcactatttcttcgagtattatgtatgacattagatgtagttttttttttaccgtggatacgttgagagctacatgtcattgtgttactataagcttaggatatctccaaaatattcggagcaaacacatttgtggtcaccaatttatgtagttaacaatgttagatgttagaacttgcggtatagttttaaatgttagagagaatggaatgataaatttgtttgtggggttctagagccttgtggaatagcttcactcggttagggaatgtctctgtttggttactttcagaactggtgagattattgggtatttgttacaccgctgtaatggtacctaagacattgccggatttgttgtaaaggtagataatgattttggttggtgtatagtgttgtgtgtgagctctgatatactggggagatagatatctttctgctgttaattgtggttaattttaattcattactagcaacacactgttataagcttgttttctaagtaaaagggattggtgcaagttgaatagtggggaattagagccttagacatggccataagcaaaagcagtgttaatgctcttctatggtttcctttttttgtttcacttttcagctttctgcaacctttttgatgcctcatcgtctcttctttcactcagacactcattatatgagacttgaactctaatgaaatggattgagggtttgattggtattgacttgactttgatggtttatcacagggctttctttccgcacaactgaagataccttacgggatacatttgaacagtttgggaaccttatacacagtaagcataaacctctccttttgttccaacttctatccaaattctacaactgtaactcatgttcttgattgtgtccccatgtagtgaacatggtgatggataaagtagctaatagaccaaaaggttttgctttcctacggtatgaaacagaggaggaggctatgaaagctattcaagggatgcacggaaaggtactcacctcaacattacactcttgtcttcattcttaaaccgtttatctggtgattgagaacaatacagcaaatttctgatttggtgtttatacagtttttggatggaagggtaatattcgtggaggaagctaaaaccagatcagatatgtccagagcaaaacccagacgagacttccccaaacctcaatccaaacctcgcacctttcgtacctggtagctcttttgattttgtcttcatactgtgtaatgaattgtataattttaaatgtagttttcagaatatacaatggagtcattggtgaactcattccaagtttaaaccagagtaacattattttaaataacgtaagtcatgtcaaaatggataatatagcttttaaaagaagaaggtaaaatcaatttccctttacttaggattagtgttaataattgaatcatagttttgttactcaaaaaaaaaatcacatgaaaattagggtttacctattcttttaggatatctaccgatttggtccaaagaaatagagttatgattatatgaaagatttaataatttaggttataatttagtctcaaaaattatttaaaaagaagttaacgtatttatcttttttttttttttggtttaatgttaaactacgtatttatctatttacacaaacaactgctatatctttgaggagattatgtagggttataaaagaagtttcttttttttttttccttatctgagaaaccaatttccatttttttaggttttctattccttttacgagacttatcactcttgtctctatatatataaactaaagaccgcatacgctttaagtgtcaaaagccagattaagagttaagaaacttcatagtctctcgattctcaattcgatacaaaacgaaacatggcgatagagaaacaagagattaacgagtcgtcgatcggattcaacttaatctccgagaaacgtcgtcataacaagacccacgatgacaaaccctacttggtcgattctctgacattaaactcctgggcatcacaaccatctactgatgaaatcatcatcatcgatgacgatgaggagaaggaggtaaccctagagccgaagaggaagaagccgagattagggtcttggtgggacaacgtcgaagccgtggacgaattatgttgcgtggtcaagggatcaccgccgaaggcaaaggaggacaatggtgttgcatcaaaagcggattcatatttttcttctactgatcttcacgagacgatggagaacaagaagattaacgaggataagagatcactaccggagaaggataaagacgagagtactgttggtgagagtaatactaagaataagggtatgaacacgtgacgcttgaggatttaggggtttcggtggaagatctcaagagtgtcccatgggaagcgtttgaatttgattcgacatgggagattaggtcggatccatggtatggtggatacatggaagacttgtctctctttgattttaattcccacacttaattgcttctttttagtctatgttttttttacagttcttgtatgttttgctttgtttggatgctggtttttcactctgcgtaaatcgaaattcgcttctttttttccatcaattctttcatgtaagcaaacatctctactagattgatattgttcgccatattaagttccaactttgggatcaattctaaactgcctttagatttatttaaaactcatgaaatatctaatatattgaacggttacaaacagaaaatatcaaggaaatttcataagtactaaataactaaatctactcaatttcaccaaaataatatacctcaattcagttgtaatatttgacttcgttcatacttttttttattctaaaacatcataaatctcaatcgtaattggaataatctccaattctccatgtcatgatgattaacatttttttttatcgaattatagtgaagtagcaaaagtgaatcagatgttataaaagcccactctaataatggttgtaaatcaacccaattgaaaataaatccaaagaaacttttttgttgaaccaaacaaatcgaagtaggagcacatcaggcccactatcttgtaagtctatgtctgaagagaaaacagagcacaacaacgaaggacaaagcaaccgagggatgggccagtcactaatgcaacaaactctgaagcccatttatgaagaaaagcccaaatgttaatctgttataaagcctcatataagcccaataattaattttcttcacaacggctccacacagtgagtgttgtacaaatggccaaaaggtgcaatacgattactgagattgagaggcaacttcctggagccaggaatgctccattgtacgtaccctgggcctgatgctataattatgtgtcgacatgtgtggaacaaatgtctggttaataatttttaaattaaaaacacacacaattttgtaattaaacatcattaagcatgtgctcaataaatagacacatgacacatgctaaatgctacatatatatggcaaaaaaaacatcaactaaatattcaaaaattcaaatctttaacaaccccacaaaattaaactttgtttgaatcacacaaaattttaatttcaatttaaaatatataatccaaaccgtaaacttaaggttatataccacacagatataatttgagctcttaaactttgtgtagttaaagattgtaatttaaaactttctttaattcattaaaaaaaactatacaaaatcctgtatggttagatttttttttcttctacaagtatggttagattctgatttcaaaattttgtggagctatgtctataaggcatgtgcataaatacacacatgatacatgcataacgcataaaggctaaagctataagaaaatactataaacgtatgtgtcctgaattcaaagatcttatctgaatcttcttacaacatactatcaaatataataaaagattacaaaagttgccaaacatttgaatacgatggcctcatacttagaaatcaaacagatggctgttagaagcttttccacgttggcctaccaaaatgtttaatcctcctctttggtccttctcattacctcatttagtcattaacttcctcgtcctttagcctcctcttcgttcatcgaaccttcacacttttcatttctaaagcaatctcatttattaatagtcggcaacaaatcatttattagtgtataactactagattagttaccgttttttcttacactatagttaaaaccaaagccgcccaaatctttcaattccaataacttttagataccttatcgttgtactacgattaggattagtcattttccatgatatattatataatgtgaacaaatttacagtctgatgcaattaaccacgtgcgtaatcaaacactcacacaagttgcattttttacgatattatataggaggaaaaaaagaaaaaaaaaatccattttaagataagaataaaactaaataaggaaaaagaaggataattaggtcatcttcaccttcctcgttgtctcctcacactgtaaaagacttgaaactcatataaaatctcaagcttctatctatttcttctttcatcatcatcatcatcactctctcttcttcttctctctattccatggctttagtacgtgaacgtcgtcagctaaatctccgtcttcctcttcctccaatctccgaccgccgcttctccacctcttcctcctcagccaccaccaccaccgtcgctggctgtaacggaatctccgcttgtgatctcgagaaactcaacgttctcggatgcggaaacggcgggattgtttacaaagtccgtcataaaaccacatcggagatctacgctttgaaaacagttaacggcgacatggatccgattttcacaagacagttgatgcgagagatggagattctccgccgtacagattcaccgtacgtcgttaagtgtcacggaatcttcgagaaacctgtcgtcggtgaagtatcgattctaatggagtatatggacggcggaaccctagaatcactacgcggcggtgtaacggagcaaaaactcgccggattcgctaaacagatcttaaaaggattaagctatttacacgctcttaagatcgttcatcgtgatatcaaaccggcgaatcttcttctcaattcgaaaaacgaagttaaaatcgctgatttcggagttagtaagatcttagtccgatcattagattcgtgtaattcgtatgttggtacttgtgcttatatgagtccggagaggtttgattcggaatcttccggtggaagctctgatatctacgccggagatatctggagtttcggattgatgatgcttgagcttctcgttggtcattttcctttgcttccgccgggacagagacctgattgggcgacgttgatgtgcgcggtgtgttttggagaaccgccgcgagcgccggagggatgttctgaagagtttaggagcttcgttgagtgttgtctccgtaaagattcgagtaagcgatggacggcgccgcagcttcttgctcatccttttctccgggaagatctttgattcgattccttttgtaacagaatctggaatcttaaaagttggaatattagatttgaaattattttaatttttgtagagttttctggagatatttatgatcgtgatttttgtacatataatatactccagaatgttaggggaaaatcgttcttgtaagaacccttaattattaagatcatcaaattatgttctttttcaattcattaattcaatcaatcgtgtacataagttttgggttaatctatattaaatcaaaaagtaatagtcactcgtgacaagtgtagtagatatcttatagtattattgtagaatgttgaatcataatcaatcattttattttatagttcatgtttgttggcccattagtctccataatcttaaaataattcacaataaaaaaattctctttacctaatacaaatagattttgattgttgttgatgaaaataattttattaattataatatcattgtgtttattacagattctcaccgtaagtcaatggcaatgctcttgaaaaaatattataagtaatgtaaagaataattgcaacgtaatgtacccaaaactacatatagatctaatcttttgagtttttgattatagcaatgatttagttattttcattttatcttcgtggaaaaacaaaaattaaataaagcaagttaagaaaaaaaagagggtggcgcagttgatgatgttttaatgaaaatcaaaatgtagttgccaaaaacaaaaatatacttacgcaaagaaaataatattattgataagggtcacccactcaccacttggcacttgcttgcgcaacaatctcgctatggatgttcgtcgaaaattccggtggttttgtttagcaagtggaagaatttgatattattattatttctttgtttttttgcttactaacttacatcactataattctgaatagattatgaaatgaatatgctgatctattggcttacgttagcattgatgagtcaccaagaagaaaagtttatggtggtggtcacttttttgagtgtgacaaattaagaaatagaggtcacccctcttgacttgttgttgtgacttcacagctttgttgtatatggccaagtgaaacagattttcaaattagtcttttggattattgttatttggaatatcattactttgtctttatctacttgtattatttatttatttatttatttcagtctataaatatttatgataatctttattaaaaaatctaagtctaatatttatgaatcagacttaatttttttttatagttttgtacaaaaaaatctccacaaaatactgtctttgagagaaaatgagcattttttttacttgcatatatattctactattcgtttgcttgatttctctttcaacaatttaaattcttcttaaatgattctacaatattaacatttcttttaatattattaattaaaaatgcttatgatttgcattggaatctaggaattttaaaattctgtgaacactccatcaatgaactctgtgaacactccatcaatgaattgaaaatcacaccttgttaggaagacaatatgccaattaaggtactcgtaatctctgaatttgcattacatgtctgatggagtgtatatactttgaaaatgaagtgaaatagtttcaaaattttcaaattagtttgaaagtatatatcaaataataaagttactctactatttaattttcttatacttactattcgattgtaggaactgtgagatgagaggatttcaaatgacaccgctacaaaagcttcaaaatcatcaaaatctttgtcaggccgacgatatatgctcattccatcgatatatgtcccccatatacgaacgtgtatgttctaagtcgtcaatatgacgctagtatctatacctaggcgttgcttatatggtttgagaataatgtcaggtctttttgacctcaaacaatataacatttttttgtccaattgccaaaagataacagcattttcaagctgagtgcaaaaataaatcataaaaataaataacattaataaaatcaatcagttagcaagtaaaaacttatgataataccataaacttcttctctaggccatcactagttattaaatgttcttgcttggctttgagaagtgatgtgatctttttgaaaaaatttatcgtctctttgcgttcctgcaatagttatgagacaaatcttagaaaaaagataaagttagaaaaatgatgcaaacaaaataaggagttagcaaataaaagtttataataatactttaaatttcttctctataccaatcttaattattattttttttgcgcacctttgagaagagatctgatatatttaaaagaatgcacattatctcttagcattcatgcaacaacttttttttccccatcagttacgagacacttattttgaactaaaattccacaagctacttcacaagtgaactcactttttaattctttgctgagacttgaatctaacatagtatgccattgaatatttatttacttttggttaaaagagttcaacgtttagaagagtttttaaagaaaacgtataaataatgttaggtcaaacaatcaaaattttcaccaattttacttcttgctataaagaattctttgtacatcagatttttgttttgggagcaaatttgaaatacacatccgtttggcttaagaagaacttcaaaatctgattcttatgatcccatacaatatattttatatatagactatattggatcaaaagaatcagaagatttaaacgtagcagcgtcaataatctcttttaaatccgtctttgtggccaaatcatgtgaaaaaatcctaattatgtgaagaagttgagattaatgaatcaaccaatacaaaacagagaaaaattcttgaagatgatgggtcacaaaatacgacacagatgtcaaggcccacagggcccatactataacagcccagcccacctaaaacttgaataaaacgtcttttgtttgtttctcctcttggctcttgctatagaaaccctagcaagtcgctgagctcttttctactcaatttcaccatggacaaggaatgcccgacatccagagatgtataatcttcttctttcttatgaatttattattcgttcttcttcttttactatctattaacgttgttgttgcttcagatttttaggtcacgaatcctttgcaaaaaagtaagaaatttttaggtttaccctctgcctttttagtttgtttgtgaagaacgatcttaaaatatctgaatctcggtttttttattttgttatcaacatactctaagagagagttggataatttggaaaccaaagaaaaacggaagaaacataacaacgagaactctgatgagaataaggtcagatcctacatgaatttctgttttttctttaattagnnnnnnnnnnnnnnnnnnnnnnnnnnnnnnnnnnnnnnnnnnnnnnnnnnnnnnnnnnnngacctttccacatgaatagaaatgaaaagtgtgtgaaacaaattaaagaaaatatagaaattcttgtaggatctgaccttattctcatcagatttctcgttgtgtttcttctgtttcttccgtttttctttggtttccaaattatccaactctctcttagcttatgttgataacaaaataaaaaaaaacgagattcagatattttaagatcgttcttcacaaacaaactaaaaaggcagagggtaaacctaaaaaattcttacttttttgcaaaggattcgtaacctaaaaatccgaagcaaccacaacgttaatagatagtaaaagaagaagaacgaaaaataaattcataagaaagaagaagattatacatctgtggatgtcgggcatttcttttccatggtgaaattgagtagaaaagagctcagcgacttgctagggtttctatagcaagagccaagaggagaaacaaacaaaagacgttttattcaagttttaggtgggctgggctgttatagtatgggccttgtgggccttgaaatctgtgtcgtattttgtgaatcttcaagaatttttcgctgttttgtattggttgatcattaatctcaaattcttcacataattaggattttttcacatgatttggccacaaagacggatttaaaagagattatttacgctgctacgtttgaatcttctgattcttttgatccaatatagtctatatataaaatatattgtatgggatcataagaatcagattttgaaggtcttcttcttcttaagccaaacgaatgtgtatcttttgttttggtttagacacattaaatcggtattgatattaagaaagaaaaagtagagaaattctagaagatggtggcccacaatataatacacaaaagtcaaggcccagccaacaacagcccagcccagctcagacctgaataaaatggtttttctttttctttttcttttcggtgtctcgcttctcttgcaatcgaaaacctagcagccgctgagctctatctactcaacttcaccatggaccggaggctcaagaaatgctcgacatccaccgatgtaattcttcttcttcttattatggtttttgtattcgttcttcttctttactctctagtaactttgttattgtttcggatttttaggttgaatcagttcatgatgttagtaaggtcacggatcctttgcagaaaggtatgcatttggctttttttttttgtattatttgtttgtgaagaacgattttaaaatatcttgaatctgcttttttttctattgggtaacaaaagctaagagagagttggataatgtggaaatcaaagaaaaacagaagaagcagaagaaccaaaatgaaacatctgagaaggtctcctgttctgtactacgtttaagctgagatatttaatttttatttatacaaactcaagtggttggttttttttcttgtttggaagaaacgcatagcgaaaccgtgtgaggatgagaaatctgatgagaagatgaatttctgttttttttttgaaatttgtttaacccacttttccaatcgagagagctacagcttttgattttgttgctgtctatttcttattcagcaggaaactaaaaaattcagcaccgtttacgaaaagtttaatgatactattaaagaactagacagggtttctggaacatgtcccatacgacctgccattccattcacggtattcttctcttacatggtataagttggtttctgattagatgtcaaacggttctttgaactgattccatttttatgtgcgtggatatatagcccccaaaggaaaaggtggaaccgatatatcacaatgagtgcaatttcgatgataaagctcatctgggagtatctgacagcgccctttttgtacaaggatttgatacttcccatccaaggcatgaaatcaagacagcattgtggaatcatttctcttcatgtggtaaggtctatctgatttatgttcccattgcgtgttctaccggtgcttcggtgggatatgctttcattgatatgaaaaatgaaaccaaggggttgacactcaatggaagtcatttgggaggacggaagatcgatgttatgttcgccatagatagagaagagttttacttctcttctaacttaaaacactgtcaacgctgccgtaattataggccatggcttgttttaaaagccatgtcagatgcctgctttgaatatcaccagaggtacacaaaaatcagtttcttcttctttattcattctttgataacaaagtctgtaaactaacttctcactaattttttgcgctctaggattaaaccgcggatcgttggcactccccatagcaagattggtcgttttacagccattattggtcgtcgctcttacagctagtatttggtcctttttaccgttgctgctaccttgttactccaccagctacatgattttaggtctaagtagagttgtgtctttatgattttaggagttttaaagtctttttcttacatgactggcgtgattagcaagcatgttctctattggtgattgatctcaaacgtaaagaaaatagtaaccgaatactcaatttatatctgtttgactttaatgacatccgtattttcaaaactgtgttagtttgatgcaattaactgtcagtgaaatcgagaagtttatttattcttaaatgagaagataggtcatgaagagctttattacagtatgcaagaagagtatgaatgattaatttaggaaaaaaatacaatacattttccatggcttgttaagctgttttcttcgaataaatctcatcaattctgttttaatgtcatcggtaaagttaatgctggtggacttttctataataagtaacattcgaaacgaacttcaaataaaataaaaaatgagaacctagagtccaaagccgatgattcgtttgatctaaggatgcgacaagttgcagagcttgaatttcatttagtgttcaaactcttttaattttataggacaccacccaatttgtggttcttggacaaacaacaaaacatcacaaaatcaaagaataatatttagggataaactatcgaaatagccaaaatcatatatagtttcgatataaataataattggtattacaggtataagatattaaaatccaaggttacaaaattattgatttataacaatataccgacgtcaagaagcatagcaagagagtccagatttggagtctctctttttctcttatcttccttctacttctgagttgagaaaattcgaccaagaacttctttttcctcacgtttctcagtcaacacactcagaaaattccgcgaattaattattcttgtctgaatcaagaatctcttgattcgatgcgatagtgattgttggtttgaacgagctaaacccgctggtttagccaatctaatatggctccagcgatgatttctcgttcgggttcaaaaagaagatcgtgcaacaacccgtcgtagagcttgagtgatttgtctgacgaggcagcttcctcgtagagcttctttgaggcgctaggatcggtaactgtgtcgtcagtaccgtgcatcacaagaaagggaactttcactttgttcaggttctgttgcaagtgagcagtgattctaaggatctcgtagccggttttaacccggatggatccggtgaagactaatgggtcagagtatttggcgatgagagctgctgggtcacgagaaaccggcattcctttcttgtttgctgcactgatttggtacctgggtagtagaaacgccatgattggagcaagaacctgttgataaaatacaacaaagagaactgatcagattgctaagacttggctgaaaacgcgtaaattatgacttgacctttcggattaacttacagcgaagattggatgggatggttggactccaacagctggtgaagtcaatgcaatgcctgaaactcgagattcaatctttggatccagcatagcctgcacttgagttgtttttgacactgtttaaatttgtgtagttatcggatgaaactatgatgttatttaatgggtctaaagatgttaccttgaggatgattgctccacctgttgagtgtccaaagcagaaacaggggagtcctggattctctgtgaataccttttcaagaaatgatttctgcaaatgagataagtgtgagtttgttttcaacaataggatgctttgcaagctaaaaccagagagacagagactcctacataccaaatctgtgacagcgtaatcaagggaaggaacgtaagcatgaagtccatcacttccgccatgacctgttgggttaaaaccaaaaaatgtctcctctcagtcaagattacagatttgcaagtttatcattaagggagatataagaaaacggctataaagacgcagaagcaatacagatatctaagagacattcaagttgtttgccaatataacaaattatagatcctaagttgtcagaagtataaagctaaagatgggattcatgtgtcacctttccacacgaattaggcaccaccccaacaaaaatcacaatattccctgcgacatccaaacagagagaggtatggttgaagagttttgtatctagcctatgaaaacagttgcatcgtaaaaactctctaatgtttccacgttttaaaggtactaaggtgtgcatctattctaacagaacttatttcaaatatcccaccaaatattcaagatcaatatcatggcttctatatcgaaaactttaacctaacaccttaaatatcatcaagatttgtagttgaaaaccatgttgagatttattctttgttaatttttcatgtgatgtatggggaagaggacaaaaacctaatgcttaagtctctagaggctcgtttagctataatgaacatcaaaacggtaacagaaagtgaacgagaagtgagattacttaccgatccagtcaattccatagaccttgaacccattagcattaagctgctttgcaaaatcactatacctgccactgtcaaaattttgaaaaaaataaaccaatgttaagattcctaaggccaaggaaattagaataaactcaaatggtgcataactaggttcaaacctatgctcgtttaatccatgtagcagaacaataagtcccctgcaagaacatatagaaaaaaaataagaaaccagacaagaaaatgattgaaagtttaccactttcttgacttgtatttaaacagagctcagaatagcttacaaaatcagaggcatgaaagattcaaaaccatattaaaagaaaggaaagtgatagtgttaacgaaacattaaaccagattgtatgtcttttgcaaggaaagatactgtacacggtcgtatgtatctatcattatcaacaaagtcacatgcatctaatattatacaatgatccttgaaaaccactttgacaagcaaatatcatctttctctaaattttcccagctaatctgcttcataatttcttcataacactcaagaaaagcttaccaactaaatctaatcctgttacttgattaaataatcatcactattaaaggttagttcaacaaaaacatatatgactatctctggttaagctaatcaaaataatgtaatattatgagcaagaaggaatatatatataaatatcaaggggatccaccacaatattcaattactcaagcctcaagctatagccaagatattaattaggactaccagacaaaataaaataaaatccaacacaaatatcttctctcaacacttgacatctaaatcatttggaattttttgttcttccattactaatttccagaaacatccaattgacattattctctagttaacaacaagactcacttgaactcaaaaaggctaatatgcataattatgtattgatcctaagattgacaacgactactaatacattaatcaaaccaaaaatccttaaatgattaaaataatggagaaatgacctgtgatttggggaaagaggtgaccatgactgactaaacaacgtatctcctctcttcgtcgtgaatagcgaataatctctgacggagcttccatcgccgccttcatcctccaaaactcgcttaatcgccagttcacgtcgaacagcaacctccccatccaccaccgcagctggaaccgacggaggagaaacgctgctttcgccaccgatgttcctcttcctcaccacgatctgcggaggagaccaaaccttcctctcttgcttatcgtctctgataaccaccgcaccagtcctccgccgccaaacgacgacgcgaaacggaaggaggaggaaaagaatcaacgattggataatcgtaacgagacgcttaagctctcgcatcgagaagagtaccctaacgcgaccgcttgctcctgatgttagaatcaaagttgatgaatctgatcccatcgacattgtttccaccgccattgacgatgaagatgatcgccggaaagttttgacactgattgggtttcgaatttgaattcgattcgcgtaatttgtggatgacccttttaggggtaatctagggattgtatttgaatttttacctctagcgattaagattgttcctttacttgaacagatcataaaccaagaaaaatgaatcagaaatgaagaaacgattaaaaaaaacaatcgtttttctccaaaattagcgaaatgagaaaactttagaatagagaatccaaatttagggcttcctctgtttataaaacagggtaataaaaaacagagctttataatggccgatgaagaggaagaagaagaagaagaataaggaaaagatgatagtgaaaggatttgagaggataatcgttgaacaaattaaataaacaacaaattcactgtatttgtagaatttgtgtttgattagtttattactttttgtgatatttgtttggaacttggaagagttgtcttcgtagctttgggttgaggtatgtaagagaagagacgagtagattgttccagagtttacacgtgtaaggtcactattgtttctacactaatttttgaagtattttttaccctaaaagaccgtcctatcatatgatcctatctataaaaagctccaacaattatgaattttctaatcaccacctttatgtattccttaattttatacattttgtttaatgtacattttatagtttatagaataaataccctagaaaatttacccaacaaaattaataagaaaatcacataatcaaagttattaacaaatttgtattacatgtgtaagattaagaaagtctacttatttatatattggtggtataaattttagctattaaaataagaaaagaattaaaaaaaaatgccacaagtattggataatatttttatccaaaaaaagtattggatattatctaaccatatgttagttatttttaaccttgtctcctacgtcacgtcatcattttttggacgattatataatagaggtttcgtgatatcaaatttcaatttgaattttattcatctttctaaaacaataaaaagtcttgttctcaacgagggccacaaataaattaaccacatgttttgaaataataaccacaaaaacaaaaatgacttgatcactccggattttggtaaccccatatactgatacaccatgtatgttcactccacactaatagagattttaagacataatcgaggatcatttataccaagtcggctatataggacaactcgataaaatctaaataagtcttcacaataagaaataaaagtgtactactaatctagtaataattcacctagtaacgcattattttcgcgactatagcataattagttttataatgacttgttgagttgttgtctagaatagtctgaaattccgacaaaaaggcacgtgaagaaacgcggcggcttatcgtcgtgaaagaaacaagagccgttgctttcgaggattcgcggaccacacacgtggtaagcactcagaggactaatatctttaccttgtttcgcgaaccccacacgtgtcacagtgaaccccacacgtcgcttatccgctcgttaccactaaggaatcagatttttttaaaatctgtaaaacatgtttccatggctccaaaatattgtttcgcaaaacgctcaattctctggaccactctctatctactcgagtaacgtctaatttgatttcaaccacaagcgaattatacgagtgtgaaaaacattgtttaccgacatagttcgtagggacactgagattgagaaaacaaactgttacttcatttacaaggtagcctgtatgtcctggtgatccgaatctgcaaaacaaaacaatccttttaaactcattaaatctagtcaatgagatcttactacaaaacaaatgcagactttggtgcaaaaagagaagtacctgtgcaaatgcgtaaattgctcttaggattctagcgtagtcagtctcgagcatctgaatcactaagtcagccagtaatgtcccccacatcctgaagattccacaattattgtccggacataaacaatttaagaagaattagatgcagattcatgtgcatatgtaatgtaaatgctgtgttagatcggattaggggagtggctattacatggggccaagtaattgcatcgctgtttttaagccaatgtatctggatgcagcccctgcaaatccctgtgatcaatttaaggtcactgtaatcacattgttaggcgaaatgtagtttgtgtaatgaagatagctcaaaggcaatagagagatagaaaagaaaagaaaaaaaacgagagatggaaaaagtaaatacatgcttcgctgctaacagagctgctcgagattccaagttaatggcagcaaactgcccaccctgtaaaaagaggttaacgtatcaacatatcaatcagttacatcattgacatgtaatgcttctcaggaacttcatgatatagtgcatcgcaaatccctgagtgatgatgaaaaattcttatgcagcatgatgaaataaatacagatgcaaaccttttttagcatctctttcctaatctggtagttggcagcttcaaggaatacttttccagatagtttcttagccaactatatagggccagaatataccagttatttgtatcgcctcagagaagaagaagtttaaacacacaaactgttatcgatttcataccaactgataaactttggcgaatgtgatcatgccaccaccctgcaagaaaattgaagaaacaaaaacacaagcttgagaacaaagatattattttaaaaagtgaaacaccttaaaacaagactaccttcagaatcatagattggacctctgtagcacccacttgtagtgcggcaagtagttcaactttccatttactgagcccgagttctaagcttccctctgcctctgagacttcagaattttcccacatgcctggaaaaacccctgatgcttcactatatggataagttagaggttacagcggaaaaaaagacaaagaactcactcaattgaaatagcgtgcattgaaacaaatgagtcaccctgaatacctcgagaaattgtcgacaagataaagaaaaatctctgcttctaggtcttcggttggcaattggctggagcagggaatattcaaattatttctcaccgcaagtaaaacgtttctgtatgaaggcctccaacccctatacaatgaaaaagtgaactcaaaatctttggttctgaccctctatggacatatatagtgaagagataacggatcaatttcacctagattaatactgaagttggtaacagagtcaatgcaacagagtaactaatcaaggatgatatctacttcattgaaaacttaataccctagtttgcatcctagttaagcctaaaacaagaagctattctctaatgtcaaggagagaacaagcaagcctacctgagtgttgaacgagcatctgcagctagaaacaagaatctcgattcaagagcttcgataaaaccatctcgcacttcaatgtcttggcctatcataagccggtcacctcctcctttgtttgggattgatttcagcaaagggctgaagtagctgtgctcaccaaaacaaagtaatcccaatacattataacttaagagcacaaaattcacatcatcacataaattctgaatcttccaacactataatttgaaaagtttaatcaaggcattgaatttcacctgggaccaaaaaggattttctcaagctcatataactcggaatcggtagcgagctcgaaaactaaacggagctccggatcatatgtagctggaaaatccaaacattcacaataagggttaacaaaaacgctcaaatgcaatgtacggaagaaaacgagtgaaccacagagcttccttttccaaccttccgatggcgattctgaagccgcagtagaagctaaagcaaaccctagctgtttcctccgccagccggttctaggaatcttcaaaatcacaaccgaagagcaaaaaaaaacgaaacggttgggaagatgaaacctatggagagacacactgagagagtgagatagatagaagagagagaaagattactacttgaagagaaagcttgttcagattcagatgactagagaatgggcaacgatgcggaggagctacgacggcgacggagacactggtcatctgaatcagtcactgagcgatgagattgtttctcttctaagttttttttgttttaatttgattgcataactaatcctgaattatattatatagttgtaacaataaaaataacattcatgaatcattaatcaaaggactaactactaaggatcagtagatgatacaaaaagttttactacttaaatcagttctaagagaataataatcacaagtttaacaacacattgttacactctaatcaaatttcacaaatgtttttcttcttttcatctcaaatttcacatttccactaatcagacaccaattgtttaagcagagattggttcgtatggatatgaaagccaagggtgcttcagagcctctgctgcagaaggacgcttctttgggtttatctcaagaagatgagccacaaagtctgtgaatccttggtctcccattggcagccgatgtctcaacgatgttctttttggtatcaggtactccaatctgttgctttcctgaacaaacaatttttccagagagaatgttctttattagcatatgtttcttccattcaacttaagagttgcagagtttttggagttcagggaatgttcctttaaggtctctggaaacactaacctggttccgctcatagagcattcggttttttgtgaagtatttgtgggaatcacgtcccttggtaagcatttcattatcgaaagatcctacgattcccataacccttgctagcaaactggctggcgaatcattctggaagagaacctgcaaaagtaactcgatattaaacacggattcaccttcttgtcctcaaaaatcaacaaccaaactagacaatattatctagctgaaattccagaacttacgttgcctgtacacagttcagccaaaatgcacccaagagaccacacatctatctttttatcataaggaagtcccaaaatgacttctggtgctcgatatgaccttgactggacataggagcataggtggtctgtctcgaaacagctacttccaaggtcaatgacctttatttcacatctgctataacttttaaccaatatgttctcaggcttcaaatcacagtgtataagtccaaggccatgtagaaattgaagtgattcgagacactggatagtgattgactgtacagaacgatcccaaagagattagaactcggatttatacatatctattaagaatgttaatgatgaagcggacaaacctgcaatcttggcatcgtgaaataaacttcaccacctgattctctgttaaatttgtggaattcgtatagattggccttaagaagttcacatacaattagcaagtgctcctgcaaagaacattcagggaatccgttacaccaaacaatccacaaagagatataataatgcaaacctacttagtttattatgacccctttatatttcaataaattggcatatatgtgaaacttttagaagttcataacacagcttcttagcgactttttcctgattaagtggtttccctatataaagttacacaatttgcccctattgatatactatagcaaaaccaaattttgcaaaagggatgtgatcacttacgcggtagtaaaagtaatcatacaaccgtagaagatggtatttgtcagcaggatcatgcttgttgacatacttcaaaagttttatctcgtcaagactctggtcaaaaaagtctttgttgttctttatgatctttatacagacatccattcctgtctgtaagtcatgcgcttgtatggctttactgaaggctgctgatccaaggtactcagtgacatggtaccgcccagcaatgaccgaatttaaaaccacgttaaagttcttttcctcttcgaaaccagtcctgataaatgccaaacaagtaataagagagcagcactcagctatgtcgaaatattttgactacttcaatcttggggataacttttcaaaagtaaaatggttaaaatcaactgaagcaatatagttagttcaattagttatgctaattacagttttacttaacatgatgtttctgggctgagcgcaacaagtagagactcagagacagatgctcttttaaacaaggtaacttcttacttactttctatctgttttagtttaaaccataaaagttggggagaaatcttacctgttttttcgatgcacaattttgaggtcaaaggtttcaaactcctcctcttgggccttaatttgtctaacttgctcttggacagccactgcctcttcatcatcaagtgctgtcgcattgtcatcctctatttcactactatcatttctatcatcttctttatcagcatgctttctttcttcacaagcataatttgacagagaagagggagatgagtttagagattttatggacgttgcattattatctttcacagaactatgagaacttgatgaatcactactttttcgtctccaagttgcaaccatatcatccatagctgttgaagcactcaaacgttcggtgttcctatctctggttaccgtttcgtgattgcctgaccataatgatttactagattccgcatgcattgactgcccatctttttgggacgaaccaaacgaaaaaccaccatcagtttgaatcttcacatgaaaacttccgcttgaatcattatctgcaatgtaatctggaccatcatttttacttgcttgttgtttattcttgtttggggcatcaatatgtttcttatctgactcggagtaaagttgtttaaacctggatgctacaggatcatgatcacgggagtactcaaaatctccctcactgctacctccagccaaactgtcacgtacttcactgccaaaatcagctgcatcactattaatacccacgccaattgacctgaccgaatcatgctgatcatcttcgacgtaaacatcatcacgatgagattttcgatggacatttatgcctttcttatcacctaacatgagaagttcatttgactgagctacaaacccctgccaaacaggctcatcacgcatcgaactgagcaattcctcatccattaaatgcccatcatattgggctaataaatcatttttcttgctagctggataaatttctgagactgtaagtcttcggtcattttctgaagaaataggttcagcatcttttgattggagatactgttctccagatatataagaagcctcctcggcataagactgatcatctgcgtctttgtttgcatctctttcatggtgatcaggacttccacgggtcgttcctttctcatgatcacttggataatcaatttcatgggcaagaaaccatggttcatcttcaataggttgtctgacataaccaatgtcgtcatcatcctcatactcatcagagtcccagtattcattacgatagtcaacagattcacttaaaccatcaccaatagtagcaaaacccgaaacaagatcagatgcgtcctctgctattccctgacttactgaaagccagtttcccccagtagattttttcccacctatatgaaataattaggagattaaaacttactttcacacctgaagtaaaactggtaaggttcaagttgaactaaaaaaaaagtagaaagtgaagcgacatggtccttatagaaatcaaaaaaaaaaaacagagtgggaaaggaagacaatgagagcaaacatttgcagataaatgcaaaaagctaaacaattacttgctttctttggaactgatgctggtaatttgccaatgcattgttctaattcatgagttcatcaaaattcaaacatgttacttcagcagattcgcagagtagaaatatgataaccacagtagttcctataggaatgaaggatatgagaaaaatgcatgcactgtcattcagcagtcacaatggaaactttgcagttgtacggctacattgtcatgcaatctaacctgatgagctaatttcttgtccaatgggaacatcaaggtatgagcctatgagaagggcgtcctcatcattgattagccttggacctgaaccatcacgttcaaatttttcttcacagtgaagactcagaggattgtcttcagacttgagcttaacaggaggaagcctaggaaactcttccttgcgggtatcatatacaagtggaaaacctaagctgctgatatttttgtcatcaaaagtggattgagatttaccaaagaataaagctcttgccacctcactctcctgctccttgattgccaccctcacatcactaatgtctgccttcttctttccctctctcttgtccgagctgctaaccagattgtaactgtttgacgcatcccctctcgaagattgaaaaagagtcttaacagaacactctctccagttcgctgaggtatctacgacatcttcagatcttaaaagaatgctacccttatagctgtcatgctttccagagttttcaacaagccgatgaatctcatttggttcctttattttcgacccggagttccctttactagaatttccagaccatgaagtactcttattgccaaagaaaacgatatcttcaccagtttccactatcttcttatcgatatcagcgaaattcccatgcctcgactgttcgaatgcatataaatccaccaagctgctactactactatcatcaatgtttcgagaaggctccacggtgccatttctggaagtaaatttataggaatgggcatcaggaggagcagcagcatcacctgaattcttggagaatgtaaagctcatctcacttgatacaactggttccttcttgctcggattgtccgccgtcgcaccattttcccacttgataacagacccattggtgctagtcccacagtctacctctttcacaatcagctccttggagacttcactatctcgagaacctgacctccgaagttcattaccagcagccttttcatttgaatctttatcctccagcttaagtttctgaagaaagccattaatgtcagaccggttattaagctcattacgcaaagcttcctcagcttgagagaagcgattattcctaagaaactctaaaatcccatcaacagagctctggtccgtcatttacaatatacaggagaagcactggcaataaaactccaccaatcctgtacccaacaaagatgaaaacttttctctgttcagatgttgtctgatacccagaaccctctaacgaaaacaatttgaagaatctttctaccaaaagacattagaagaatcaaaatctgcccaaaaccaatactttcagtcacatttcagaaacaagttttttccggcaaaccagactcacgtttgctcatacggaacgatgcagcagatgcgaacttcaataagagcataaaaaccctaaaaatccttagaaatcatgctccaaacgcgccatcgaagagtctggagatccggagaaccagaaaaataaaaataaaaatttaagaagacaaggaggaacaagagtggatccaacgagagatgaaacttcttcaggcacggcgaaggaggaaatgcgtttacagatcaaacgaggaagaagaagcaaggagaagacacgcacgttgaggtttcaatggatgtaatcatttcggacattcactggtaaacttaaaaaaattcctaaatttaaaattagggttctttcttccaatattacaaaattgtcttgtactgaattttttaaaatgataccatattgctaaatttcatagattattatgattccaattgctttctttagaaaattttacacgaaattttgtttacaatccaaagatagttattttcaatataaaaaaggtaattcgttatttcataatgcaattttttccttataaatttttattccgcaaattttcatttgttatacatttaaaactatcaatcaattcaaaaatattgtaatccttccaaaagtttgtgacctaaagtcgcttccgaatctctttagtcatgttttagagtgtggactataaaagtattttttttttgttccactaattattggtactgaattgggagatgttagaaacagaacagagacaaagataaaccacaaaagagaacaatggactctctcgaacctacaacactaagaacccgagaaccaatttttttttatgtcccattgataataccattcaccaccttacaatgaccaccaaaggagattctcccgcacagcactctctgaaatttacttctatatatgacacctaaaatgatcagtaccctgtatatatataaattacataaatgacatttataaatcataatcaaatgactaaactactaaggatcagcagatgatacaaaaaagagttctactacttagtctgttctaggaggataataatcacaagtttgacaacacagtgttacactctaatcaaatttcacaaaagttttcttcttttcagctcacattttgactgaaggagacagccacaacttgtattaagggtcacccaccaaaggggcttgaacctttgcacatatgaggtttccattaatctgaggttttgcggcttttagtagcttaagtaaagacaccagttgtttaagcagagattggctcgtatgggtatgaaagccaagggtgcttcagagcctctgctgcagaaggacgcttctttgggtttatctcaagaagatgagccacaaagtctgtgaatccttggtctcccattggcagccgatgtctcaacgatgttctttttggtatcaggtactccaatctgttgctttcctgaacaaacaatttttccagagagaatgttctttattagcatatgtttcttccattcaacttaagagttgcagagtttttggagttcagggaatgttcctttaaggtctctggaaacactaacctggttccgctcatagagcattcggttttttgtgaagtatttgtgggaatcacgtcccttggtaagcatttcattatcgaaagatcctacgattcccataacccttgctagcaaactggccggcgaatcattctggaagagaacctgcaaaagtaactcgatatttaaacacggattcaccttcttgtcctcaaaaatcaacaaccaacccagacaatatgaataaccagctgacactccagaacatcaatgatgcagttacctttaactccatcaagtgttagtataaatgacacaagtttctggtaaatttctgtttacttaatagcccgagaatcaagttcccatgtaagaaaacaaatttatgcggatatggaaattttctatctcttcgaaacgtattttgcatgagaaaaaataatacatgatgaagcaaaaatcagaaatgcaccaagtcaatggaaatgcaggacttacgttgcctgtacatagttcagctaaaatgcacccaagagaccacacatctatctttttatcataaggaagtcccaaaatgacttctggtgctcgatatgaccttgactggacataggagcataggtggtctgtctcgaaacagctacttccaaggtcaatgacttttatttcacatctgctatagcttttcaccaatatattctcaggcttcaaatcacagtgtataagtccaaggccatgtagaaactgaagtgattcgagacactggatagtgattgactgtacagaacggtcccaaagagatcaggaatcggatacatatacatatctatgatgtatggtaatgataaagtggacaaacctgcaaccttggcatcgtgaaataaacttcaccacctgattctctgttaaatttgtggaactcgtatagattggccttaagaagttcacatacaattagcaagtgctcctgcaaagaacattcagggaatccgttacaccaaacaatccacaaagagaaatattgcaaaggtattaaataaaaggcatatggttcacacttgtgctaaaattgttgaagagaaagacacaattggtcacttttgatatacagtagcaaaaccaaattttgcaaaagggatgtaatcacttacccggtagtaaaagtaatcatacaaccgtagaagatggtatttgtcagcaggatcatgcttgttgacatacttcaaaagttttatctcgtcaagactctggtcaaagaagtctttgttgttctttataatctttatacagacatccattcctgtctgtaagtcatgcgcttgtatggctttactgaaggctgctgatccaaggtactcagtgacatggtaccgcccagcaatgaccgaatttaaaaccacgttaaagttcttttcctcttcgaaaccagtcctgataaatgccaaacaagtaataagagagcagcactctcagctataaataaaagtaaaaaattaagacgatgatgaaatttttttagttcaatcttggtctaacttttcaaaagaatatacttatccaagatatttacagcgaaacatatcaacgtaaaataatttctcaaaattggaccggatcaatacaaaactgaaggaatgtagttagttcaattcatatgctattcacaattttacttaacatgatgtttctgggttgaaacgcaacaatcagagacaaaaagaaaacatcatgtgtggctctctaaacaggaaataaagcgattactgatgtaatttaaaacaaaaaattagggagaaatcttacctgttttttcgatgcacaattttgaggtcaaaggtttcaaactcctcctcttgggccttaatttgtctaacttgctcttgtacagccacggcctcttcatcatcaagtgctgtcgcatggccatcctctctttcactgctatcattttctttctcagcatgctttctttctccgcgagcataatttgacagagaagagggagatgagtttacagattttatggacgttgcattattttctttcacagaacttcgagaacttgatgaatcactacttttttgtctccaagttgcaaccatatcatctgtagctgttgaagcacttaaaagttcagtatttctatctctagttaccgtttcacgattgccggaccataatgatttactagattctgcatgcattaactgcccatctttttgtgacgagccaaacgaaaaatcaccatcagtttgaatcttcacatgaaaacttccgcctgaatcatttttacttgctttctgtttattcttattttggccatcaatatgtttcttatctgactcggagtaaagctgtttaaacctggatgctacaggatcatgatcacgcgagtactcaaaatctccctcactgctacctccagccaaactgtcacgtacttcactgccaaaatcagctgcatcactattaatacccacaccaattgacctgaccgaatcatgctgatcatcttcgacgtaaacatcatcaagatgagattttcgatggacatttatgcctttcttatcacctaacatgacaagttcatttgactgagctacaaaaccctgccaaacaggctcagtccgcatcgaattgagcaagtcctcatccattaattgcccatcatattgggctaataaatcgtttttcttacaagctggataaatttctgagactgtaagtcttcggtcattttctgaagaaataggttcagcatcttttgattggagataccgttcaccggataaataagactcatcctctgcataagactgatcatcctcgtctttgtttgcatctctatcatggtgatcaggacttccacgggtcgtacctttctcatgatcacttggataatcaatttcgtgggcaagaaaccatgtttcatcttcaataggttgcctgacatacccaatgtcgccatcatcctcatactcgtcagaatcccagtattcattacggtagtcaacagattcacttaaaccatcaccaatagtagcaaaaccagaaacaagatctgctattccctgacttactgaaagccagtttcccccaccagatttttttccacctatatgagatcattaggagattataacttacattcacacctgaagtaaaattgataagattaaggttaaactaaaaaggtacaaagcgaagcgacattgtccttgtagaaagcagagtggggaaggaagaaaatgagagaaaacacttgcagatactataacatgaaaaaaagctaaggtatgaagacttagcagttgtgcggctgcattgtcaagcaatctaacctgatgagctaatttcttgtccaatgggaacatcaaggtatgagcctatgagaagggcctcatcatcattgattagccttggacctgaaccatcacgttcaaatttttcttcacagtgaagactcagaggattgtcttcagacttgagcttaacaggaggaagcctaggaaactcttccttgcgggtatcaaatacaagtggaaaacctaagctgctgatgtttttgtcatcaaaagtggattgagatttaccaaagaataaagctcttgccacctcgctctcctgctccttgattgccaccctcacatcactaatctctgcctttttctttccctctcttttgtccgagctgctaaccagattgtaactgtttgacgcatcccctctcgaagattgaaaaagagtcttaacagaacgctctttccagttctctgaggtatctatgacatcttcagttcttaaaagaacgctacccttatagctgtcatgctttccaaaaatttcacctagctgatcaatctcatttggtttctttattttcgacccggagttccctttactagaatttccagacaataaagtactcttattgccaaagaaaacgatatcttcaccagtttccactatcttcttatcgatgtcagccaactgttcgattgcatatgaatcaaccaaactactactactattatcatcaatgtttccataaggctccaaagtaccattgccggaagtaaattcataggaatgagcatcaggaggagcagcagcatcacctgaattcttggagaatgtaaagctcatctcacttggtacaaacgtttccttcttgctcgggttctcagcagccgcaccattttcccacttgataacagacccagttgtgctagtcccacaatctacttctttcacaaccagctccttggagacttcactatctcgagaacctgacctccgaagttctttaccattagctctttcatttgaatctttgcttgaatctttttcctccagcataagtttctgaagaaagccattaatgtcagaccggttactaagctcattacgcaaagcttcctcagcgttagagaaacgattattcctaagaaactctaaaatcccatcaacagagctttggtctgccatttattgaccttttgcaataaaatcccaccaattctgtagtaaccaacagaaaagataaatacttttctctgttcagatgttgtctgatacacgaaaccctcttaacgaaaaaaaattgaagaatcaaaatctgcctaaaaccaatactttcagtcacatttcagaaccaagccaagagaagatttttcaggcagacaagactcacgtttgctcatacgaactccaataagcgcttaaaagctttaaaaatcctcagagctgaagatccggagaaaaaaagacgtggaagtggatccaaggagaaataaaacttctgctatgcgaagaagaaaatgcgctttaaaattacaggtcaaacgaagaagaagacacgcacgttgaggtttcaatggatggtaatgatttcgaacatattcactggtcaattaaaataaaaattcctaaatttaaaaattagggttctttcttttcaatatatattttttttttttttagagaaaacaagagtcatcattaaacaagtagtcaccctcagctcttatacaaacctctataaaaacaggaaagcttcatggttttaaagcaagcagaaatggacctcccatttctcatctattatttgcagatgattctttgctgttatgtagaacatctgaagaggaatgttcatctctactcactattctccaacagtatgaacaagcttcaggtcagtccatcaactttcaaaagtccgctatcacttatggtaaaggagttagtgaagaggagcaaaaaaaacttggacacattctcggaatccacaaagtgggtggttttggaagatacttgggacttcctgagtttattgggcgaaacagaactaatgcgttttcttatcttgctcagcgaataaatcaaaaaatggataattggtacaatgcattcctttcacctgcaggtagagaggtcctccttaaagcggtggtaactgcctttccctcctacagcatgtcttgtttcttgttgccatcccggttacttaatcaaattactagtgctatgagaagattttggtggtctagcactaaggatagacataaaattccatgggtggcatggaagaagataacaaatccaaaaaaaataggagtattgctgctgtgtagatgcttcatggctttcaatgactgactgtgcaggaataggttgggtactctatgataaacaggaaaacattattcttaaaggaatggcatccataccaccaaccagcacaccagaagaagctgaagcagaggcactcagatcagcactctttcaagttggacgcctaggctatacaaatgtactgttctgtggtgatgcatcaaacttatatcacaatatcgccgcattggagtccaatgagagtctgccaaaaggaaccaccacaaacaatgatctagcatcatatattcaggatatcaagaaccttgctaagacttatatttcttctcagttctgtaaaattcctcgtactcttaacaatgtagctgataagctagcaaaaatagcaaggtctaagaagatgacttatgtaatatcctggactgatgtaagttgaatgtttttaagtaatgcaaaggtgacgacaaaaaaacaaaaaaaaaacaagtagtcacccaaaatcacagcctaacttacagattaaatcaagaacctttcaacatgcgacatcgcgacacaatcttcctgaactcatccaagcttagctttccgtccttgtccatgtcaaagcaacgaatcatgtcttgtaattcctcttctgtccatgtgaagtcatgcacagttgccattttcgccacatctctcagagtaatgaacccttttccaccttcatcaaactgacagaagtacatgaccaattcatcctgtgtcatctgcgtcttgctcatcaattccggtcttttcttcttcatagttgcagcctctttatcgcttcctgcaacagagccctgtagagaaagcgctattgccttgtctaagtcatcatcatcctcaccaagggaaactgatgtattcaaaatcttcctagatgagacttttctcttggatgcagaggacttgttctttcttttacacagaaactcctcgtcttcgtctatttcttctacttcgtcatcgtcctcatcaccatcaccgtcggcgattacgggtgtataatcatcgtcttcttcaccggaattccgcttaactctacgttttttcgaaactggagatggtgacagaagagccttggcggctttagagatgccgagtgcatccaatctcgctttgttctcagcgatccttgacaacctctgcttctcatatttcgagatcgtcccctttgttggctccgattcgttgccggaactcgagctcgaactctctcgttcacttcctgagctctctccctccgattctcccctcgccattgttagctaattagggatttgtttctccagagttgggatgtgttttcttttcaatattcttatgtcgctgtcctctttccattatatgataagtgtgtatgtatataatgcataaattgtgttctactgaattttttttaatcatattgctaaaatctaaagattcggattccaattgcttcctttaaaattctacgttattagacgaaacaagaattgattttaagaattccaattgatttttatgtcttgacagaggtgaaacaagaattgattttaagaattcaaatgcgtggtacatgtttttgtttgtccgtatttataccattcatccatgaagcaagcaggtaaccaaaaaagaacttgatagctagtcttatataagcatatgatctacactttttgaccgtagatagatcgaatgtagagagaccaagatgtatgagttcttggatacaaaataatatgtattcttctaaagcgaactcttgtaaagtagctaaaaggagtcaaaagaatcaaagtcattatataagatataaccagaggaagtacggacatcacaaaaacatcgattgagccatgaccttaaaggaaattgtcgagttgggtttgcaaatcctgaatggagatcatattaatattggcttgttcttcagctgagtactcagctttgagcaaagactccacttgcgtatgagcttccactatatttgtcctgaatataaaacatatcatcggatgatgatgcacatttagtattcaaagtaattagcgcaagagatttgggttcaaacataagggattagaacaagtaaccgcacatatacaaaccagccaaagataatatacatggttgataaagttgcagagaaatggacttacttgatcggcttgaaaagtatggtccttgttgatgggttttgcaaatagagtttcatttttgctaaaatcggaagcaactcttgttgtatcgcagcgtatacctggttgaaatacaaatcagtatatccatatgtgtggaggagagatgtggttttgcattctgagttatgaaggtaattaaagcttaaatatgcaaaaaaccattgcgggttatatatatgatctacactgattctctcttttcatatcgaatcactcactgtctgagcataacctaaggaaccacaaatgcatgttcaaggtatcatttagcacttagaggctaacgaactgcctatgaacagagttttcaatatcatgcttctgtagaggaagctgcatagggaacaagaaatagctgccatctctatttctgagatataccttgaagaaaaagaaaaaacttaaacagtacattatctatctcataccttttgaacaagttcaaccaccttatctggtgtcgcgaaagcttgttccttcagcggcttagccatgacagaatcaactttgtgattctgagttccggaggaaagagcaacttttatggctgtgacctgcatatacaagtataccatgtataaacatagcaaaactgttacactattccattaggagaggaaattctttagataagacagatcctctccctcattatcagtacattgtagatggatgtgtcttcgacacaacttaaaaccagacagtgcaaaagatgctgacttaaactttttcgaggacgcctagaatcttaacaaaactgtgaaaaacatttttctcagataaaaaggaaaggagcaacccaccttcgtcacaaatgaaagcataggatccacaactagcttagttactgacatgatgaactcctcacaagttgtcttaagacatttttccagttcctgcgaaaataaaggtctatgcatcattcccattcatatcaagtaatgcaaggagccagatacaaccaacaacttgccatattacttgagcctactagcatggcaaaatcataacccagaccgaaacaaaatttataatctttcaccaatactagtacagaagtctcacagaaaattgtaaaatgaaatcaacacatcttagtggcgagcttttatgtaaagatgaagcaaatctgcaaatgatagtggaaggaagagaaaaaatccctaacctttttggcatctatttgactctccaaaactcgaggtgacagggtccttgctagagaggttgacctagaccagtcaaaaagtgacgcttgacctctaagtatcctcctcaagtgttcctaaccacatttttgacatggattattggagaaagttagcaaagtcatcaacaaagaaagaaactgaaggaggaaaaacatctgaaatctgtataaagataagaacctctcaaaaggcgataaagaaaaaattagatctatcatacgaagtagacttgaatgttgaggaactaaccagtaaatgagagaaatcaagctccttatgggttactgaaaattctatgtcaaaaggggcaatctggaaaataaaaaattgtttaaaatcatcacttaatagcaaaagaagcaaacttaagatagatcagccgtaacctgttctctcaagataaggagatgcttgataaggaaaagctggccatccattgtagttgatcgcttaatgataagcttgctggctttctgttgcatatttgacaaaataatgtagacatctcaactatggtaacgcggagtagatgtaaaagcttggtaattaaaccaaaacaacaagaaatggcacatcttcgtgtaatcaaaatttgataatgccaatgaaaataaggacaagtgaaacggaaacaaatatcaaggtgaggaaaatctggttttctagcttgcttacttgaattgacagtgagcaaacttctacagcttcctgtggagcagaaaagaagttttgttacacaaattttcttaaaatgaattggtatcttttgacagaatggaagcaataaagttactgatagtcttgcctgtgctaatccagtgaagacggcctgctccaagcaacgatataatttagatagacaagagagagtcttttcaagaggtggataccaagtcttaaacacatcagcgttttcatcatcctgcaccttagaatataagtatacagctaaagattactaaacccatagaactaatttgagaatgtcattctaccctgagatcagtttcagatgttgtattaggagatccttccagctttgcaggataatccagatcttcatcagagggggtataatttgcaatctgcagaagtgagaaggagattcaaacagagcaactcaaggaaagcaaagtcctttaagactaaacagggtgacatagccgaaactaacaaatctctccactaaaaagtcgtgcagtatcacagttataacccaatttcatcatattaatagtagggtgactcgtcttactggtgacaacatacaaagttcacagtttctacataatagcagatgacaaggccacacatatggaagtaaaggccaaggtaaaggacttgtgggaaactattccagtatttgctggtaagttaaatacggtacctcatctctaatatatgttctggcacggaaagtcaatctctcatttacatcggccaaaattctttgtaatgtaggcctcagtccggccaggggttcactctgtctagctgactggtctcccaggacttcaactttaaggatatgaacgagctcacatagaagatcaatatttgcttcgtgaattaattttgggcgtaaaatgtcatacaagtacgtagacctgttcaggaacaagcaaatgtgatcaattggatgcaccgcataagatatatctaccgaaaacaatctggatcagttacacttactcatatttctgaatcacacacttttaagaagtattattcagattcaaagaaaattgactacagtgtagtggattcaccgactacagcaacaatagttcatcataagataataacaaacggaaaaaaaatcggaagatactagccataaaagttcatatatgctccaaattcaaaacatcacttatgcttactcatttctctaaacctctaaacttttaagaattcataatcagattcaaagaacatatacagcacggcagagaaaagcttacaaaggatccactaaaggtgccagactcgaaacttcttctgacgatgctggaaagaaatgagtaaacagttgatgctccatatgacaaacctgaaattcataatgaaggttaatacatgtggtgcagaaatttcatgttctgcaaaaccaaatccgttatcctcagttgctaaagctgataatccagccattgtctctctcaaacagaccttcatcttacctttgaaatctcacagattaacaactatattaatatcctcattttcctatatgtttctatcacttatgatggaaggaatgtccttttctactaaactggtatagctcctattaaccctcatgagtaaagtaacatattatcctttatgttccttcatatacctgcatcagatatgcacaacccgatctagttaaagatggcagtgcctctttcttggcgaaatcagatactcgttggtgcactatgcctttgacctgataatgtgaaatgagtaataaacaggcgattctagtaacttgcagatagaaactaaaccaaattgtattccagaaaatgaactcacaagcgagagccgttgttcacagtatagtctgtggcattctgcaaggatttggacatattcctttcttgctgacctactctcaatctcctccaatacaggtttaagctggaccaatattttttcgattgtttaatgtcataagaaagaaaatatcgccatgccataatctcaatcgcaaaattgacatcgaataatgctacaaaagctcattttcattaatattgtgacctagcatttctgcactaacatgggaagaacatcaaaatgtatcacctcatttgcagcagccttgaagcgaacatatataacagatgcctcgacaccctccgagacagatgttttgtttccacctgtcccacgaaatgctgcctgaacctgacaatggaattaatttgtatgtcttagtgaaactaaggtataaccttacctaacaattcactctacctgcatagattacatgcataaagatatgcaatatatgaatatacacagttatgagaaccatttacatgcttactgtaagctgtaaaagaatagatgcatattagaaagagaaaatacctgagaagcagccgttttaagcactgcaaggatgtaagttcgaatcatgcccaaggcccgtgactgtaacatatataaatgttagtatattctataacaaattacaagatactaatctccctataaattctggaaacaatgtatgagtttgtgcatgcgtatgaactgtaacccacgcgtctctctgtgagacaaagagagggaagagagacagagacaggaagggctctttgtagtacctggagttgacgaaatttgagcaaataaacactcgactccgcatattgaggattatcttcgatgtacctacagaattcaaggtaaaagagacatattacaatcaattcaagggaaatgaaagaattagtgcggcattcttatggaaaattgccaagtagtggatgtaaatttcataatattgaatgtaaaatcaatttactcacgatatgcactcatccagccgtttcagtagtgggagaaagtttgagtttgatacattcatatttggtgaataaaaattagaggatacctgcgaaaaaaagaaagaagaagatattagagcagtttaacaccttgttgagttatttcctcgtaaatctacaaccagtcttcagtaaagaactatgagctaaagtaccacaagtaggccaaaattcaaatatattacgttaatgaataaaacaagagcaccatccgaagcaactacatgctgatactttaatatgtgccaaaaattatgtcggtaggccagaatgtaaatcttacattctccagttcatcaaaatagttgagcttactccttagagcttctgcaaattccatcaatttctgcttctccattaactagaaaaagtggaagaaagtgaaaattagctcagccaagcaaacaacaacagtcaaatagtgtgagtcagaaactcttgaacagccatgatgcattaagcaacttttgtttgtcattttgattatgtatagcaggtaggacgggaaaacatgcaagagattaagagaaacaataaataatcttgctgcataaaagacaagaggaaacggtaccagtcggtcacatgcgtcatgaagagttttagtctttgttgttactccttgatgttgtagctgcagttcgttaaataggtcaagtgtttcatcaacctgcgcaggagaaatcccaagttcaataatgaagcagacgtgttataatttattggcaagataagaccacagcaattcataaaacttgttgaaaacctgcctggtgaagtatattatcacacgtctggatgcgctcagttaaagtactaacatagtgccgatacttttcctctgtctaactcagaaaaagagaaaatcattttagacacatttcaagtaatctttcccaacttttaaccaaggtacaacatgactttcactaacggactaacctcagacttcatcgctgattcaagatcagtaaaccatttgtagaactgtaataaaaccaacatacgtcaaaatgaagacgcattagtacacatataaagatgcaagaaaaaagagatgcccacaaatacaaaagcaactcctataatactgcaaatcagctaagcattggaatatcaagtagcagtacaagagactacctgatttgtattaaccaaaacagcttcaattgctccagaatctcccaaatgtgtgtcctccacggagacagacaagccattctcaggcctgtgaacatgctcatgtacctaaaaccatgaactaacactgacatcaaaccacaaaaaagggaaaacattctgaactaaatccaaaactaataacattagactcacaagattggcaggaaatggccgctcagcgactgcgtgggataaagaaacaatagctgcttgttgctgctctgtcaaaggagcgctctgcaacgggaatttcaattcagtatattctcaacaaacagagcatcattcagatccagacactagactgatcaatggatcttcctggatcatcagattgtgtgattacctgttcccaagtcgaagcgaaattgtagcctttggaaatggctccagatttggggaggctggaagacgaagccgccttagtcgccattgtctatgaaatctgaatctcggctatgattttgattcgtaacttggaagaggaagacgatgatcgggagtcacatgcagggaatgagcaaggaattatcaaggaagaaaccacgagagcacatgcagaggaagaaatttcagatccctggagagatggatgagaaacagagacgtattgagattaggaccataccaaagacaatgagaaattcaacagaaattaaaaggtatgcacgggttcgaactatgagggagcaagtgaaggaaaagagggaactacagcaaggtatgcacgaggaagaagaagaagaagaagaagaagaagaagaagaagaagaagaagaagagtgaaggaaaagagagaaaaaggccattgggcccagaggtgaacaaggcccaattaagggtgggtcttggttattaacaaatttctaattagattaagtacaagaactacataatggttgtgttgttgtaagaaaacgattaaggaaagtaagaagtaaaaagagttttccaacaccttttgcttcttcatcaaacattggatttttttcatgttataatctcaacgatataagatttcaactgtacatatatactttcaaattttgataatattgtggcctctcgaggtcgagttcatgatcgggttatgcataaacaattgaacggtgatttgtttgaacgttgaataaatatgatacaaatttaataagaaacaaactagcaattaatcgttatatatatataattaaattgttggtaacagaattaaacatttaaacatgttattcatctcattcaagacaaattaaacaaatacattcaaacggataactttgatagttaacaactcgatggaaattttacagacattgagaatgtgtgatacatcaacattatgtatttttcttacaattttcgcaggtaatagctcactagttagtgattatacacatcaagcatacatgctaacgacctagataatctcgtacgtatacggactaaatagttaatctagaaatttaggagttactgcaaaaaaactaatcctaggaggcagagtttccaacggataaaaagtcgaagaatggaacatgactttcatgtttggtgtccgagtcactgcgtttgctttgacctgaatcttgatctataatctcgctcttgtttgaatctgtgtttacttgtagaaaattgtagaactccataggctttttactctgatttgctgcgatccaaacgataaaagaaggacgaaattataagctatgtggattgcaactatgttaaatatatagagatgacttcatgtaatgacggaaacaatatatgatgatgagtacaagaaaaaacatgcaactaattttgtcacataattttgaagttcattagaaaaatgattatgcaaatgaaaaagtcggctaaactctttgaaaagtaaaaaaattcggctaaacttcatttcaaaattttggaacatatatacctttttcatcaataatccgtgcaagactcatatacatgcaaacacatctatagaaaatggatccttctccatcattttgagtttacctttgtgatttaaagcgatctttccggtgaaaaactcctttaggaagtgaagatgattgatatgagagaatttgtaagggaaatttataaagtctgctggaaatattttcttccgatcatcggaactataattatgattataaccaccagaactcatcatgatttgttcactcgccattaaagaagaagacgaagtcgtcgagggaagaagacgaggcttagaggtttggcgtgtgcgacgagccatgatgacgtgccaatggttcttgacggcgttatcagttcttccagggaaaagccttgcgatgatggaccatctgttcccatggatccgatgagccgctaaaagtctttcttcttcttcttccgtgaaagggtttcggttgatccttggatccaattgattaaaccatctcaatctacaactcttacctgcatatatacaccaatacaattaattcatatgtatatatatatcaaagtatcaaaattaaccctagctagttttgtatatatggacaaaccctagaagatatcaattaccagagcgaccaggaagcttgagagcaatggcgttccaattgtgaggaccgtattgttcgacaagatccttgagcttctcgtcttcagctggtctccaatggcctcggctgcacatgatcatttttcttcttcacgccgatctatttaattacgtaattaactaagtataccgatccaaaccaatacaagaacaaagaaaaagaaaaacacacagattctatatcaataacgcacgcaaaaaatttgttgtgttcatgtattttatgtacatatataagaaattaaaaccctaagttttttttttcttgggaaaaggttggggaagatgggtatgtgggaacaagaagaaagctgaagagcacctgcacgtatatatatacatagtctatattattgcgagtatatatataatatacattttatgtcttcttcttttttttcgtctaatatacattttatgtctttaccaaaagaaaatatatatatatatatatatatatacattttatatgatgaaaattaaaataaaataaaacaaaatccgttagagagtcgggagggtttggacggacctctctaccggcgactgatgccaacgtcttccctaaccaacaaaacacccccttctacgtaatctacctttttctttcctttattttacaactaggattttatttagttataataattatagaatatataatatcgtagaaaataagagcatagactagagattgcttggtgtgggcaggatttcgttagcctctcaacgtctcttcgtatagtattaatttaaggtttgttgtttctaagttctaacctacacccgctacttcaagccaccaatactcatctacgtttctgtaatcttggcaagctacgtattcacatataataaatatcgatatcctacactgacaaaaatttatttcatgtatcaaatatcgtccataataattaaagataaatattttcagacctaatcaacgttttttctaagccttaattaggaatatatcgtccaaagtggagacaatacaactaactttttctttgcaattttacaatgggtattttcttataaactgtaaataaaatagaaggtgtatacaattgaatcaagtgatgaaatatattagcaaaaattttattctcatgtggtcaatcattttagtcgtaaacaaataaaaaaggtggtcaaatatttggtctccaagcacgtctctcttgtccaaaacggaactttataggtttcggacattcaggactaaaaacagaatcagttacattgaatgttccgtgggactaattagaacatttcttcaaaaaaaaaaaatctgtaagcaaaaaccaaaataattgctggtaaagtttagtaggaaaataaaataaaacagagagttagttgggaaagaaagccaataatcaacttcatttgttctatcggtagttaggagagaagccttcttcagtttcgactttcgaacctatcataactaaacttaacctattttcgtcgcaaaatgacctatttcaactaaaccggatcctgattacactaaaccggtcaaatattatataccagtgggctttttattttacaactgtatgggtacttcatcaccaaaggctgacagaccaactgtgtcatgtctttagacttcttcagcaagagttcctgagacttgaacctgttaccagaactgaacgatgaaccgacactgttctagcatcataatgtttcaagaatctcacatcaaactcgagaatcagagagcaagagcagaagataaaccataatagtcatgaaccataaggaaaacaagcctctcacattgctaaggatcatacaaagttcggctctatctctatgtatgcaatggtcaatacaatgactttaaacgaacacgttaaacatattgtgagctgtgagagccttttcaaagaaaccaacataaccattagacaatagacctggataggtatctttgctttcgaaaccatgcttattggtccagaattagagagactgtgatggatgaaatttcaccagggatcatagtcacgaagagctcctctctaggcaacagaatcatcgcaccactgaaaatggttctttgttttagtatgatgatatggtccaacagttttcagttcacattacttccctctgagttttgtactctttctcttctcactgagtgcaaaacgcctagccatactatggttgtaaaactttttcatatgttcagaaaccttatgaattgccttgaggttaccaacttccgatagacgcatcaagaaagagtcaaacactcgatatggcagtttgagtcctttgttcacaacctcttccagtagaaaacacgcctctttagctctgtgacagtcgaaaagcccattgatcatagcacagtatgtttcaacgtcctgaacacagtctcttttatccatttcagtccatgtattgaatgctccatcaggatcatccatttcgaaaaacatagatatcagcatgttgtatgtttggacgctaggagcacaacgcgactctaccattcttccataaagtttaagtgcttcatcggtctttctattctcacacaataccctaagaaagcaattgtatgtgactatatcaggcgggtaacctttattactcatctcatccaggaacttgtacgcttcatctaccttttcagccatacacataccttcaattacatccttatatgtcgagacatcaggaaggcaacccgtgcttatcatacgcccaattagctcaaagcattcttctgccttatcattctttgccaacgccacaatcattaaagcaaaagtctttgcggttggagcagaaacagcagagcctttggttatcataaagtcaaacaaatcagctgcctcatccaccattccagcttgacagaaagtatcaatagcagcacaataagtgaaattttccggcttatgtccagcttcaatcatctcttcaagcagcttcattgcctttttagggtctctcaccctacaccacccaaagaacaagacattaaacgtattcgcatcaggtttaactctatgcctcatccttctaagcaaagcttcaccctccttaaccaaaccacacttacacagagcatcaagaagcatattgaaagcattaatctcaggctgcgtcttcactctaatccgtttcctcttggcaaatttctgaacatgagtcaagtacctctcacaatacttcctgagaatctccaatagaacatcaacaagaacaacggttttgttgtttctcttcatgtaatcaagcatatcaatcacaatcctaaactgcttattcttatacttagtacttgacaatatatcaatcatctcattataagcaataggctcatgtgagtaatgttcttgatgtccagcccaagtgaagaaccgaaaagccgtcttttcttcgtattgaagcctttgtaagatcttacacaccacaggagttgttaaatctacactagattcatcaagggctttttccatatcatcatacgcattcaaattcgccattatagcttcgtgtaagattccaaccgcatgattagaaccctttgttctaatatcattttcattgcaataaaccaatgattgatcttcggaaactttctctatacgggtaatttctagttctgggtttaacaaagtcgtggaacagaatcgatgcacagagaaagatgagatttttttgttgatttgaatagaatctagatgagaactcaatatatgagagaaaagtgcggacctttgaggtggtgttgtggatagatgcaaggagaatctagaacgaacaaagtaagagacgagtcttcgcatcattcagtaatcaatcactcggaaataaattcgttgagaggtttaaagcgaaggagactgagaggaactagaggaaggggacgacatagagaagagagagagagagagagagaaattggaagattttaaatgggcttttcttttgttgaggccttttcatttttaatgggctttcttcatttaacaacgaaaactattttgtttggtttgaattacacactacttcaagtcttaaacaaaagggaatcaaatttccaatttcttttacatcaaggtctagactctagatatcaaatatcaaattctataaaaaaaaaaaaaagagaaaaccaaaaaaatatcaatttaaaaccaaaccaagccataaatcaaaatttctactcctagtttatcatagagccacaaataaataatatacatatacatctctttacataagagcatctgcatcgggaagattctcttcctagtttctcaaaaaaaaaaaaaaatattattttaattatataatatattttatttaaattgtaatagttaaactaatatttgattgacatgtggcgattctgtcagaaaaacgattctcttagtttctcaagtgaggtactcttctccctctctatcctactttttcacttttttgttcttattttattattaagtttctcattcagaaatactgatggagatggcctaaaacaactaatatatatgtagttttttatatcgaatgagaattatcctgttacattatactaaacaaatatttacagattctatacacaaaacattattagatactctagattttgccgattgtaaaaatttaatagtctaatcaatggtatgtatataacgatgtaattaatttgcaagtagcagagaagaagcaatactacttttggcatatagcaacaagttatggtttttcttttttcgtttcaaattattggtcaagtgacaagtggccgttagcgtagttatgacttttgagactctcgttgtgaatcattgcattttctatggttttggttttaatgcatttctcattattttttcacaatttttttcagaaaccaaattaaaaggagggatacaattgggggattggtttttaagtagattgtatgcacattcactcttcaatctccgagcgaattaaggagaatcataataataaaatcagaacatagaaaaagaatccaaaccaataaattagaaaacttaaaacttaacttagagaattcaaaatgtaaagaaatatcacaatttctttgttcttgttcccaaattaaagtaccgttcctacaatttttatttttatttttttatcacatgatatcttaatatatagttggatatacataggatcgatattggacaaccaaataaaaacaatgaccatgattaagtttgaaatttacttacgactgcaattaacatggcagatataatggatttcttcctaactattaaaaggagagaataaaagcaaaccaaaactaacgaaagagacttcacaaaaaaaaaaaaaactaacgaaagagttgcatcatactaattcatgctagatacagttttattttgattagtaccttttctaagcaaaattagaaaaccctaaaccaaaaatttgcattcaacgtgtcgatttacttgtaacgatcggattactttactgggtcttttagttggttacatgaaaataaaacataatttaagtcagtttctataaaaggaaaccaagtcgtagacgaaacgaagacacaaaagtagctttaagccttttaagttttaacctgtgggtaacatcgaaccaatagtaagcaacggaatgatagtagacacgtgtcgtcacaaaccgcccttataaattttgctacagaccgttggggcggtgagacagtcgtgatctactaaccgaaatcgattcatgaatgtagacacgtgtcttcccttaactggattctacaaatatcttctttcgtcattacgttgcccagaagaacatagcaacgtcactttgattgacatttccgccacgtggactgcatgtgtcatcactaatattaccaaaaaaagaaattaaaatgttttttttttgttgataaatgatttttgagcaaatagtggacgtgggatgcttatgcataggccggtgacttttgtttggtgactcataattttgtgtgattgactgattgtaaccaaaaagatctaaagattcaatgatattttagaaagggacggtcgttttgatgtcatataacacatatttattcggtctaaggcgaatgtacttagtataaatactacaacttgatatttttgtaacatgtagaaacaatacattacacacatacacatgttttaaaaaacaaaccttaacgtacgaggcactttactatacaacaattgttacatattttaaattgaaaataaagcttctgtatgattcagagagaggatggtgccattgccaatgagcttccgattttttataatttagaattgtggaaaccaaccatatccatgcgtatgcatgttgtgtgataagtattgataatggtgtgtccaccatcgacatcctccatacacatttattttatagttatatataatcttcttatgtaccttgaatatataggtagtttgtcttttttggttcgtacatactcttaaattgaaaatcatggcttgctttttgtaattaagtttttttctaatacaaaattttcatggattttaattttatttttaatgataatattttatattttaaaaaactatgtcactagtgtgaatataatttgaggaaaaaacatttagccgtgatattattttaaataaatactacctataataaaaagttttggttttaggtaactataaaagtcgaaagagcattaattttggtttttataataaaaagttgaaatttgtgcccttttcaagtctttcttcatcatcttcattctcattctcatttccatcctctgcttgctctcttctcacagccccatcctctttaattaccatctccaatcccctgaaccaggatttataccattgcgattccgcaatccaacactactatctctctagtttcctttcttcattaggaaagagcaaaagcattcttttatggtaaagtttcgatttttcaaattcatacactgtcggattcatacccttttcgctccgggtctggaatttgggtttttgaggtttctacggagtcaattcgagtctgcggaaactcaatttgatagactcgtttcaaaatgttgcttaagggttttcttttgttcatggattgaagttttgcttaaaccagttacgaggtttcttggttcttccatgtatccgtgcgttatctttgatgacccttcactcaaagtcttcgttttttcatgtcaagttgcttcctagacttagaaaattctcgtttttaatggatttttgttcatagaacaaacatttaacgtttcatgctttttctgtgagtcacatgtttttttttcttgagctgattaagtctctttttttgtttgcagccatcaattgaattatatgtcttttagccaataattctgataaacgtcaagaggtaggtgagaaaatcaaaactcttgccttgttatcggttttcgataaccacatctatcaaacgatgtcatttgcttgtttgtttctgcttggacattagtttccaaattattagagagttttagtcacgtagaattatgaagtttgtagtatggcagatggctcgtgagcttgtttaactttatcttatgaatttagtggacgagaaagaagttgggttgtttttggttggacatttattaattttcgtctctttgtgccatgttccatgaagtatcatttcatcatctctagcttaatctctgtttctgctttcatctgttgggattgtagtttcgttaagctttagaaatgggatgctttgcatcaaggccgaatgatactggtggaaacagaagaaagccaacgagcatcggagatgtttcagtatatgtacctggtttaaggatacctaagcccgtggagttttctcagtcactgggtgatcaattgccaaagactctagtggagcgcttgacagctttaagaacgagaatagttgtgatggcaaatcaagaaggaccaactataacaagaaccaggaggaagacacagcatggtatagaagaatatcttgtctgtttcttgtttctctttgccctgctttcccccttctaacttaacggaatggtttcttgcaggaggttctacgctcgcagatctccatcacgctttggaagattatataccggttctcttaggattaactaaagatggtaatatactatgtatgtgctataataatcgagatttgcttggtagtagatatcctaacatatattgttctatatgttcaggtagccatttacaattcaaagtacagtttaattgggtaaatcaggaagatgaagaagaggtgcggtagtcaaagctgtttatcccttattgtgctgttttgctctttccttcactttaagatttagacttttacattagtggttgtgagtatatgacaagattatttacatctaccaggaaacagccatgtcaaatgtttggtatgaaatattgtcggttttgcatctaatggcaatgttacaaatgtcacaagccaatttactgcttcttcctagaggttccagtgatggctatcatccaaaaatatcagaaggtaagacctgccaaattgctcacacttcttcagtttcgtaagagaagtaccatacatgctagttttttttttttttcttcacaatttcttgaaatttcataagcaccacttctctaaaaactagcatgtatggaactgtcagatgtattgacccctctttagtaatccaacaatagattagaatgttccttttgatgctcttaagaaggcaattgatagctagtttatagaaagatccatgtttctaggattatctagatggatggataaggcaggcaggtagaaagtaggaggaatgtaatgtccatgttttccactgtctcaattagtataactgtaagatgtaatggttatgtccttcagtcttaacgatatgcttgtttcaatcttttctagaaaataggcgagcttcaatcgatatcttcttaaaagcagctggatacctggactgtgctgtgaagcatgttcttcctcatttttcaaccgagcagaggttcatatatgacagttttcttatgtcaaccattgcagtttttaatagctctgatcgactctactgacacgacggttgtttttctttgccttttccacaggagaagtttaccaattgacctagcagaaggagctttacgtgcactttgcttgcaagcattaggccaggtagaatcactttcaatgtttgggatatattaactaattatgatttgctacatgtgttgcctagtttatttgtgaatatcgtcatcatgttcaactacttagaaactcagcctagttagaagtagtgatggttagagtattttaatagacatttatagtcttctatttaagttataaattttctaatttagggtgttgatatccaacttgggatggcgattgatagtgcaaaagccactcttgccgtgaagcgaagactttcatgtgaaatggtgaaatactggcagcaggtgatccttaccttactaaattttgttatcttgtgtaacttttgtggtcatcactttattataataatgaattgaaacgtagaaagattaggtgtcttaatgggagtagtgtgtattatccactttagaataatgggacaaaaaaccaaaaacaaaatgaaagagcaaaaagaagaaagtggttatttcaccatcacaaaagtgtcactaactcgtgtctgctgatcacttatgttgaggaggataatgggactaatattgcttaattagttgaaccttaaattaagaaatatcatctttaaaagtgtctactaactttatactcttagtactcgtttacgtgccaaaaaataaaaaagagaaaacaacaagaaagtagaaaccttccttgagctagttactattttcctcttttctgaggctcaaggaagaattgacagactctcttttgtatttctggttgttaattttgtaatgtttttcttgcgatgaaagctctctaatagtatattgatggacattgattaggcacaagataacttaatgaatcttccattagcaaacgggtggggcgaaaagcatatgctctttgttaagtggaagtatgttgaagctaaggtactgtttggacgtctttctcacatcattggatcttaagaaattcacatagatgagtgagaaactctgttctgtacaaggctctaattttgtctaacactaagacacttggtttctctgtgtatttgtaatactaggctgcagcttactactaccacggtctgattcttgatgaaggaaatacagagaaatcacatggcatggcggttgctgctttacaggctgcagatgagtgtttgaaagaaagtaagaaagcaagtgaggcgtttaacacctcttcacccacgtcaaggtaaatccttcttttgtgcctttgtcgatggatcaccttgtatctttctgtccatcagtcattaagatccatccacatttcttcaggactccttcacttttcgggacaatgaaatatctatcagagaaaataccaaaagaaacttcaagtaaagtcaggataaaccgtgatctatactcttatgaaaagtgagtttcagtttaaagctttgtcgagttttatctcttcttttgctatgatattttaagctcaatctttctatttatgccgaattataggatcatggagacagcaccaacgcttcctgattttgccttggcattgaaacccgatgagtaccaacttccttctgttgatgcgtcatggtctgaagccagtctacggactaaaaacacatcaaatcacatatagggcaaccaaagatagagcagtgaatagaatgcatatcaacaccttatagagttacaatgccaatggccgccatagaaacacaaatggtatagctctataactaccctagtgattctccaaatgtcaaataatatatgggtgtgaaaaaagtaccgaattggattagttttcaggtaaaaatatgggaagatgtcgtctgttttctctgtatgttgttgtaattttgtatgtttagtgcaataaaattcgattctttctgttccacattcattactattacttagacaacaacatctacaccaaacaatagcaaactggtaagtttctgctttttgctttgtttgacctactaatactacaaggtttggtctacagaagttacaaaattacagaataggtagaagtttgaactttaacacgactaatcgccagtgagagctcgagggctatggtcaatagtggaaagagacatgcccgactgagccacggctctgacaaacgccatgtttgcagtcaaggtaggagctccccatctatcacctgtcccaaacacagtcttgttcttcatcgctaacttcctcgttgttgggagactcatcacacgctctgagggattgtcatttaccaccctgtcaaaaatcacatcgaccatcaacaacaattgtaatgagtcaaagtattgaactttgagattctctgttgatacagagcataatgtgacttacattaggctcttcaataactgttcagctctgagtttctcattgggtccagcatacatggatactaactccttgaactctgagaaaacactcttgcatacaataccacgcttccctgataatacagttcccactttgacaaggcctggcttctcaatttcagatctcgcctgcatataaattgtcaatttcacaaaaaaaattgatagactagtgataggaggcaatggtgaacttttttctgtacctgagcaatcacaaaaacggtattgcccttaaacttttcttctaattcgatctcaggcatatccacgagtctctctgcacacccattactgattccggaaacgagagcaacaagagccgttgtgtcgaaattaatgagacagtcttcaccaagcaatctcatggaggagattacagtagaaaaagcatctttttgacttagctctgtgacctctgcttgaactaaaacctcagtttcaggagaagcaagtgaatcacattgatctatcagcttgatctcaatagaaactgcttctttatatgatctggttcgaacaacgttaacccattcgcaatcaaaatcatcgagcattgagatatccgaatccgaatcagaatcgaagccaaaatcgaaatacacagctccgaattcatctttcagtttctcgtaaactgaagaagggagaccatttgcgaagaacagaatcaccgaagaaggtttaagcgtggttgtggaattagcagcggcgagaatctgttcgattctagatcttaaacctttgcttccatggcgatcaccgttccaggagatgtacctagggtttctatcagagacgatgatccatacaggaacttttccgagagtacaaacgagatcaacatgaacgccaccaatcggaagaggaatcggtttgcaaacgcgcgaaacgccggtgatagacggaagctgtaaaatccgtaccactgattcaatgtggccaatgttgacactgattgcggaaaaaaaatcaaagtcagaatcagagctaatgagagggagagaagaaagagatgattaaaaatagagaacctgagaggtttcggagaaggatcagaagagagagacgagagaaaggagagctcggaggaagcgagcttaaggagtgtgcgacggcacgaagcagtgattgcagttgataaaggaagattctcgattgttcttataaccgattcgcatctctgtttcgctatctctatctctcctatctccatgaccaacaccgtcgtctgcttaccggaaactagaaacgcgtcgtttaagttcagagagctcctccgagacacaacaacgaaagagtctaaccggctcaaaaccggtttgagtagctagcatatcgatattcggtccgatatccggtatgtttctctggccgcttgttatattccggtacataatgaaaatctcaacaaaattagttcagtgtaaccatatgattaatcaagtgatgacttaatttcctagactataaattgatcaacttgaatcttttttccaattggtactaattaatggataattagtactgtataatgatataattattatcttgctataaagtaatttagtatcattgtccacagggaccacaatcttaagtaaagtatccatcaaagagggggaaaaggagcattctttttgcacccataccttttatgttattaacacatgaaccccaagaaaagcaaaaggtacacaaaatctgattttgcttcaaacaaaatgaaaatcacgcaatattctttttttgttaacttgcttgcacactttcttttccccacttttatttctaacgaataatcttctcccccatccttctccttctactcctgtgagtcctgtccccttcacagcatattattgtgtatctttatatataaaatgtggattaaaccatgtttcaacaaactacttcatatctcaatcattcaatattcttgaagagactttgaatcttcagttgtttctgtaaaaagaaaaaaaaaacatgtcatcttcatctcaagctatgcttcaaaagtcggattccatcgctgagaaaatgcctgatgcattgaaacaaagccggtaccacatgaagagatgttttgccaggttcttttaactcttaggattagttttttttttttttttggctacattttgatgctatttggattccttagttagttaaatgtttgtgcgtaaaaaaatgttgtagctttgttggaggaggaaagaagctgatgaagcgtgagcatttgatgaatgagatagagaaatgtatagaagatagccgtgaacgcagtaagatccttgaggggctgtttggttacattctcacttgtactcaggtaatataatatatcttcattaccatttgcaattaaaaacggtttagttgcgtgttcatgcgaaatcacggtttatttttctctgttttaactacttatcaggaagcagcagtggttccaccgtttgttgcactagccgcaaggccaaatcctggtttctgggaatatgttaaggtcaactctggagatttaacagttgatgaaatcacagccactgattacttaaagctcaaggaatctgttttcgatgagtcatggttagtaaacaatcttacatacggcgttttggcaataacctgagctatattcatcatctggtgtaacctttttttgaaatgttatgtaggtctaaagatgaaaatgcactggagatagactttggagcgattgatttcacatctcctcgtcttagtctttcttcttcgattggaaaaggagctgattacatctctaagtttatatcttctaagcttggaggcaaatccgataaactagaacctttgttgaactatctgcttcgccttaaccatcacggagaggtcatgattgaatcatttcttgtttccattttcatccaccttcttgaaagtcttataactcattaaaaatgctttgtctcttgcagaatctcatgatcaatgacgatctcaacacggttgcaaagctccagaaatctctcatgcttgctgtgattgttgtctcgacttactcaaaacacacaccttatgaaacttttgcacaaaggtaaagaaaaacaactgatcaagttccttgaggaaccggaacaaggatctgattgaaaagttactttcttaggttgaaggagatgggattcgagaaaggttggggagatacagcagagagagtgaaagaaacaatgattatcctttcagaagttcttgaagcaccagacaatgggaagttagatttgctctttagcagacttcccacagtgttcaacgttgtgatattctctgtccacggctattttggtcagcaagacgtactcggattacccgataccggaggccaggtcatttacttatacaactcttcagttttatattacctgcaaaatttgatatctaacttacaagaagaaactttttggtttataatgatcatacaggttgtttacattctggatcaagtaagagctttggaggaagagcttcttattcgaattaaccaacaaggtctcggattcaagcctcagattcttgtggtgacacggttaataccggaagcaagaggaacaaagtgtgatcaagaactagaagccattgaaggaaccaagcattctcatattctcagggttccttttgttacaaataaaggagtccttcgtcaatgggtttcccgattcgatatctacccttacctcgagagatttactcaggtaagctaatcatctttcctttagaatgttttcatactttctcaatgaaaaaatcaaaataaatcctccttgttaaaccattcttgtttacaggacgcaacgagcaagattcttcaacgccttgattgcaagccagacctcatcattggaaactacacagatggaaacttggttgcatctctaatggccaccaaacttggtgtcactcagggaacgatcgctcatgcgttggagaagacaaagtatgaagattcagatgcaaagtggaaggaattagatccgaaataccatttctcatgtcagttcacagctgatttaatcgcaatgaatgttactgacttcatcattaccagcacatatcaagaaatcgcaggaaggttcgtcttgttcgtttttttgcatcaacatatacactgaaatttcaaactcataaaaccaaaatctgtgctctgtttatgttgcagcaaggacaggccaggacagtacgagagtcacactgccttcacaatgcctggtttatgtagagttgtctctggcattgatgtctttgatccaaagtttaacattgctgctcctggtgcggatcaatctgtatacttcccttacacagagaaggataaacgattcaccaagtttcatccttcgatacaagaactgctttacaatgagaaagacaatgctgaacacatgtaagtagtatagtctcattgcaattgaatagtcaagactcaacgacttactaattcttcctatgttggaacaggggatatcttgcggatagagagaaaccgataatcttctcaatggcgagacttgacacggtgaagaacataaccggtttggttgaatggtatggcaaagacaagagacttagagaaatggctaaccttgtagtcgttgctggattcttcgacatgtcaaaatctaatgacagagaagaaaaagctgagatcaagaaaatgcatgatctaattgaaaagtataagctcaaggggaaattcagatggatcgctgctcaaactgatagatacagaaacagtgagctatacaggtgcattgctgatacaaaaggagtctttgttcagcctgctttgtatgaagcttttggcttaaccgttatcgaagccatgaactgtggactaccaacgttcgccacaaaccaaggtggaccagccgagataatcgttgatggtgtctctggtttccacattgatcccaacaatggtgatgaatctgttacaaaaattggagatttcttcagcaaatgccgttcagatggtttgtattgggataatatctctaagggtggtctcaaacgcatctatgagtggtaagtaaagataatcttgaaacaaaaatcttatcagttatcagattacattgcttatttgtggattttgtattgtctgtgcagttacacatggaagatttatgcagagaagttgcttaaaatgggaagcctttatggattttggagacaggtgaacgaagatcaaaagaaagcgaagaagcgatatattgaaatgctttacaatctccagttcaaacaattggtgagttttgttatctgaagattactattgatgaaagctacaaaactaacctttacatccttatggtttcttgtagaccaagaaagtgacaatcccggaagataaacctctgcctctgagactggcttcactccgtaaccttcttcccaaaaaaacaacaaatcttggagcaggaagtaagcaaaaggaagttacagaaacggaaaagacgaaacagaaaagtaaagatggtcaagaacaacatgatgtaaaggtcggagaaagagaggtaagagaaggcttgcttgcagctgacgcatcagagagagtgaagaaagttttagaatcttcggaagagaaacagaagctagagaagatgaagattgcgtatggacaacaacatagccaaggagcttcgccggttcgaaacttgttttggtcagtcgttgtttgtctctatatctgctacattttgaagcagaggttctttggtgctaactcggctcaagagtattaaaaagtttgaccttggatcgaggaaaagtgaaaaactgtaaaatatgtaatgactaatgaatgaaactaccatcgatgtaaaattaactaataaaatcaaattggtcaagatttttttttttttttaatttggctttgtgaattaatattggcttaccaaattgtccaactgtatataattacacacgtgtatgtactatgtgcatgtattaattatgaaaattggttgaacatatatttgaattaatatcttaagataataaataaagtaatgaatcggtccatatgataattaaatttagggatagctatatggagcaaacgaaggcagagactgtatgtgaattggttcactttattcaaggtcccaaaataaatgtggtaagatgagaaatttatatcaaggctttaaggactctatttaattgcttcttcttttcagactgatgtcaatattttttaggaataaaataatgcacacatgaatggtaaattaaagaccaaagttgataataataagaaacaatataaataacttttgttcctaaatgattatctcatcaataacaaagaattggtgaatgatacacaaattcattacactatctttagttcataaatagttttatatttacttcgcattatagcattcataatctctaatgaaatccatgatacgtttctatatcatccaataatgaaaacataacaccaaatagaaaatttgcaaatcagtttaattatgagatttcatatttgttttaataatcaggttagtagtatcatacagtatgttgtatcatattttcagctaacacttaatgtcgtcgttgttgaggaaacaaaattagaaatcgcatgcaatcccttttgtcaacgaaagtttgtataataaattcacattgttgtcaagttttcaagtttcaaccatatttctttcttccacaggtttctaatttcaatgtatagtaaaaacagtttgactttttttgatatacacttcgaagtgaatagagttaagaccgcgtgagtaggaaacagccaacacatcgagacgacccaaaaatgcaaaaatacaacaactaaaaataaaaataaagctattttgattacagtatttaaacagatataaaaatagctaattatatcatattaaagttatgttatttaaacagtcttaaaaggaattgaataacgtgcgatgttcctaaatatgaatgtatgattaaatcaggtaaaacatagtactaataatcttatatagaaaaaattataaattagtggaacgttccatgcattcattgtattcagtaaataatctttactattggcaattttgtcgaacttatgacccgctcgctttaatagaagactacagtgcagataagttgtttgtccatgtgtaaacgttttaatagttttaaccgtgggtaagaaatgtttgttttatcacgagttaaaacaataattactactattaaaatacaataattattattaaatatccttaaactagtaatgttttgagaaaagtaaatatctataagaaaatccattttaattatagatctttgttcactaaacaaaacaagtggtgttttaagaaaagtaagaatctagtacaaagtaattaaaattgcctttacacagattttctcatttttcattttgaagaaatattatgtattatagtaataaatctttatttgtttttagtacatctaaattaggcaaaaattagagaaagtacaattaaattataacagagtaagaaaacttgggaaatgagaaagagaaataaataaaaaatccaaagaagaagaagaaaatgagatcagcaaaatccccaataaaagttaatttttgtcattatacgaaggtgagaaaatcgccggagaaagtggataaagtcctctcctttttttatccaaccaccgtcaatttaaccctctccggcaacataaaaatccaccggaacttaaaaaagagagttagttgtatagaaagagaaacaaaagaagaaggttggttcggtcctctctctctctctttccccgagtatggtgagagtactagttagcagtaatggagagagcaagagactttaaaaccctctttctctttctctctcttttctattttttcttctgtcaatttaaaaacccatcagttacgccaatttctaaagagagagttttcttttagcgaatctgtaatgaatgttgaagaagcaacaaaaggggtttgggagcactaatggcggctttagcttaggtgagaaagtctttacaaggaagagatcatatactatctcactttctctttctagggtggctctgtagagaactaagaagagacattattacggctaaaataaaaaacctatctcttttggatttgtaaaaattccttttttttttcttttgttttcgtaatcaatttcttgcctaaagcgaaaccttttcacctcccgaaatcatcgcctttgcatcttctctttcagattctcttccgtttcgttttttttctttcttttaatctctcttcctcttctctaaaatttgaacctttttttttttttggtgtgttgctctgttgggtttgtgttaatggtgacagtggtgtaaatggtccattagtagtttgtggttgggtgaaaagtaaagagattaaagactgttttactgtcttttcgaaacattaattaaaaaaaatgagtttcgtcgtcggcgtcggcggaagtggtagtggaagcggcggagacggtggtggtagtcatcatcacgacggctctgaaactgataggaagaagaaacgttaccatcgtcacaccgctcaacagattcaacgccttgaatcgtactactctgcaatcccttctcttttttatcttttggactctgttttcattttgtaatcgttgaaacttggacaggagtttcaaggagtgtcctcatccagatgagaaacagaggaaccagcttagcagagaattgggtttggctccaagacaaatcaagttctggtttcagaacagaagaactcagcttaaggttttgtgtctctgtctctctctctctcttttgagtttaaaatgtaattctgaacacgaaaagagaggattttgattttcgttgtggtactgttttgtgtaggctcaacatgagagagcagataatagtgcactaaaggcagagaatgataaaattcgttgcgaaaacattgctattagagaagctctcaagcatgctatatgtcctaactgtggaggtcctcctgttagtgaagatccttactttgatgaacaaaagcttcggattgaaaatgcacaccttagagaagaggtttggttttgttttgcgagtttttattgatgtaagattgattcaaaacatcattttgactgtgaaaatttgatctttttgcatagcttgaaagaatgtctaccattgcatcaaagtacatgggaagaccgatatcgcaactctctacgctacatccaatgcacatctcaccgttggatttgtcaatgactagtttaactggttgtggaccttttggtcatggtccttcactcgattttgatcttcttccaggaagttctatggctgttggtcctaataataatctgcaatctcagcctaacttggctatatcagacatggataagcctattatgaccggcattgctttgactgcaatggaagaattgctcaggcttcttcagacaaatgaacctctatggacaagaacagatggctgcagagacattctcaatcttggtagctatgagaatgttttcccaagatcaagtaaccgagggaagaaccagaactttcgagtcgaagcatcaaggtcttctggtattgtcttcatgaatgctatggcacttgtcgacatgttcatggattgtgtaagtagctgagacatcctcatcatcatgttctgtttcacaattggttgcagcatttcttataaaaatattgtcttcttgttgcaggtcaagtggacagaactctttccctctatcattgcagcttctaaaacacttgcagtgatttcttcaggaatgggaggtacccatgagggtgcattgcatttggtaatatttgatactatacttctattctccttttatttttgtttcattttgacttatatataatagtaactttgcttggcttggttatgtagttgtatgaagaaatggaagtgctttcgcctttagtagcaacacgcgaattctgcgagctacgctattgtcaacagactgaacaaggaagctggatagttgtaaacgtctcatatgatcttcctcagtttgtttctcactctcagtcctatagatttccatctggatgcttgattcaggatatgcccaatggatattccaaggttaaacttctttttcctctgtcaactaaatcatgttttcatgttagaatatccctaaactgatgaattgaaacaggttacttgggttgaacatattgaaactgaagaaaaagaactggttcatgagctatacagagagattattcacagagggattgcttttggggctgatcgttgggttaccactctccagagaatgtgtgaaagatttgcttctctatcggtaccagcgtcttcatctcgtgatctcggtggaggtaaacataattttccattgcgaacctcaaagttttaaactccatataactaacatttgttgagcaactttttgcagtgattctatcaccggaagggaagagaagcatgatgagacttgctcagaggatgatcagcaactactgtttaagtgtcagcagatccaacaacacacgctcaaccgttgtttcggaactgaacgaagttggaatccgtgtgactgcacataagagccctgaaccaaacggcacagtcctatgtgcagccaccactttctggcttcccaattctcctcaaaatgtcttcaatttcctcaaagacgaaagaacccgtcctcaggtaacaacaacacaagattcaaaatcttcatacgaaagattcatttgataatgtatatattgtttccttcttgtttgtgatactagtgggatgttctttcaaacggaaacgcagtgcaagaagttgctcacatctcaaacggatcacatcctggaaactgcatatcggttctacgtgtaagcctcttttacaacagagtgatacaaaagtttccgcttaattctcttttgactcatttgtttttgtgtattagggatccaatgcaacacatagcaacaacatgcttattctgcaagaaagctcaacagactcatcaggagcatttgtggtctacagtccagtggatttagcagcattgaacatcgcaatgagcggtgaagatccttcttatattcctctcttgtcctcaggtttcacaatctcaccagatggaaatggctcaaactctgaacaaggaggagcctcgacgagctcaggacgggcatcagctagcggttcgttgataacggttgggtttcagataatggtaagcaatttaccgacggcaaaactgaatatggagtcggtggaaacggttaataacctgataggaacaactgtacatcaaattaaaaccgccttgagcggtcctacagcttcaactacagcttgacacacaccattaaaagctctcttccctctttcttctgggtgtctctttctcttcaatgatggaacagagaagggaattaactccttcttttgccttcaatgccagagagagagaagagaagctcattaactccaattgttctgctgcttctgttggtgctgttctgttcttggacaaacctcattaaacaacttctgtaagaaaagaaaaaaacagctggattcttctctcttcattttttttggtttttttttttttttttttttggttggttatgagtatttttttagggtatttttattgggtttttattactagaagaaactggaagtcaagaacgcaccatgcaactttgactttgtttgtatggttcgggcattgacttctattgcaaagtttttttgaaagctttaaactttgttcatctcttcattaatggtctgtttatgttttaactggttcttaaatcttcttctcctttgatctaaatgttgttgttatgggtggagagatagagagagaggttaggtgatggaaatctgacaagttgatgacttttttgaaagttagaagagagaaagaagaaacaacaaagatttgataaatgcgatttcttttggttggttcgctttaaaaggaaattgtgttcgtacggagaccataaaaacccatcactctctcgttggatccaaatctattaatacacttttttttatatcaaaacttatggtgaagattcatgtcacgtctcaaaatctcctttggacccaaaacaaatatatcgaacgtgcggtttttcttttgtttattagattagagatttatcaaaatcaaaactattttgctttcaaaaagattggtttcacactttcaaaaagattggttccttaaatcgaacgtaccgttattttgttaacaataatagtcttgtgtagggttgatccgtattatgaactcgtaattaatgatgtatcaacagtaaagtaaaggtactttctacctaaattaggtccatgccatggtgccaatgaacttcacgttactagtctaactgtctaaggctaagctagccattttttttgtctattagtaatttcaaaaaaaaaaaaaacaggtgtttctgatatatttattttgaaatatcgaaattattacgactagaccgttaaatagattgatagtgaagcacttaacttaaaggcgtcatgaatcatgatgaaaaaaaatcataaatgatttacagaattgtaaattaagtggatagatactatagtatataaaaaaatgaatgggacatatgaaataaatttgagataagtttcttagtggtgtaatttgttgcaaaatttaatgatttttttcattcttctaaacaatatgcaattcttattcttatcttgtagttgttttaataatttgtgggagacaaattgtctcctcttttttttttttggattgaagaaattaaatgattattgaagtcattataaaataaaaaagaagagtattgggctcagttaaaacgggcttaaatataggcccataagttattcatagtaaacccaaacccaatggagaagagtaaaaaccaaatcactccatcagaattcacagccaatcctgttgttagagaaccattaccaatttcgatcgtcatcttcgtctccttcactcctagaaaacgttggaaccctaatcttcttagaaatttcaatcgaatctgaagaactagattacgggattaaagcgaggtagaatcgaagacgatggcagggagagaagttaaagaatacacaaatctgtctgaccctaaaggtgagacatttgattgaatatggttcattggttaatttcattctagggttctcgagaattccttttttgagctctgtttctttttctttctttcggggctcttttgttgcagataagaaatcagggaaaggtaagattgatgatgaagacgtcacctttcaacgaatggttgcaaaggttagcgcatcgtcctctccaatattcttaccgaatcttcttttgagcaatcttactgtgcacaaattgtatgcgagagaggttgtctttgtatatatcttagagtttgattggtcttttctgcagtatactacagtgatttgatgagtgtagtttgtatgctaaatgttattgattcgattaagctcttgtttcttttttttgcttagcgttggagcaagttgtggttttattgattgttttttttttgctgttgtagctagtgaagttgtttagatatatatatctttgttagcattagtggttattgatgtgtgtgaagtgattcttatgtttgactctatattgggactcgacttttctgataacttgccccggcagggataacggccccgccacattttctggttattgcatatagatgcaagaggttgctggtgaacgtggaggctatcttcatggacgaggcggtaccaatctctctctctctctttttttgtttttcgttcttcttttgtagttgtgtcatggccataattcttgagtttcttgtagctttagatagcgacgatttactttatctgaaagaacagatggaagcagaggaagatgcagaacgtcttctgagacgaactgagaaacgggcttttgctgcctttaaaatatcctttcttaaatgctcagatatcatgattttgagcactaagttatttgatatatacttgcctagatgtttttttgtaatctttcttgaccatatatcacaaagctgcaacccaagctgattcatctccagcatctattcccttgccacttcgtgtggagcccaaaccaaagagtggtatcaggtggaaaatcccttcctttccaccttattcacaccatgaattggattttcattcggtgaccaacttttgtgtgtgttttccaatgtctaggcagcaagatttgctgaggaaagttgtagaggttaaacctaaacgtccaaagatctcaacaccatcaagcccaagcttatctccccctgttagaagtgatagaggtccaacagaggcaaaagttcacagagataagcagaaagaagaagctatgccagtgttgaagaaacctggcgcagacagaaatgacggaaaagctacggaaagcaatgggcaaggtcaaaatgctccgaaaggcttgttgggattagcatatgatagttcagatgaagaagactgagtggagtgataaccctgcaatctcctataagtcttcttgctttttattttgtcgaaagcttacaagagtttagctttaggatacaatacatcttttgccatctagccctgtacttgttgtaattgttgaaaccaaatgggttagttggagtttgaactttgaagcagagaatctaaagaagatgatttccaaaagcatacggttgttagctgttgtgggttttactggagtgttgagttagagagtacttaactgagcaactttggagttaaaaacactatcatacaaatttggagttacaagagaatcacttggttttgtgctgattcttttacaccaaaaaaaaaggttttgtagtgaatatattcaatacatagagatctacaagggggtgaagattgttggttcattattgattcggaggatcactgtctcgtctgttcaactggattttgaagccattcactagacgagccgaagggaagaaggagatacgatcttccttaagttgtgtccacctaaaacaggcaataagaatgaatcagattttagttaatttagagtcttagacaaacatacttcagaagcataacatgtactgacttatatgtggtgatgaagtaatgcagaaagagagcaatttgaaggcgagccagttctgctcctgggcaaaaccgagttcctccaccaaatgggcaataaaaagggctcgttctccaattcctcttttgctgcattcacatcaatgaatgttaacctctagattgatacaaggtttaggaaattatgttacaatgtcaaacgaaaagtaaaacctgagtttcagggtcaagccatcgccatggattgaaggagagactttctttgtaatagctctcgtctaagtgcactgccgagagaaacggaactacgaagcatcccttgggaatgacataatctgcataagaaccgaaaaaagttgatttttagaccatgtatctgcctcaatatatgtaccaataatcaaagacgcaataacgtaccttgatatgagacatcttctttggcctctctcataagccatatcgcaattccaccaagcctgagtgtttcatctattacctgttgagaaatcaagaaagcatttagtgaaggtttatcatctaagatcagaagcagagtagtttcttgagcttcttaatttacttacgcattgagtgaagtccattgtcttgtaatcttgccatgttaacattccacccgcgagcctatcatgttcctcctgctcatttgcagaacgtttcagaagataaacacaacagagaagcaagaggaactaatttacttatcattcaagaggccttatatgtaccaggagttgggtcatggccttaggacaatgagtgaggaagtaaaccgcaaacagcattgtttttgaggttgtttcatttccggcaaacagtagattgatgataaaatctgccattgattcgtttggtaaactttcttcttcaagcaatcttccaagtacaccattaccagcagtatctgatgctgctttgttttgcaaccgcttttctatcgtcttgtttatcttccttatgatctcctttcgtgcctgaataagaaacaaacaaaatctcagcaaacaagctccaaagccacaaatcaataattgactcagatgtttgaaacttaccttcattgctttgttgtatgtgaaaccaggcaagtcaataggaacagagagacatccatcaacaaaatcagagaaaagctgagacatttcatcgacttctgattcgctcgacacaccgagaagttggttaaccataagatgaatggcaacctaaaacagaaccaaacaaagatcagaaatcaagaaaaatctccgaaaaggtttcttcttcttactcttcatattcaatcacttacctttctgcagatatcttggagaagcacgacttcaccgtccttgaaattactcagtgtctggagcataacgacgggaataacctcaagaaaatgagtcttgagctggtcatgacgcatcatgctcgatgcaatcgagtgaagccgtctctgctgatcaccatgcactgtgatcactccatctttcccaaccaaatccctgaaagactttggataacttgactgaaatagctttccttcgttctgcattataaaccggttaaaatccgggtctgctgataccactgcccatttcccaaacaagctacacgagaatatcctcccatacctaatttcattaaaaccactattatcaggcctcttgagtattaataacaaaacagagcatagcaaagagacgaacttttttatttgtttctcgacgaagcttgaaggatgagaaccagcgacggcgttgagccaagcgaaggtatctccgatcaaaggccatcctctgcttcccggaggcagcctgtgaggcgctcttctctttcttcttgctatacccgcaagtaagaagatgattatgaaggcaagaaatgtggttgatgaagaaacagagagaagcctataggattctcctgcagattccgccataaaatcaattaccctgtctcggtgtgtgtggagagttcgtggagagttttatatacagatttttacagctaagactgcataacaagtaagcagcaactgaggaaattttgaatttaaatatatatatatatatatatatatatatatatatatatatatatatatatatatataaaagaagaagtgataatgttaagcattataaaagagagatgagagagtcgtcgttgtagtgttgcgatgttgctttgacctcaagtagcctttttggttaacgtgacggtgaaggaatcatgagggtaaggtcaaactttatggagccactaaaacgagtcaagtgtggtttggagccgcctaatggctaataatgcttctgatagggctcgatatcataagcgtcgtgagccgcatcaaaaaccacgcgttttagacgcaaacgtggtctgtttcgagtttttaaatagttttattctccttgacttacagaccaaacttttttttttagtacagaaaatatgcgaagtatgcgtatgaaagaaatataagaaatgattattctaacacaattgacataaggagccagcagaagccagctaagacaatcttggcctctagggtaaagcctccgagtcagtcggagactcctgacttgttgctcaatcatcctgttacacgcttcagtgtttacacttcacaccaatgctataattattttattaggtggttttaagttgaagttattgtaaaccttgacatgtatcagactcatattttttgtggaccaaaaatttgataaccgtaacttaagggccgatctaatgaagcccaaaatctaaagtagagcgcactatggtcaactttgctagtgatgatatgagaatggatgttgtcaacgaaacggactaaaccatcatatcatatattggacaataatctactacacatcaaaagtaattagttggttcgccaatgattttcttttatgttttttttcgtccacaccattacgtactgccagttgtgaatggtaaacaaaaaccaaaagatggttcagtctacaaacagttttgttggtctatctgccacaaccattaaagccaaaataaaagtactataaattataatatattccagaaaataatgttctaactatgatttattatactctagaaaataaataaatagtttctgaaaaatgtgattaattaactaatagtatatagtattatattattatcataatggaaatcattgtaggacaagcactagtcaatgcaataatacatgtttattatttataatggcccacaaattattacagtttattttgtccgaaaatgaaagctttggcaaatttcacgttgcaaatgttgttaatcattatagaatcataactgtttaaccaaacaaaaatcattgtaggacaaaacactagttagttgatttacttgattggttctgcgtcttcctaatcctaggttaattgatattttattcaaataataaatgaaaaaaaactaaatatttagttaatttttctttgagtggaatctcagtctcaatcacagttcgatatgtgaaatctatcatttcccatcgacctatgtcataaaaactacgcaactaacataaccgagtaaatgtgtaataaatcgaagtattttacacaagatgtagctagtggcaagaacaagatgtgacgagcaagtatctcgaaaagaaagtaggagagacgcatggttccaaacctatttatgcgaatactccctgacatgttaaaaaagtttgtgcggcatgcaaatcaaatccatacatagctcatgcagactgatatatatcacatactttcggtattagcctattaggtatccatgtagataaactctcttatgtaatacacatctgaattctatacccttggtcccttgctatattttcggaaaaatgggtaaaacaaccttgaacttttctaaaaacatgtaaaaaatcttcacatttttttgtggaattttaaactctcacctttttaaagtggtaaaataacacctaatatcaataaaatcaatttaaaaacaaacattatactaatttaaataaataaataatcttgtttaagataatttttctagattctattttacaattgtttttttccaaattaaagttatttagttttagtataaacttaatatataaaaattcttatttcaaatctatttgagacataggaaacagtttcgttatcattaaaatcttttgttatgtaaacaatttaaatttattttcttggacaattggtcatatttaatataatagattcaaactatacccaaatttattttgggtcaagtttaggtttgatttatctgctagatataaatatgtattttgtgttgtatatgatatatttttattaaatttataaaaaaggaaattaacaattaatcaaattttaggtgaacgtgaaaccaaactaattttgtaacatggagcgatatagaaatttttataccaaattgaatataaatatatgtttataatttttttttttgatttgactactcaagtttagaaaaaaattatgtttataatttaagtcattttaaattcataacttgaaaagttagaattcaagttagaacaaattcaaacaaaaaataaacagaatgggctaatctataaatgtttatagtttacgtaataatttttaatggcaatgaaactaattaatttttatagcataaaaatcaaattttagaaagaaaaattgcaaactaaaatttgaaaaagtaaatttcaaactaagtttgtttattgtttatttgttaatattaggtgttattttaccatttttaaaaaagttagggtttaaaacttcaaacaaaaaaatgaggttttttttacatgtatttggaaaagatgagaattttattacccttttttcctatattttctctatttcctaacactcgttacagcaataatccatgctgattgtttataaatatttataatttgtcggaaaatgacagctatggcaaatttcacgttataaaactattttttttttttttttgataattgataatataaacttatagttaaatcattaaagagtaacattagcaaaaaaaggttactagaggataaattaacactaggtactgcattctgattggcagtgtgtctccacatgataaaggagttgggaaaatactaaggatataaaaacaaacaatcaaatttgttaatttcttcataggaaatgggttataaaaattaaaagtgaaaacaatttttttttatttttttacctaagtgatgatttgttatcaataccttttaaaatcatcatattgtagcaggctagcagccagtgctttctatataaagaatcaaatatactctgtgactaattacatcaaacacatcaagcaaagtaacaaattccataaacacaattagctaaaagaaagaaacaatcatgaaggccaccatatccatcactaccatctttctcgtggtcgctttggccgcaccctccctagctcgtcctgacaaccatgtcgaggactctgtaggccgtctacttcgtcctggtcaaacgtaccacatcgtacctgcgaatcccgagacaggaggaggtattttctcgaacagtgaagaaatctgtcctcttgacatcttccagtcaaacaatccgcttgacttgggcctacccatcaaatttaagtccgagttatggtttgttaaggaaatgaatagtatcaccatcgagtttgaggctccgaactggtttttgtgtcctaaagaatccaaggggtggagagttgtgtactctgaagaattcaaaaagagtcttataataagcactggtggttcatcaaacccaagtggcttccagatccatcgagtcgacggaggtgcttacaagattgtatattgtacaaacatctcgactactacgtgcatgaacgttggcatattcaccgatatctctggtgcacgacgcttagccttgaccagcgatgaggctctcctagttaagttccagaaggcagcaactccaaaagctgatttgaagactaagctgaggatgttccctttctactgattcacaactcttgtaccaagaaaaagtgtcaaaaatatggcctcttgaataatggttgagacaataccaaccacttgtgattagtttgtgtgttttttctggtatgatcagtgtgtcactgtcatgtgttttttgctttgtttaaggattatgcttgtgtataaatgaattatataaaacccgctttgtgtttatggatttgggagatatgtatactagagcggacgacatattattctttcggtctcgcaacaactttgtaaaatttgaccaattaaaaagtgcttaaataattaaccctaaataaatctgttgactaaaaaacaattactcctaaattaacgactttgattaagttactaccagtttcatatatatctatataactaccactttctccttgcaaatttggttgtataaatttcactcaaatgtcaacttttcacgaattgcttataatgttaaatttacttttcttactgtgtctatcaactgcgttcacgtaggaatgtttgtaaagttgtttttctacgatgattttaaatataataattgaccagtaatttaagatttaaacgataattgtttccttggaaaatatctactaaattacaaaaatttcgttacacaaagattttgggaggccaaaaattaaacgtgcgtaaatgagagcgaatattccttcttgatggatgataaagacataaagaacgatacaaacttcaaatattgtttggttacaaaaattttcaattgttagcatttatttttgttacataaatttacatatgataagctatccagtatccacacaccacgaaacaattttcaaactatggagaagcttactttgtctttcatcactctcaccgttctctcagccatcttcaccgcagcttcagcggccgatgctacaccaagccaagtagtcctagacatagctggacatccggttcagtccaatgtccaatactacatcataccggccaagatcggaaccggaggtggtcttatcccttcaaaccgaaatttaagcacacaagacttgtgtctgaatcttgacattgtccaatcatcatctcctttcgtctcaggccttcccgtaacattctccccactaaacaccaaagtcaagcatgttcagctctcagctagtctcaacctcgagtttgattccacggtttggttatgccctgactccaaagtgtggagaatcgaccactctgtacaactaagaaagagctttgtaagcattggtggtcagaaaggtaagggtaatagttggtttcagattcaagaagatggagatgcttacaagcttatgtattgtcctattagctccattgttgcgtgtattaatgtgagtttggagattgatgatcatggagttcgacgtttggttcttagcactgatcagtctttcgttgttaagtttcagaaggcttatgattcaaactccaactgtaatcttaagtctaactcgagaatgttcctttttctctaagtgttaaattttggtaaattgttatgcttgagagttgagacaatgccaagtttgtgatgtaaccaacggtttctatgaaataaaacgtagttattgtgtgttttataatctaatgaattatcttaacacttaagtaacaactaacaatgtactatactactatgaataacctagaaaataattctttgtgggttaattaatattttataaaatgttggggtaatttagagaaaacatggaaatatatactatttattgataactccaaaactatgctatatttcactttggtgcccctcgtttgtgagagtatgtttggtccgtcgatgcacatggaagcagcagagatagtccattcggcggcgcgttttgaagctgagaaaatgggcaaggaggatgaggcggtggaggagatacgacgtatgagtggttacggcggagatgtgatagtagtaggtgggtttccggcgtcggagtcggaatctgaatctgaatccgatttggcggcggcggagattatggttatatgggctattcaagggccaacttcttttgctccaaacacactcgttgctcaatcttctcttgagctgcgtctcgacgcttgtggccactcactctctattctccagtcgccatgttcattggtaactccttagcttctctgtttcagtgtcaaatttctcgcttttagggtttattgcaatcaagtttgcgtctttcggatccttaacgagtttgtgtatatgtgtcttgcggctatcatcaaacctacattgggatgttgttagaacatgtttactgatacattcagcttttgttaagtggatttagcttaacattgaagaaagtgataaactttgattcttcttgggttgaacatgaagcgtgttagaactatctgatggttgtttgtttttgtactgtgaagaacacgcctggagtaaccgggtcagtgatgtgggacagtggagtggtgctagggaagttcttagaacattctgttgactctaaggttctttctcttgaaggcaagaaaatcgtcgagttgggttctggctgtggcttagttgggtgagcaaaaaccgctgatatttctcttctgagaattactattaacgtgtaaaacatttagttagtttcttctttcagttgtatagcagcacttttgggaggcaatgctgtcctcactgatcttccagatagactgaggctactcaaaaagaacatccaaaccaatttgcaccgtgggaacacgcgtggatctgctattgtgcaggaacttgtttggggagatgaccctgatccagatttgatcgaaccattccctgattacggtaatcatctcggtttcattttttctccttttgccttgtacataccattctcacaccttttatttgctatgtacttgtagtattaggctcagatgttatatacagcgaagaagctgttcaccatttggtaaaaacgcttttgcaactttgcagcgatcaaactacaatcttcctatcaggagaactacgaaatggttaatcattttctttttgtggttttcaatcatcttatataacaagaacacaatgtctaattttgcttgctcgttctttctgtcagatgctgttcttgagtacttcttagaaaccgcactgaaagattttgcgatcgggcgtgtggaacaaacacaatggcatccagattatcgcagccatcgagtagtgctttacgttcttgaaaagaagtcgaagagatgcctcgctgatgaatcttcgcttaatcaatcttgttagccattgaggtattgtttgtttacacttgacaactgaagtagatggccctaagcgggaagtatagttctggcctgatccttccttgcatatttgcatacatctagcttatagagtgttacagatatactaatttttattttaaccttgttttaaagtgatcttgaagaatatctaagaaacaaatgtactcttcttctttacgtttaacttttttttgctgttgtaaaaaatggattcagatcattgaagatatctggtctgcgttttaagtcagacacaattatagagcaaaattaaaattttatgtattgtttctcactaaaatgtttaaattaaaatataggaataattgtctttttatgatcgcgtgaagtgaggacgattgtttagtaattttatacaaggttgcgacattttaatattttgatccattaaaaaaatataccaaaaccgaaagataagagagttttgatagacgacttttttgtgtataaaagatgcagtaattgttgtccttaatgacattgctaatcagaaactgaaataggaaatggcaaacaacaacgtttactctgttctgaagtcgctgcttctgcttcttcaccttgtattcttgagtaagcaacatgttgactctgcctcaatcgtcaaattccttcctggttttgaaggccctcttccctttgagctcgaaaccgggtttgttttcaatctcttcgtttaattaaattggtgttcttagtttggagataatttaaaatccgtcagatactgtttcttgtgaatgaaggtatattggtgttggtgaggaagaggaggtgcaactgttctactacttcatcaagtctgagaggaacccaaaagaagaccctcttcttctctggctaactggaggacctggctgctctgccatctctggccttctttatcagaatggtgagatcgaaaacatggataaactccttcttctgcgtctctggttactgtctgtaaccctatatatgtaaaatataaccagggcctctggctatgaagctcgatgtttacaatggaactctcccttctttggtctctactacatattcttggacaaaggtaatacaaaaaagtgtgtagtcttgatataaccatcagcaaaacccaatgatcatttcttgatcacttctctcagacttcgagcatgatattcttggaccagcccgttggaactggcttctcctattcaagaacgcaactttttaataaacctagtgatacaggagaagccaaacggatccatgagtttcttcaaaaggtaaaataatgacaaacttaattgtctcttgaagccaaacggttcttagtaggagccttttcctattgttgttgtttgtgcagtggctaggcaagcatcaagagttttcctccaaccctttctatgttggcggagattcctattccggtctggttgttccagctaccgttcaagaaatttcaaaaggtatatgtatgttttatgatatcaatcccctaagcccttttctcaaataccattattgtaacagaagaaacatgatggtgatgcaggaaattgtcaatgctgcaatcgtccaataaatcttcagggctatgtgctcggtaacccgttaacagactgtgtatatgattgtaactaccgcgttccatttgctcataaaatggcactgatctctgatgaactctacgaggtatatacgatgacattttgttttttttcttgtcctcacaatgaaaagctgttcaaaaacactatgttgttcccagtcgttgaagagaacctgcagaggagaatatgtaaatgttcatccacatgacacagaatgcttgaaattcgttgaagaatttaacaaggttaaacactagagctgatttcgtgttgtggatctgccttaaattaataaataaagattcatcactaaattcagaccttgtgtggttatttttatagttaacaaacagagtatgcgaacgacatatattacattcatgttgcgaaactgaaactccaagttgctatgtaagtaatccatatatcttgccctctcttatctgttaaaccctttgagaatatatctatcatacacggttgcttttgcagtcttataggtttatgctaactacctactgggccaatgacgaaaccgtacgcaaagctcttcaaatcaataaggtaataatttattttaaggttcttggtaaaagcacagtgtcattattataggaggatctacgattgcaggagagtataggggaatggacacgatgttatcgcggtattccttacaatcatgacattaaaagtagcgtaccttaccatatgaataacagcatcgatggttatcgttctctcatctacaggtcagagtttataacccttttgctgatcttttgtccctatcaagattcaagactattgttaaactgtaaggtttttggtgcatagtggtgatcatgatatccaagtacctttccttgggactcaagcttggataagatcgctcaactattctatcattgatgactggaggccatggatgatcaaagatcaaatcgctgggtatatacgggtttttttttttttaaaacgggttctcttattcttttgttttatgagattcgctttgaagtttattcttgatacttaactggcagatacacaacgagttatgtcaataaaatgacatttgctactgtcacagtaaatctttcttcttcttttttttttttttttttttttttttttttttttttaattttcttttaatccatctgccatttttattaacttgtattgagttgtgggtgttgattatagggaggtgggcacacagcagagtttacaccaaaggaaacctttatgatgttccaaaggtggatcaatggccaacctctgtgaaagaagagagtgacttttacgtacaacggacaagagattgtgtgtgattctagtaacacattttccaaatcaatgctgcctctcggcccaagtttctcatagagacaaatcaaaatgatgtggattcatcatttctaacatcgactctatgaaactgctttagctatttctcgatatttcagttgtttcttccagatacaagtgaggttcctttaataaacaatggtgaaggaaaatcgcagattttaaaagttttaacgaataccaaagtagtaaatcgaatgtctaacacgttaagctt

SEQ ID NO: 1247 - DNA, 108387 bp, Arabidopsis thaliana
gaattctcacacctatcaatcaatctcactacaggaaacgaattttactcgcgaatctccttcagaggtatggtttccctccttcttctcttcagcacttcctctcaagaaacaatcacctattgaattcggacttagtagaaaccgaaatttctctcggcatcctattgtcattgaaaatccctcagaaatcactcgtttcgttgatttccgattgccctaatgttctgcgatcagagtttctgaggaaatggagagttcctctgtctaattgcggtaaacacggtgtcgtctcatcttctgcgattaagagcgtccttgaacattctagtagaattgggattggtccagataagtttaatgagtgcgtaagggttttgaagagtttagggttttgtgatagtactgtgagtaggattttaagttcattccctggtgttcttttagtgaatgagattgaaattcgtaggaagattgagtttttagttggaattggcattgctcgagataacattgagaggttctttcacgtttttcctgaagttctagggattggtactgagactagacttaagccattgcttgatgagttcatgaagatggggtttagtaaggatgatgtaaagaaagagattgctagagaacgagagttcttggtttggagttaggtgagcttccgcggtgtttggagttgatcaacacattgaaatgccgggaagtgattagagttagtataatcagcgaaggagcatttcgtgctgggtttgaagtgaagctcagagttgattgtttatgcaaatacgggttgattcgtagagatgcattcaaggttgtatggaaagagccgagggtgatcttatatgagatagaggatatagagaagaagattgagtttttaactaacagaatgggatttcatatcaattgtttagctgatgtaccggagtatctaggggttaatcttcagaagcagatcgttccacggtacaatgtcattgattacttgaaactaaaaggtgggcttggctgtgatattggattgaaaggtttgatcaaaccaagcatgaaaagattttataatttgtacgtgatgccatacccagagtgtgaaagaatctttggaaagagaaaagagaatgtccgagtgaataaacgacatcccgcagggctttggaagcttatgaagccgcctagcaatctaacaacaaaagaagatgtgcagaacatgaagtcctttatagagtcacttgcttagtatgttggatcttggacttgcctcttactagattgaaagagatcggccactctctagagggttcttgctccctcactttgctatgagctgctctgaattgatatgggttatcaggaactttcagtgactatcgaatctgatctcaactcgctcgagttcatggcttgattattcaaaggacaatgcatactcctgaataagccatgctcacttctcgttgtgcatcttgggaagacatctaccaatgccattgccttcgtttccatgtctctgcctgatagatttgctgagcaaatgtaattggactttggttctaaaaagtcaagtgccatgttccaacttccaactgtaactactagttagggatgttacgtgggccgagccaggccggctagtagcccgttttggcaacttttatgctaggccgattcatctgttccgtgatccatcccagacaaaccatttgtttttggcatttataccaaaaatatttgtttccaacaattttttttcttaaacattattttcaaatgttttacgtaaaagctctgttaacaagaaacttagatttatgtatggaagaattggttatacatgagtcagtaagtcatgaaatctgtataatgggaagaagttaatcagttaaatcttatttattccaagagggtgattggagaaaaaaagaagaagaagagagttattggtaactagtgttatttatgtattaatgaagaagagagttattggtgttatatatgtattaatcaatcacaaattgtactactagttaattatgtaagtaaaatcaattgaaatgcaatattaaatttccatgaagattttaattatagagaaaattaaacttttctatacatagatagattacatggttcaataaaaattattgtgaataacaagaagtatttaaaaaacgaaacttatactctaaaaaaaaaaaaaaaaaaaagaccaagtgttaaaaggcttgtaatgtaagaagcgacagttggtcaaataacatctttgacttggtcaacgtattttaacaacggttttctgttagaaatggactaatagtattaacttacaaaagacacacccgatttgtgagttgtgacatttgctttgtccttaagtatcaccacaagccagcttatattgtctctatagttagacaacctttgaccttattatacatacgtatatatggagcttttttttcaatttcatatggcatatatttgtgtcactgtgtgtgtggtatcaatgttcaagggagacagttttgtggttaacgaggtcgatgctttgtttggtccataccctgcatcgtccatggccaccatattactatgtttcgtgacgtaattgatgatatgtatatcaaatttcaactcaaactagttgaatatgaatgatgcaattatgcacattgatttacaggccagcgctggatttaatatccattgagcaagttatgagaaaacagtggtcaattagtcaattaccattaagttcttttgaagagtccaatatggaacaagatcaaacaaattatgagactacaaagacttatgagtttataaccaactgaattaaatttctataaacagactcttccctcttgcacctacttcatcttctttctcttactatgtttcttcaatagtcttgtaactgataatatatgaccattgaatgtaaatcaaacctctgtgtaagttgatttatatcagtttctgtctataaactagactatataatataagccatcccccggacggttttacttttagaatttattaaaatagtagtataagttcgcatgaaggaccgacactgtcgagtcatgtgcgttttaaagagacaatgaggaaacagtgacttttttgttgggtcaaagggaagcaaatccatcttgttggttaacgattccattattaattttggtggattcccaatggaatatctaggtagaaatcatacagtatttacgggcaaatttgaattcaagtattgaaaattctgctcattatcccatccatgatccatttcttttaaaattagaaactacagtaaagcactatgtagtcttacacacgtggtatcgaatgagcgagatatggctgagtacatttttcattgatttatgagatggtcggaagtcggaacacacaataatatcgtactcgaccgtgttgacctatatgttactatgtacatcaaaatagtcatgtacatatatgctagtttaagctgtagcctttttttacttcctaaacgtccaaataggtagccaaccctatataactctttcacatttcagtcgaatcatattctaaaatttaaccgaccatattgtatatcttcctccttccaccggtaactgactttcccttgcgcgaaaaaggatattattctctaccagttcgcgatatacattctaatatttgattcgttcttaattacatgcattatcgattaaaaagtatcagaacaactaacgatcatcattatctagtcctcggaaaaatattaaagaatatctggtccgacattgctagatccacttgactgcgagcgtatcggtgtccgtaagatttattgactaggtggtataggaattggtagtaaataaatgaatattttttcttatgcatatatctttatatttatatacagtctatgtttttaagttctaacttattcatctgatctgctgatctcttattagatatgttttaacaaaaaaaatctcttattagagtatgaggtttctttaatatgttttttcctctagttaaatgaatagaacaaaatggaaattatattttagttagttcaccgaatctcttatttaatagaggaattggtttctatcttttgttctttctcgtcattggaataaactgaatgatttattttgtttttgtttcaatataagttatataacttctaacattcagtaagaactatatatattctaatttatttacatgaaaataatatacttagttttaaactcctattattaagatttttggtcatgatgaaacattcctttgatttagtgacttctatcacacagcctttttctctctttgggaatttttggtatacgttcgaagaaatatgttccgtacgtagacgataatctaaatgttgtagaaaagtaacgaagaatgattacgtgataacaattgttattgaacttttaatataacaaattattggtacattcattaagcactttctaaaaaatatggagcctgtaggtatacaatggcttcactcggatgtcatgtaaaccaaatcatgtataaaccatgcaaaaaggggtaaatccatcaaattagaatgaagaaaagcggtgcgatgtcttgaccatggttaaagggtacctaactggactttctatctaatccatctaaccctagttaaaatcctccactatataaattacattctcatgcactgtcccaatcatcaccaactgtttcttctcttatgctctcactagctaactaaaaatccataatttcttcttcaagaaaatgactattgatatgtatctttccttcgcttctcgttctggatcttctccatttccaagtctcgagctttgtctcagcattttcctcttcatctcccttttcgttttctggttgactccaggtggctttgcttgggcactctacaaagctcgtttccatacccgacctgagtccaaaaccggacctgccattcccggcccgtctggtctccccatctttggcctcctcttggcttttgtcaacaacgccttaacacacagaatcctcgccaatattgctgacacttgcaaagcaaaagctctcatggcgttctccgtagggtcaacccggtttgttataaccagcgaaccagagaccgcgaaagagcttctaaacagctctgcttttgcagaccggccagtgaaagagtctgcttacgagctgctctttgatagagccatggggtttgctccctttggtgattactggagagagttgaggagaatctcttctacccatctcttcagccctaagaggatcttcagttctggcgagtcccgccgaaaaatcgggcaaaacatggtaggagagatcaagaacgcaatggagtgttatggagaagtgcatataaaaaagatcttgcatttcggatcactcaacaacgtgatgtctagcgttttcggtaaaacatacaacttcaacgaaggtattgtctactcgaaagagagcaatgagttggagcatttggtgtctgaaggctatgagctgctcggaatcttcaactggagtgatcatttccctggaatgagatggttagatttacaaggtgtgaggagaagatgtcgtagtttggtcggtagagtgaatgtgttcgtcggtaagataatcaatgaccacaaatcaaagaggtcacttcgtgataatcctgaagagagcacttatgatgatgactttgtagatgtcttacttggcatgcacggcaacagcaaactttctgactccgatatgatcgcagtcctttgggtaaccacaagtacttacatgtatacacgtgggttaaggagtaaataagtaaataacataatttaaacatttttttgttgttgtataggaaatgatttttaggggaacagacacggtggcgattctcttggaatggatccttgcgaggatggttcttcaccctgacattcaagccaaggcgcaggccgagatcgattgtatcgtgggtgactcgggacgtcaagtcacagactcagacctccccaagctcccatacgttcgtgccattgtcaaggaaaccctaaggatgcacccacctggtcctctcctctcatgggctcgtctctccattcacgatactcagatcgggactcactttatacccgcaggaaccactgcgatggttaacatgtgggctataacccacgatgaaaaggtctggccggaagctcatgagtataaaccagagaggtttcttggtgcgcaagaaagtaataacttccccatcatgggatctgatctgaggcttgctcccttcggtgctggacgtagggtctgtcccggcaagtcaatgggtctagccaccgtggagctatggctagctcagttgctaggaagctataagtgggtctcatgtggtgaagtggatttgagtgagactttgaagctatctttggagatgaagaacactcttgtctgcaaggcaatccctaggggttaagtagggtttcacagactatcaaattatgcaactttgtttatctctctgggttgtctgactgcccatgtgagatttcctaattagtgatttttttttttctgtcacctccacatctaaatgattagtatactaaaacttgtaccggatttgatatacaaaagtcaaattaataaagttccatttctgaaattttaatttatgctaatcaatgtattttatttactcttaatacataattttataatagcagttatttatttttatatatataacagatagacatattaaattgttgataattgcaactaaaattcaaatctaaatactatgggtccgtccatctttgttgtggaaaaatgtctaaaaccttttatgcggccatggagtcacagtcacaactaaacttgtgtgctatatatgtgacaaaccggatcccaagattatatgtttgatgtaataatattttttgctatgcaatgtgtaaattgcacactcctaaaataatctcaacgaaggggttacatgtagacatatatgggcttttctaatggacaggactgcataggcctctgacattccataatagataggagccttttctttcttttttgttttggcaaagaagtggagccttttctaattagtaaataaagtgtacaaggggcttggaagctgcagggaaattcagcaacggcctagagataaacgtggaccgaacacaataacgtagccaaaccaaccaagcctctctctacctgctaatttccatttctaaaacgtgatttttttagtaccaacaaccacttcttctctacttacaaattttttttcatacaatcacttgcttaccttaattttttttttttttgttaaagtcttgtaaataaatctaaaatctacttcctagtgttatatagagttttcaatataacttgctaataaaaatgaaattcaattttaccaactaaattcaataattttacattggtttgttcaactgatgcgacccttatcgagccatcatcatcacctacctaaatctttcttcctattataaaacccattttctcatctctcaagaatctcaatcccatcttccacaactctaacaaaccttcccgattcatcctctttgactcccttcactcgatctcatccgcaatggaatcaaagacaacccaaaacggatccgaagtcgtcgaactcacagagttcgagaaaacccagaagaagtatcaagatttcatcgctacacttccaaagagcaaaggctggagaccagatgagatcttaacccaatacggtggacactggtggcaagaatgtctcctcgaaggtctttttcacgctaaagaccatttcgaagcacgaccaactgatttcctcgtctgtagctacccaaaaaccggtacaacttggctcaaagcactaacttacgcaatcgtcaatcgttctcgttacgacgacgccgcaaacccactcctcaaacgaaaccctcacgagtttgtcccttacgttgagatcgacttcgcgttttaccccaccgttgatgttcttcaagacagaaagaacccacttttctctactcatatcccaaacgggttattacccgattcgattgtgaactctggttgtaagatggtgtacatatggagagacccgaaagatactttcatctccatgtggactttcttacacaaggagaagtctcaagaaggtcaattagcgagtcttgaggacagctttgatatgttttgtaaaggtttatctgtgtatggtccttatctggatcatgttttgggttattggaaagcttaccaagagaatccagataggattttgttccttaggtacgagaccatgagggccaatcctttgccttttgtgaagagattggctgagttcatgggttatggattcactgatgaggaagaggagaatggtgttgctgagaaagtggtgaagctttgtagctttgagacgttgaagaatcttgaagctaacaaaggtgataaagaaagagaggatcgtcctgctgtttatgcgaatagcgcgtattttaggaaaggaaaggttggagattgggctaattatttgactcctgagatggctgctcgtattgatggcttagtggaggagaaattcaaagatactggcttgcttcaacatgataactgaatgtgttttattctggtccttctgttatttggtgcggcgaaacagaggatgctctgttttgctttgtttggttctgtattctcattattgtctgtatcatcttatttacaacaagagaaagatatttcgatttatgatcctaaatgcttgatttaatacctatccgaaaacattggatttaatcacagaagaaaaagagaatcaaaggagttgactctgcatacattaggcaaagatgaatgatgttaaacaaaggcattgcaaagccaattccgtttatagaaccaatgcatttggatagaaacacaagcaacatttattcttccactatataacttaatacattttggagccatactaacataagaagcaaacttatgttgtaaacaaagcatataaagatcagtcattgctcggaacaagagttagtcattcatttaccatgttcaagcaagccggtgcccttaaatttctcttccattaacccatctatacgagcagccatctccggagtcagatagttcgaccaatctcccacctttcctttcctgaaatacgcgctattcgcgtaaacaccaggacgatcctctctgtctttctcccctttgttagcttcaagattcttcaacgtctcgaagctgcaaagattcaccactttctcaacaacacctttctcctcttcctcggctgtgaatccatgacccataaactcagccagactcttcacgtacggtaaaggatcagctctcatcgtctcgtacttgaggaacaagatcctatctggattctcttggtatgctttccaatacgccaggatatgattaagataaggaccatacccagacagaccacgacagaacatatcaaaagactcctcaagattgctgacaggtccaagctctgtcctttccttgtgaaggaaagtccacatggagatgaaagtgtcctttggttctctccatatgtaaaccatcttacaaccggatttcacaaccgaatcaggtaataactcgtatgggatatgagtcgaaaacagagtgttccctttgtctttgagaacatcaacttcagggaagaaagggaaatctatctcaatgtaaggaacaaactcgtgagggttacgtttcaggagagggttggaggaatcatcgaagcgggaacgatttgcgatggcgaaagtcagggctttgagccaagtggtgcctgtctttgggtagctacagacgaggaagtcactgggtcgtgcttgaaagaactcttgcgcgtgaatacaaccttcgaggagagacggtagccaccagtaaccaccatactcgatcaggggctctttcggtctccagcctttctcgtgaggaaacgtggagatgaggtcttgataccgtttttgatttttctcgaactctgttgattctgtcttggtctcgtcgtgactcggtagggtcgtggtcgtgatcgtagccttggcggttagggtttctgattccattgaagattagaaagagaatttgaaagaattgtgctgagttctgtaggaaatgagtgatgatggtctgtgtttggacaaagatcagattggctttagtaatgcagctatttttacccacgtgttaatatgtgattcgcaggttgttggtttggtgtgcacatgcttaaagtagaaaacgcactcagagacagagagtttataacttaaatactatatgatttgttaatctataaaaaattggccaaaaggtaggctcttatctgtaatctattcaactataaactacactcttcacttgcagaaatctgaatctgctgctgttataaggtctacaatttaatgtacaagattcaacctgattaagtaagtatctagatatctattttcgtaatgacttgatgaagaaaacaaactcttcaagtgctttaagctgtgatacaatcttgcaaataagaatggctcgagtgtacctgtcccagtaaggtttttacttcccgaggttgttgtcaacgggtctagttgagtttatgttctcatccactagctcctgaagagacggctctgttaaccagtttgatgtcagctcgaccaccgagcactctagggtctttggtatggccttagcaacagattgtccaaacaatgtggtctgaacggtaaggttcttgatgtgagatttcatggtcatcattgtggtggctaggttgtagtggttccttgaagagtagagctgataagccgatagttacaggctgagcttccgctaacgttatatgtcatcttttgattgcagcttttgagagcagaagcggcaatttctgatttttgtgttattgagcagaagctaaacgaagattactgtgttctttggtcatagaaacataagttttggcaagtgtcatctaacattgtcaggagtacgcggaagcgcttgttgccttctcagtgaaatttgtacggtcatatgatgccttctcaactattgcgtctccttcctattaaatataagaagatgagagtaagtcctctaaagaaacagacatgaaaataatagtaatgttttctatagtgattatcaaatgatacaaatgtgcaaatgaggatggggagacaatataactgggaactagttcaagcaattggaactccactgtcctaactagcaaaacagagctaaatagcttaataccaaatgagagtaaggtgcatttagagtttcttatcagacctggtaaagtatattcactcctctggaaaatccacacacaacatcaggaaatttctacctaaaccaaacccgaaattaaggcacaatgataatcaatacacagaccactggagggatctaacatgccacacagacccaaaaaaaacaatgtgaacaaaaaagtatcatttcaatggacttttcattctaagcaattcatgaagaacctatggagtctgacggtttcagaggtagagctaggaacaaagaagacatgaagtgtcctcaatttcttcgtccttggacaacaatcacagcaggttactgttcgttggtgactaaaaaaatgtcacttttattaaagtctgaaacttttatagttttctgatcttgttctgatggctaagggctaataaaaatcctataaacatgcagtgataagtcttaggtatcacaatttgttgttttccccttcacgaaattccacaacgaatgatcaaagctaaacactagtctaagcatcaatcgaagcatgcgattttaactaggagtgagagggaacgagagaaatacaacttacaagtaggatcttgctgggattaatcgagagatggaggagagactagagagtgacatgtgatgttgccctggattccttccacttgactcttgactcgagtatccatccttcagtttctcatttttctttatttgctggtcttagcccatattggttgggcccattggaccattaatgtgggagtgcttgtgaagttcggagccttcagtttttctctgtttttgacaaaaatatccacaatattaattattaaagtctccatatctttattttattttatcttttttaatatatccccggaaaaacaaactaaacgtacaataattattttactttcatatatttttagaagaatctgaactatatcatacatctagggatgtaaaaatgggtaacccaactcaactcaaaatcaaatgagtttagagttaaatgagttatgggttgatccaactcatttaatttatttgatgggttgagttgttaaatgggttaacccattttaaatattattataaacaataataaataattatcattagtaattcattatcatcaaattaaggttatttacggattccactttttacgggtttacgtttttggcgggaaaatcacggatttacgtttttggcgggaaaattataggtttacgtttttggcgggaaaattacgggttgatgtttttggcgggaaaattacgggcttacgtttttggcgggaaaatctcgggtttacgtttttggcgggaaaattacgagtttacgttttttgcggaaaaatctcgggtttacgttgttggcggggaaatcatgggtttatgattttggcggaaaaattacgggtttacgtttttggcgggaaaattacaggtttacgtttttggcgggaaaatcacgggtttacgtttttggcgggaaaatcacgggtttacgtttttggcagaaaaatcacgggtttatgtttttggcggaaaaatcacggatttacgtttttggcgggaaaattacgggtttacgtttttggcaaaaaaattatggatttacgttattggcgggaaaatctcgggtttacgtttttggcgggaaaatcacgggtttacgtttttggcggaaaaatcacgggtttacgtttttggcggaaaaatcacggttttatgtttttttgtggaaaaattacgagtttactttttctcaatttcatcgcttgtatatttaagatatttggaaaaatattaattttattaaattggtttagatgtgttggttaaacttaaattggcattggtttagagattttagttggtttaatttagttttacaaaacttgatgggttaattgggtaacccattgaaatcattaaccattacaacccaacttattttactcatcaaaccaaatgactcatcaactcatttgatccatcaactcatttgagtcaaaaatttcaactcattagagttcatgaattgagttgagttgagttgacgcatgaattttgaccaatttttacacccctacatacatcttatttattttgggaattaagaaaattacatgttgcatattgatgtgggtgtgataacgagtcattgagtagaattaatggtagtctatgggcctatggcgatggcacgtgtttgtgtgagactgttgactatttcaatgatccatgacgtaaattccaacttaacattttgcataatggactcaacaacatttgcataattatttactaactttcaactttggctccttccacttgtcattttacgggattatttgaaaagctggttttttttggtacaattaacaaatagagttatacttattcccacaagatatctttgattcttaatttctccctccataatcaatcataatggaatactataagtgtaaacattaataaacaacaaaacgtgatttggtttttaaaaagtgaaatcacatctcatgtcctatgctactcagcaccttcctcgacaaaagtggttctatttcttcttgtatcttttgtcgcagttgattacaaacaacattgttcacttaaatgtattagatttggtgaagtagagagatctctttatggattttcaactactatgcccatacaatgatgtcgatgtttcattctttcagagagttatgcacacatgtttattaattagggagcccatatgatacagattgttttgtataaatgatggacctaacgtgtaactggcagatcaatttgtatgttgtagtcgaatcttctaattccctcaacaactcttctcgtaatgaacactgtcgtacatggttgatgaatcaatttttttgaacatggatttccacaaagcaatttttaatttatctttgcatgtaatgtaagaaactattttaaccttaactaaacaaaaaaaaaagacacaattttcaaaaaaaatctttaaaggaataaaactgcggcagcttccgactctcgaatgtaatcatcgtataagcggctgtaggaacccgtacgtttacaagttcaatgctatatgaagcaaattatttatggtttatgtatatgtaccataaatattatcaataaatggttttggcttctaaagatgattggtatacatgatcaaacaccactagttggtcaaaccaatcaggcaatcaattcggaaaaaagttttgagtatattttataccttcattcgtttccacgaagccaccgaaccatgctctagataagatttgtacttatatccaatgtttaatttagattgtgggaattatagtagaatttctttttcgattagtcgaaagtttaaatagccacgctaattatatattcgacgttgtgttgaactgtattgcaaagatttgcctaaacgtttttcgttcgacatgagtagttaggttaatgtgggggggggggggggttcaaaccagacgtgaatcgtgatgatagacaaaacattatctcaaaaattagatttgtctatgctcaattcaaaaattagatgaacgttactgatggataaagtttgtccttttgaatcagtattccgtttccgtaacatagacattccacctatactcatgacatgcatcaaatgagacacatcaaatgataatgatactgtatatattgcggctcgacggtatatttgcatctattaacatgcatgcacaaacatatcatggtcaacatgtgctctcggaaaatgtccttttagtaattaaacatattttgagatatatttattattacttaacttttttttaatagaaaatgttttaaaaaaatatacaaatctgcctaatgttgtttgtgatttctaatatatatgcagatttcataatttaattaattaagtggaacagttgaatcaataattaagacaaacagaaaagtggaaccgaaaagataatctttttatatagtatatatcagttattatcatgtaactcacctgcttgttgtggcggttagcttagcttgtccactcgtgagccatcaaaccaatagttgaacaatattatacgtacgaaaccaacaaaaatagtaattatgataatctgaatgttgataaatgaacataatatttgtgaattaattttttctttgtctcagattcagtattctaaagttttatcaattttagtttcttatgaagctaacaacgtcaaaattcacaaacggtcgaaacacactacacacacaaactaaaaacaccatagcaaatcaaactctaattgatttacatgccaaatgcaaattttcatcatcatcaatataactcatccaaaataattgtcaatcccttcacaggagtcatcaacttcattgatcggcgtcacgtagctatcattaaacgacgtcgtctcgattttatcctcttgaaagatcattgtaatttccctcatgaatgaagtattctccaaacaagactcaacggacatcaataaatcttcatgagataaaacatgactcaaacatcttgatgaaaatctcgtcatatcttcaatgtcaccgactatttcctcgtataaacacgggtcgggggagtcagagaacgtggatgaggatagagatgttgcatcaacggttatgctacggttgatggggagattcgaagaggtatgtgtggaggaagaactcgttgacctctcaccttctgaaacacttgtagttggagtagtgtgactagtaagtaggccattacttccaataatatcagacagaacattgtggttgattctatgaccgaatctgtttgctactctgttcaaaaaccgagctgatgatgatcctgacaactttttgttatttgaattctgatcatctttgtcgtcatgaacgctgcttttctcgggatgcgcggaatggtcagatgatttaccggctccatcgagaagggatttgtgggtcaacggatcaatacctttcttgaccagacatttcttgatgtgagtgttccaatggttcttgatctcattgtctgttcttcttggtattttacgagctatggccgaccatctaatcaacaaaacattatttattagcaaatgtgtatatttacataccaaatcctcactagataccattactttaggaatacacattttgtggattattaaaggatattttttttctacctttacatcctagctagctaaattattgcgtccagtcaaattattttataataacattaaagaatcttttcgtctgtaatccttatttaaaatcatattaataatttgaaatcagtcgtacatcatatgacatatatatgttatgaaaaaatatataaaaatgtgtgcctatgttcttgtccttaggcctgtcgatggtcatcattatatagttaaaacttacttgttgccatgaatggcgtggaggttgatgatggaatcttcctcgtcttggctaaactctccacgtttaatgtcaggtcttaagtaattcgcccatctcaatctgcagcttttgccacatcttttgagtcctataataatttcataatgattaaaagcattaaattattagatgcaactaaaagctgattgcatattccaaattaattagcgataataataataattgaagtaaaataaatacataccagctttgtccggaagggttcgccaaccgccttcaccatgtcgttgaacataggcgataagcttttggtcttcttcttgagtccatgctcctttcttcaacccttctgctctacaacacggcgtccgtaccattcttgattcttgaatgtattaataatagaagctagagatagagaaagagatgtagttgttgttgttgtgggcttgtgatggatcgatcatacaaagaaaggactagatcttttggtaagaacattaaggcaaggatagatacgtcttattctgttattcctcgatactcgactttgctagcttttcgtaaactgaaattttgtgttctctctttacgaatatctcttattttttctttaagatgaagaagatagagaagagggagttttgtatgttcagccaagtaagaaatttaaagaaggaacgtagagctttttatcttgatttggcatggctcgtgtgtagccgacgccgtcgttttcaagtgtttgacacgtggatttgtagtttttcattggttataaataaatatctcatttgattaaaatgtgtagactttgtcagtggaaaataaattgagatggaggttcttgtacgtattctttatttcttacctagccatatattgtttctcctatgaattaaatttatcattaccaaattatacaatatattactccagtgatttttaattcttttagccaatgtaatcatcatttttactaatatcgaatcgttatagactaaaatccacattagttttggaattcatgaaacatataagataatactgtttaaaacgttcaatagtatgttggaacaattaaaaataggaaaaaataatataacattaacaatagtattttatatatattatggaagttctggaattttggagacgaacttaaaaatattcttaggaaaatatgaaatgtaccacctttcaaggttcagaaagacagaaactattttgtgtgtggctgaaaactcatactagtatataatttatttatctataatgctgtttaatctctaattgtataaccagatatttcatattaaatttctcacaatttttttttcttttgtttaaaaacaaatttgtttttgttagttaaaacttctaaagtgaatatatattgtacacagaatttctggaaagaaaattttgatctctaacataaattacacaattaaattcttgccacttgttttaattcaatattgccatatagttcatttttaattgattttatagaaaaacacacaaattaaaaaaatgtattagtttttgtgattaaaactgatcagaaatgtattagttttgtgatttatatttttctataattttaaaccaatgatattcaattatttgttttgaagtttatatactaatgtaggtcaagttagtttttttggaaagtaatacttcctctatttcttattatttgattttttagaaaataaaattgtcttaaaaaaattattttgtaagttttctatgcactatttattagttattattaatgaattttaatgtgacaaatttaaagaactctcatttaaataacaaaagattaaataatatttgccaaaaaaagatcgataaatatcccacgttaacttaacatcatacagtaatttagatgacaacgtaatagacaaaagatattttgataaaggatacattcgttttattcaacaattatgcttcaacgctgaagtagatgtacactattttactgttttttttttcagctgaattttctcatctgctagacaatatttcggacaaataaagaaatcattcgccagagtaagatttgtcaaaaaagtcacaagtcaccacgtctcacgagttgtggaaaaaaaaaagctgacctcgagagatggaaaactaaaatccatacaaaaacaaataatccgaaacgagaaagagtacgtgtaatgtatttttgtcggaataaaatcaactgtaaaagatggagtgcgagacttttctaaggaagaagacaagatggtgaatttaaaacattaacaagcaaattgaaaaactaaaacgcatttcaacgacaaaagcaaataataataagaaatagaaaacggttctaaacaaattgttggcggtatggtgttatacgaaaactgaagattcgaggaaagtggaaaattgtagtaaccaatattacggtcgtttggatttgatgacaaaaatataaactacaacttggtcgctcaaacactggacctggacagcatttagctgaatcaaatatccacaaaatggaaagaaaataatcacagcttttctaccttataattttccacggtttttaaaaaaatttagactaaaaagcattattccctttgaaaaatcatttgttgcttagttaactgaagatactcatactcttttggaagagcaacgctgaatacagtatacttatttcaaaaattcaattttcattactagacttgcacccaatgagtccgtacactacaaaaggcaagagctattccgatacaggagatacgatgatagcatcatacgtagtaaacaaacagtttcaacgattccatccatagcttgatttgtttaatggagaataattgaaaagacaattagatcggactcctcttaaagcttgctcgaacttagagcatctccaattctccaaaacgagtatataatttaaaccattggagatgttcttattatctttcttttttttgtttcatagttattgttttgtttttaagttttaacttagttttaggcaagcgaaatttgttgactaaattaattttgcgtgcgagatcagtagtaaaaagcaaacaccaaagcttttttgtcaataaaatgatacaatcaaaacgaatttcaaatttgtttttgagaaaattacaaacgcagtagatagacttcacaaagggccaaagcaaccaaactctttgacgactggcaagttcaagtcttcggtcttcctacgacccgccatcgtgaagtagtagtctctctcttacttatgaataagggttttgtatatgggcttgggctttagtttgggcttttaaaagattaataaaatgagaagtatgataaatccgattggttacgtttgtgtgacatgaaatgaaacggctaactttcgattccttatccacgaaatctagttaattatctatctccctccaccaatgatgacacacagtttcatcaggtagacaaaatgatgcaacccaatgcaaaacttttgtccccatccgctaaatttctaccgtcacctatagagccaccgcaacacaaccgtagaaccaccgtaggagcacctccgtcattggaacgaaactgcaaattatcgcgacggaatcttagtaaatcctcgttgcttctactcctcaccactcaaacaactctgacgccattgctcgacttctctaaagctcaagcagatacaattgctaaccctaatctcacaaattgcgaaaacagagtaaggaaaatgtttataaactggatttcaatttcaatgtctccttattaattcgatttctgtttccaattttccccagattccgactaagaaagcgttcatcgacgtgtcaatcgacggcgaaccaatcgggaggatcataatcggattatacggagacgatgtaccggcgggaacagctagattcagtagcattgtaagcgggaaagctggaattacttaccggagaaaagattttgtgaagattatgccaggttatgtccaacacggcggaattagatcgtacggtgtcgatgccgagcgtgccaccgccgcggtggggagtctccaaaacctaattgaagagtgggagagagggaagagaggagagatatgtaatgtaaataaggcgggaagcgttggaatcgtggtgagagatccgtcgaaaccgccgccgaagacgaagcttgtggcaaggaatgggaagcttgtggtcgaagaagaggtaattgcggtggggccaaacggaacggagtttgttataacggcggttgattcgccggagctggaggattcggttttggtgattgggaaagttttggaaggaatgggagttgttgagaagatgagagaagtgaagactgtgagggataacacttcatctccttatttcaggtaatatattactgaccgttggatttaacttgtgtttttgagatcaagggttgtgattgtggttctggtggtgtgaacagggtggctaaagtgatcggagataagagagctgtggtggcggagagagggtttaaccggccttattctaaggttgtagtcaccaattgtggtttgatcgagtcacaaactctatgaatgagctcattgtttgttggcaacgttttttgtgtgctatgcaagacaacttaaactgttaagcacatcaaccacatggaaagattgcagccatggtggtttggtggaactacattatcaattgagtaattataagcgtgtgattgagaaattgttgtcttgcgcggttaggccggagcatagtccacagaattgaattgcttgggccttaactggatattaaagagtgtaataaacaatttctactatttctatttgcccaaaacaaaactgtctcggtccataataaagcccgaatttactctaaagcccacgagcccacgcatcccctagggtttctgtgtcttcaaatgtgacctatcctcttctgctacactacccaatttattctcggccggaaagtctcttcttgattatcgtccagggattgcaacagagagaaagtaacgatgccggcgaaacagaggacagctaaggtcaacaggaatcctgatctgatcaggggagttggtaaatactcaaggtctcagatgtaccataagagaggtttgtgggcaatcaaggccaaaaatggaggcgttttcccccgccacgacgctaaatctaaggttgatgctccggtggagaagccaccgaagttctatccagctgaagacgtgaagaaacctctccccaacaggcgcacggcaaaaccagccaagctcaggtacttagctgatacactgtctcattgtcttggagtctgaaatctagctcaatgcaatagttgttttctttggttcttaaggagtgctttgtatgcatttaaatctttgaatctcccgaaattttttgactagcttagtgttttgaaatcgttaattagtcattgtggtctgttctatttggtttgtgaatttatcttgatttctgtggaaagtttgcctcttttgcttgtattttgtgttacattgttcggaatttgttatgttgtaatccgatattcatatttctctattgcagagctagcatcactccagggacagtgcttatcatccttgctggtagatttaagggcaagagagttgtcttccttaagcagcttgcctccggtttgcttcttgtgactggtgagttttatgctaatctactttctttatttgccacattctttattcgaaatgcagaacgcccattcactaaacttgctttctgtattctgtataaagttgacattcctgttttgttattgaccttaggaccattcaagatcaatggtgttcctctgagacgtgttaaccaggcctatgtcattggtacttccacaaaggttgacatttctggagttaccctcgacaaattcgatgataagtacttcggcaaggttgctgagaagaaaaagaagaagactgaaggagagttcttcgaggctgagaaagaggtatcccaaacattcttcttgtctttctctaagagtcatttggttctcattttgtaatagacgattaaagttctctcctttatacactacccaaattaaaagctatgcgtgacctccatatactttttttccttccgcaggagaagaaagagattccacagggaaagaaagatgaccagaaagccgtggacgcagctttgatcaaagctattgaagcagttccagagttgaagacttacctcggagcaaggttttcattgaaacaaggaatgaagccccatgagcttgttttctagatttcattactttttttctgaggtttctagtgtatctgtctcctgaagttttacactccaactggttggttctgttctcgtccactgaccagagacataaaatcttggctgctgctatctggatttctgtcttatatggataatttatcaatcctgtttttgaaggagaacttttcacaagattctagtaatgcttaagtcatgacgaagtgatgaaattgagaattgaaaataacattgcaataatgatatagtttagcttacaatctacttcgaatattgaaactcttattactagtctctgtcacatgcaccgagatcaagctggaggtgcttctagacgaatttgatcattatctttaggtgtttctttgctagcacaatcagcaactttagctccggcctcaacatctccggccaaacaccgtctccattttcgtctcagccaacctaaaagcccaccactctttatcatctccaacggattgacttcagccactagaccagttctctggcggctccgtgcgcagaatcgacccaagaagcaggagagaacagcaagaatgatgagaacagatatgacagcgaagaagggtccaatggagctggaagagtaatggtttggagcgtttggtgctgcgattagattggcattggtagccataggtgtgatctcattgcctcctaattgttgttgaggttgttgttggataggaaacaatgacgagctgctactactactagccatagccattgaatctaatgaaattttggttttcggtgatcaagattcaatatttgttgattgagtaacggggtcattagtatatatatacataggcatgtgcacattgatcttttgaagagcttttaagccgaccaatgtttgttgaagaaggacatgtaaaggtgaataaagcggagaaatcctcatcagcttcatcaaaagcgtctcaaactaattataaatgatatatgtgatccattgcactcttacaggtgaaggaatcgtcttgctctgattttggcgttggtcaaattgtgtggggattattagcctgagtttttagataaactactctctaactctgatttttttatcatcctgtcaaaatagttttaggtgaaaagatttaatactacaaagttgtaagaaaaaacaaatcctattatgcatgttacggtccacattaaaaggccgatataattgtaaagcccatgagcccaagaaagccctaaaatttaattagggtttcagtgtcttcaaattcacctatcctcagcctcaactctctcctctatccactctcagccggaaaatttttccttgattcattacgacagagagaaccatgccggcgaaacagaggaccccgaaggtcaacagaaaccctgatctgatcaggggtgttggtaaatactcgagatcccagatgtaccataagagaggtttgtgggctatcaaggccaaaaatggaggcgttttcccacgtcacgacgctaaatctaaggttgatgctccggtggagaagccaccgaagttctatccagctgaagatgttaagaaacctctccccaacaggcgcacggcaaaaccaaccaagctcaggtacttagtctgacactggtatcgatgcaattatcttccatgtgtttggttgatttctttggctcgtttgctaagtgggtttgtataagatttgaatatctgctggaaaagtgtccaaattttgcattgtgtaaatcatttgtctctaggatatttgaagaatagttgaaatgcattggtttgtgaagattgttagtggagttaaacttgaatttcaaaaggttcataatttctgtgaatacatctagttttcttatacattactgttattagtatgattaagcttgtctcaggttgatagtaaaaagaaaaaaagcgaatttgattttcatttgtataccaaatttaatgtctatgctctgtaacgtcttcaatagatcttatatatgtttccaacatgatccgatcttcttatatctgtattgcagagctagcattactccaggtacagtgttgattatccttgctggtaggttcaagggaaagagagttgtcttccttaagcagcttgcctctggtttgcttcttgtgactggtgagttattctctatctgttctcatgaacttgtctcctataaatcatttgaagcgaagctcattcactgatttttaccatctgaattgttcatcctttttttaacaattctttaggaccattcaagatcaatggtgttcctttgagacgtgttaaccaggcctatgtgattggcacttccacaaaggttgacatttctggagtcaccctcgataaattcgatgataagtactttggcaaggttgctgagaagaaaaagaagaagacagaaggagagttctttgaggctgagaaagaggtataaccttatatcgcaaaacatggaaaggacgcaattcatcttgtgtttctctcctttaaatttggttatcacagtttgttccggaagaatagacattgaaaatatctttatatcacttgttattttccaaaccaaaacatatgcttgacataacatctctcttttatatttcacaggagaagaaggagatcccacaggtgaagaaagatgaccagaaagctgtggatgcagctttgatcaaagccattgaagcagttccagagttgaagacttaccttggcgcaaggttttcattgaaacaaggaatgaagccccatgagcttgttttctagatttcattactttttttctgaggtctctagagtatctgtctcctgaagtgttttaccttctaaatggttgttttgttcttgttcactgaacacatacaatttttggcttatacattctctgttcttacgtatggacaaactatcgatcctgtttttgattgtgagctttgtagcgtggttcgtgatagaaatgggataattattgtcaaaaaaaaaggggatcgttatgctatataactcggtatgaaattgaacataaatatagaataaacatcaaaatggtatgtatgtgcaagctacatgaacattggcgttatctcattcaaaaatcattcaccgttttctataggcatttctacaaatctgacactttttgatgtaatttgaagtaagtattctaggattaaatcatagatcaactataagaacctcgataatcttcgttttcgtggatagtctccttgagagaccaagctatagcaagactgatgcaggaaaggactagagcagggtaagcaaacatcgagagatatttccattgatgaacaatggcttttaagatgcttagttggcagcctctgcaatctaaacaatactcataagaacactcttctggaacttggttccgttcatactgatgtttccaactccactcgcctggcttgtcgaacatcgttatggtcccacatcccaccggttgtgcacagcaatacttctgcacatatatcctaaatataagcatgcacattttcatatagacatgtctcttattaatagtaaaaagattcaaaacttacccaaacattgctgtttttgctggcattgtaattacagtcatgtttgtgaatgatacaataggttactttctcgaacttctccttagagaccaacctaccaagtaactgtggcacggtacggttgtccttggcgggattcttagctatgccaaaagtggtgttgtaaatggaacatttgattgaataataagatacaatgataatgagcacaaccatgccgtagaagaagaaattgaaaaggcgtttggagcggcaacagattccgtatagaccgatctgaggaatcagcagaagaagcagaccgagtaacgtgaactggcttgaggtttctcggatgcaagaagacattgttgttttttggtatagacctgttcccatcattgtgaggcctatacttatcaagattattgttgtcatggttaggaatccagttcgcacttctgacatttttgaatcttggggaacgtaaaaccttttgtattcaagcgaattgttgtttgaaaatttggagtttctttaaaagagattgaatcaaggagatgaacgagttcttaaaacttttctggccaagtttctgttgtcttttggtttgtttgtcatggaaggtaacaattacgaaataaatcttatcttagtttagtttagttttggtagttaaaagattgctcaacggtcgttcctgttagggcaaatgccttcactatttatagaaaatttgttcttgtttcaatgttttaaccaaatactctgttttatatcatagttattttagtaaaccaaaactcatattctttttatacaaacaataacggtaacaaaaaataaaaatcttttagacgtttactcatctaaattgtgatttgatctctgagatttgcaggtaagattttcttcaggcagggacttcgttggtctccaaaggggttttacttaaagtggaggtgtgttctttgaaacccaacattttgttcaaagctccaacataagctttaacgctcgacacaacaatgtccattcctgctccggttccactgtaagaacccaaactcagtgagtcagagtagttactgcgattcttttctttagcttcagttgctagattagtttcaagtttcaaacaaggatgatgaagttaaaatgaatttacctaaaagttctttcaacagattcacccgttaccgcgtttgttgatgagtagttgttgtctccgcggattagaacccgtgtggttgcaatagcatcaatgccttctgttactgcattcatcgagtactcaagcagagtcgcaggttcctgtatatgcatagctaatgatcagcattaaacaagtaatcattgatatatatatatatatataatcggcaatcctagcaaaagaagtaccttaacgataagatcaactgccttgtaagctgcatctacaggtccggttccaacagaacaagctacatgctctttgccatcggagtcagcaagttttacagtagatgttgagagaccgagagttccacaagttatctacactcccactttccataatcagcataagaataagaattgactaaagaagaagttagaacaagtaaagagagaaaacaaatctcatatccactattcacctgcatgtccaggagtttccagacagcctctggctgaaacacttcatcagatactaaagctattaagtcagcatcggtaactctctgtatcaccaaggaacaaagacaatcaagagacattatgcaaacccactaattttatattttttttctaaagcaaaaactccaattttttctgcatcatcatataattggacactaaatgcttgaaaatttgggaacagcacccaaaccagtgccctttgaggttcttactacctttttttgctctgccacagctttgaaacgccagaaaaggttgcttagctgcccatcatccaggacataaccgagctgaaaatgtaaaaaaatgataagaaaacattttcttcctaatatggtgacagcaagtatagatatgggtaaagacatgtacctcatttaaacggtctttcagtgcgtgacgcccactggataaaatagtatgtaagcattggtttgaacaagacaagcccatttggaatatcagtctgaacaacaaaacttccatacctaagctttcccagcacgatgccagcatcatttgatcgctcaagcccaatctcttcgggggacataatttcataggtacccttgtgcttcagcattccatcctaaatagagtgcatgaataaagaccaaacaatactcattaactaagttatgcagaagattgaaagagtaaatatgcaagtcaagagttgagaacctaatgatgattccttcattaaattcttttcaggctgagtaaatgctataagggtaagtttatcttgcaagaactaaaattccagactaggagagttacatttctcccgtttaataaaaaagtgaagcagactttagtcacagagacactaagaatagcataaattacgattgattaactgacctgatgaataccactttcatgcgcaaaggcgtttgctcctacaatagccttatggggctgcgtttgcataccagtgtactcctcaacctgagaaaatgagaatagaccttaaaaaaaaggaaaatcgccaaataagaaaaatatacttttgtttccacagagttaagaatgaagttcaaaatgtgtaccatcttgcttgtcataacaatgtgccgggtatcgattccagtaaataggcctcctaagacatgatctccacggcattttatggccatgacaacctacacagtaagaataaaatgttcaagaaataatttaagtatttatatgcagttcactatgagatcataaactgaaaatcacaaaagtcataatgccttagtatgtagcataatatctaagtaactatggaaaggaagctacttcaggaggctttcatatctgacctcttccaatgaagcgtttccagctctttcgccaattccattgatagtcacttccacttgcctcgcgcccgaatgtgcaccctgaattcaaaaaaagattgacatgttagtaataacttctaacagctaacccgatccaaccaaatatgaaaaaaaaaatggcatacagataaagtgttggcggtggagagtccaagatcattctgacaatgtgtagagattataacattttggatcccaggagtattagctttaatatcagcaatcaactgaccaaactcactaggcaaggttataccaacagtgtcaggtatgttaagagtggttgctccagctttgatcacttcaccaagaatctcgtataagtactctctctccgatctggccaccaattaaacatttcacgttagcagaatcagctactaataaaggaccatcaatacattaaaataccatcgaatccaaaaaaaaaggaacttgagaacattccatgacggcattttacaacaaaactattaccttccggcatcttctggactaaattcaacatcttcacatcccaagcttctggcgaatctaaccatgttcctagcgatctcaataacttcttctttactcttcttcaacttatacttcagatgaatatcactagtggcaataaacgtatggattcttggccgcttagcgtacttcacagcttcccaagccgtctcaatatccttcttgttacatctcgagagaccacagattacagggacatagccattttcgtcgacggtattgccaacagtctcagctatggttttaacagcttcgaaatcgtcttttgaagcagcgggaaatccagcttcgatgatgtcgactccgagcttggctaattgacgagcgatatcgagcttttccttggaggttagtgtagctccgggagactgttcaccgtctcggagagttgtatcgaagattctgacgtaattgggatcggatatacggttagggatgtaattgggacgacggcgaggagcatgaggtggtagaggtgaagaagcggagagagaatacgagacacggaattttccggcggtggtaagagagatggtacggtggttctgtgatcggagatgaagagatgaaaatggtgaggtggaggaggaggataaggcgggaattgaaggtacaccgaacgatggtgaagagagattagggcttttgagaatcgaagactccattgccgtggaaaatcaaaaacctgagagagatgatagtgtggcggcggcggcgacgggcgacggcacagtgtctctggttactactttgctagtgaatatttttgatttgttttatttatttgaattgttccgaaccgaaccgaaccaaaccaaaaccagaaacttctctttaacagtcaaccaattggaaaatgaaccggtttaagtatggttcttttgactccttagttttcatcgcctccgcctgcaccaacctccaaaaggacgtttttcaaattatataacatcattttattctccgcttctccattttagtcaaaagaatcacagagagtattttttttaggtatcgtgtaatggctttgactacaaaacctcaccatcttcagagatctttcctctctccgtcgcgtgtttccggcgaacgatatttggaatctgcgccatcatgtctgagattccgtcgcagcggtgtccaatgctcggtggtggctaaggagtgcagagtgaaaggagtgaaagcgagacagattattgatagtagagggaatccgacggtggaggttgatctgattaccgatgatctgtatcgttcggctgttccaagtggtgcatctaccgggatctacgaagcgcttgagcttagagatggagacaagagcgtctatggtggtaaaggtgtattacaggctattaaaaacatcaatgaacttgtggctccaaaactcattggagttgacgttaggtgagaataagaattcgttcctcaatctaaatgaacatataaacgtcgtgatttggagttggtatgcttagttagatagaaatcttcggagttgttttagctttgtttctctgctctggattactactggtcaatttggtggacttggattcgaatcgtaatgcatgactgttgaatttggaattctagttaaggttattaaggttgtttgttgcatgtagttttaattttgcttcatacttgatactactaagtgttgaagtaggtgtcattgttgaattgttccgtttgtggtttctgattctgaaccgttgggaaactataatcggtgatggatagttgaatgtaatatttttaccttattttctttaaggaaccaagctgatgtcgatgctcttatgctggaactggatgggaccccaaacaagtcgaaactcggggctaatgcgatattaggagtgtcattgagcgtttgcagggcaggtgctggagctaaaggagtgcctttgtacaaacacatccaggaaacatcaggaacaaaggagcttgtcatgccagttcctgcattcaatgtgatcaatggaggcagtcatgctgggaatagtttggctatgcaagagtttatgatactacctgtaggagctacctcattctcggaggccttccagatgggaagtgaaggtcagttagtgataactgggtttaacttgctagaacttaagaaactatggcggctcctaatttttcttgagtttgcaatgaaatgtcagaaaaacagaaaagccttgataagcagcttcctgtttcatatttctcttttggttccaaagttcttctattctttggattatcacaaagaattgtttttctgatagtaatgcatttaatgtactttgttgattacagtttatcatacattgaaggggataatcaaaactaagtatggtcaagatgcttgtaatgtcggagatgaaggagggtttgcgccgaatgttcaagataacagagagggactagttctgctcatagatgcaattgaaaaggccggttacactggaaaggtaatcaagttctctttctttttaatgctaatacttgctaaagttgcatgtcatctgtgtttccctaaacaacttctggcagcttcggtgtcaatcttacaccactcacataatatataatttttgcagatcaaaataggaatggatgttgctgcatcagaatttttcatgaaagatggtagatacgatttgaacttcaagaaacagccaaacgatggagctcacgtactgtcagccgagagtcttgctgacctctacagagaattcatcaaggatttcccaattgtctctatcgaagatccttttgaccaggatgattggagctcatgggcttcattgcaatcctctgtggatatccaactcgtgggagatgacttgttagtcactaacccgaagaggatagctgaagctattaagaaacagtcttgcaatgctctactcttgaaggtaaaaataaaagtttttatattattttctcttttctaatctcaattctctagaccattttgacaaaacccccgttattggagaagaatttcaatttgtttgtaattcatggtttcacaggttaaccagattgggacagtcactgagtcaattcaagcagcacttgactcaaaagctgcaggctggggtgtgatggttagtcacaggagtggcgagacagaggataacttcatcgcagatctctctgttggtttagcaagcggacaggtacatcaaatcctctaaacctgtctgtattactctctagtgtttgcttatcattctctgttttgtagatcaaaactggtgctccatgccgaagtgaacgattgtcaaaatacaaccaggtagttaactaatatccaacttatgcttaatactatactctatataccacatatctgaacccttgagtttgatttatttccattgcagcttctccgtatcgaagaggaactcggcaatgtgcgctacgccggtgaagctttccgatcaccatgagaaattcgagaaaggcactcattggcggcttttgcttacagaattaggtgaaaccaaatgaggtcctcctagtatcagctccgttgtagctgtctctgaaaagtatcagattttctacaaaaacaaataaaagaacagctttttcactgagtcttctgttgtaatgtcattgataccgatataaacatggatcgaccaaagcgtttttcagattaatcagatgctcagagatatgtcgatttgattgttccaatgattaagaagagtgtttcattcgtgttacttaatattagaaaacttgttcacgcttgagccaatggtattggcatagttgtcggtcaacgaacaaattagttggcgttattccttcagctaaacggaacaaaaaacaaatatacaattaacaaaatactagatacaaaaagaaaaacaaattaacaatttatgtatattatttctttatagataaaatatttacatctttttaaataatttaatcaatttcgaataatcccaaacaaaactgaaaattaaatcgtaatggagaaaaacctctgattctaacgattaagacttcggatctgaaggaaattatgtggagctgtgagcaagttctattatccttacgccaatttggctttgaagttaaccattttaaattttaatgataaagttgagtataacacgtaatggccttaatggggaaaacatttgagtcacgtagtagttattttccgtgtttaaatttgatttcgccattaagcataaaatcaagccatcatcatggacatgaaccaccaagaaacaacaacgttaattgatgataacatattccccttttctttgtagtaccttttattttcttaacaaatcaaaataatcatacggtttgcaacaaaaaaaagttgaaaaaaacttcttaatttgaagttctcacaatgtataagcacaaaacactaacatttaacttggaagctcagtatttaaaatgcaaaatataaaggccacaactacgataaacaattaagataaagtactggttaacataaaaatagcgaaaccaaatcgtttcaggttatgccagccccgccaaaaaaaggtggctacggatctttggtgaccaatttattagctatccatcaagtctgatagtgatagcaaccaatatgtacgtccatctttatatttattgaaaaataatgatatattgggaggtcaaaaatcggataagcttatgattctttttgtgcatttgcattttatttacccaacatatggaccataatattatatcttctgtttattatggtctatatgctagaatgtaataatacatcggaattttgaaagactagaaacattgctttgaaatcctgtgtattttgcacccaaaaaaaaataaaaaaaattgtgtgtttatatacgcaatttattcttaaccacatagtagttgtaaattgtaaacgcaaacagtaaacataaaacattccatattattgacgttttacgtttgtgtttacaatttgcaattgatgtttgatgataaacgcatcgatcgtcaatatttgatcaacaagactaagatcattgaatgcgactatgcgaccggttgatttattaacagtatccatttggtcctttcaatatcacaaaaatcttaaatttccttttttttttaatatccaagcaaatattctagggtatttctcaaaagtatatgtattttatttatttgtaatcaactgctccttggaattacacttgtatatattttctgatatctaaatacctacttctactttatcaaaaaaaagtttacctacttctaatcaatcttagacacaagtacataaatttttagaccatgcgtttgcgatcttgcgttgacagtcgtacgtctaccccaaaaatcagcaatgtacgtggattgcaactatttgactttttgttccatgtgcaacttaatctgtcaagaaaccccgagaaacaactctaatctcttcactaataaaataatccgacgagcataacgtgtgccatcaacttaatttacaaaataagaaaccttcttaaaaattaatcaaaaaagaaaaagaaaagttaaataatcaaacctataaatattcgtaacgactacaaagtacaagaaagtctcatttgagaataattgagcgataaagaaacggtatgacgtcgttttgctccatgatttctcttcttcttcttctctctctttcatcggcggttttctccgatgacgcttctttccagaaacttccggtgccggaaactaggtcaggtcccgaagctttcgcttttgattccaccggtaaagggttctataccggtgtctccggtggtaaaatcctcaagtacctccccgagacgggttatgttgactttgcccagatcactgaatcctcgtaagtcttgttcttttctaagatcataactttttgatgattatgcttcttctgggggttttgaaattggaatctaaatggcattcgtttattaacactcgtttctttatggctacaatattatggaattatgatttatgactgatcagagatgatatagccttcttatttttacaaaaaatatatcatatccgcattttaatccgattctcttttggactatttgaagttacgagatgatgattttatggtttcttaaggaaataatctaaaaactcctctaagctacttatcatgtaacttgattaaaatttcacatgtgaaatcttgttacatgtgttgtatattacaaataatggatgatacttactcaattttgtccacccgtaaaagaattcatgtagggacgagtggacgaaaagcaaccttttttagttccttgtttttatcggcttacgttagcaatctgtcatataccggtttaggtgaccaaaacgcatctcggcgttcacacacacacatgcctccacgtgaaaaagagtcaaaaactaagatacacatgatacctatggatactaacatataattttgttgttgtactaatcaaaaacatttttatactacatgggaactcttataagttcatggttatttgtttctcttgttcttaaaatgttttttggtttgaatactttaggaactcttcatggtgcgatggtactattggaacggctttagccggacgctgtggtcgaccagcaggaatagcattcaacgagaaaacaggtgatctttacgtcgccgatgctccgttgggtcttcacgttatttctcccgccggtggtttggctacgaagatcaccgacagtgttgacggaaagcctttcaagtttcttgacggtcttgacgttgatcccactactggtgtcgtctacttcacttccttcagctcacgcttctccccaatgtaaagtttctatcttcttctatacataaattaattgttttagtttaaattaaattttgaatcgaaactctaaatttaaactcaaatggcaatggatttttttttttttttggctttaaaaatgaaaattatttacctttacatatatgttactgctttccacagaaaataaaataatattccaaattatttatccacaaattgattttaattggtaaagaaagtactttctcaaataatatttgctatatattgaatattctgtttattggttatgtatgcagccaagtgttgattgcattggggttaaaggacgcgaccggaaagctctacaaatacgacccatcgaccaaagtcgtgactgtactgatggaagggctaagtggttcagccgggtgtgcagtgagctcagatggttcgtttgtgctggttagtcagttcacaaaaagtaacatcaagaggtattggatcaagggacccaaagctggttcttctgaagacttcaccaactcagtctcaaaccctgacaatatcaaaagaattggctctactggaaacttttgggtcgcttcagtggtgaacaagatcatcgtacctacgaacccatcagcagtcaaagttaactctaatggtgaagttcttcaaacaattcctctcaaagataaatttggagacactctgctcagcgaagtcaacgaattcgagggcaatttatatataggaactctcaccggaccatttgctggaattcttaagctcgaaaagggttcttgtcctgccacttagatctcttatttgaatgcatccgatgtgttacaataatatatatatatgagctttttatttatttctgaataaaataaccacttagatctcttaattgaaatagcaatttaaagcatggttatcttgtatagtgtttgattaatttgatattttttttcaaaaggcaagcgtaacatttgatcttcagtcaccatcagatatcacgttcccatgtattttgatttttgagtacttctagatagtgaaaagaggacaaaagagaggggagatccgaaggtatgaaataagacatgttgacaaatgttgttcaaaaggtccaaccacacacacacgaattccacacgctaattaataagatctccaaccttacgtcgaagacaagtacacctttttttcgttcatgatcatttacaaaagttttcggttatatcatgggcgtcgagtcgtactctttgtctgaagactttttgtctattgtacccactttattaaagctcaccagtcaaacttcaacaaatgtcgcattagacacttccaatttttctcgctttttttgtcctctaactagtaaaactagtcccgttttcttattgtagcttgagcgtcaaaaagttaacaattctaatattgtcttcccggatcatctttagttttttttaccatatcattgtcgcatatacgaacgctctaattgaaagcgaaggaaggaacaagagaggggtcccgggttgagctagctgtataatgaacattacattatacaaaaaaaggatttaatctttaaaaccaatatatgaatatttgaaaactgtgaacaatctaatttttttgtaaaaatatcctaagctatctaaaatttgaaaatactatgcaagaatcatcaattttccaataatataagataaccatgctttacattgctatttctgttaattttataaatcctcgtacatgcaatatttacatttctttccttttactcgtgtttttgtttgctttatattttttgcctattttcttcctaacataaaagaatcattctatcaatcatagtctgaagaaaagctgtcaaatccccagaaaaagaatttatccatttatttacggaacagtagatcttttctttttcgtgttattggtaacgtcaaaaaaaaggaaatttctatttagtatttaccttattattttatatatatatatgtgcatatacacccacatagagatcattcgtgtactaattttaccttcatagacttaattaagatacgatcatggcgtcgtttgtctttgtgatttctcttcttcttctctctttttcgtcggctgttttctccgatgatgcttcttttcagaaacttccggtgcctgacaagaggtcaggccctgaatctttcgcctttgactctaccggcggattctacaccggagtctccggtggtaaaatcctcaagtacgttcctgggaagggttatgtcgattttgcccagatcacagattcctcgtaagtgtctccttcttaggatctccaagattataacttttcaagatcatgcttctggtttaaggaatctttttcttatcaaatatcaattgttatctaattaacgatcttgtttctttatatagtaattattatctaatattcttaagacgtatctggctcattattattttaaattgttgtatatatattgtaacaaaatatttgtattgctgcattttttaagaaatattttttaatcggtttgattactctaggaactcggcatggtgcaacggagcattaggaaccgctttcgccggaaagtgtggtcgaccagcgggaatagccttaaacagcaaaacaggtgatctctatgtcgccgatgctccgttgggtcttcacgttatctctcccgcaggaggtttggccacaaagctggccgacagtgttgacggaaagcctttcaagtttcttgacggtcttgatgttgatcccaccaccggcgtcgtctacttcacttccttcagttccaagtttggaccccggtaacgtgtttaattttcttacatatttattcatctataacactataaccttattatgaacgagttattatagataggcaatagtacaattacatatataatgctataaattccttctttttaaaaatctagtatatatataggaaaggacaaaattattaatttacaaaactgttattagaaaaaaaacgttcttaattatgttggtttactaataattttttcaagtaattaagttgtagtatatttttttctttcaaaatcaacttttaaatgcttattatagaagatggtaatatatgcatgttatttaatatgtgtactaaaataattgttggttatgcaatgtagggaagtgttaatcgcagtgggattaaaagacgcgagcggaaagctgttcaaatacgacccagcgaccaaagccgtgactgagttaatggaaggtctaagtggtgctgctggttgtgcagtgagctcagatggttcattcgtgctagttagcgagttcataaagagtaacatcaagaaatattggattaaagggcccaaagctggaactattgaagacttctcaagtcttgtctcgaaccccgacaacatcaggagggtaggttctaccggaaatttctgggtcgcctctgtcgtgaacaaggttgttatgcctaccgaccctagggcggtcaaactagacgctaatggaaaagtgctccagaccattttcctcaagaatgagtttgggaatactttgcttagtgaagtcaacgagttcaacggccatctttacatcggaactcttactggacctttcgccggagtcatgaaactttaaattggtatcaactatatggttctttggtgattaccatttttgatatcattttgaaaggtctgtttacagttattttaaccataataatatcccctcaaatgtcctgcttgttacgtgggtgacacaattgttcggtgattccttgaataggctactactacttattgtttcatattttcgaagagattatctctagttcttaaggctttggttttctttgttttcaccctttgttttacttcataaagacgaaaaacaagaaaaattaagtatctatactaaaaaaaaatatgatctataattcgatatgtacacacgtttatacattgacttttatacaacacgttagtagatagaaccgtcattcttatagtatcaatatataaactataaagtaagatactagaatgcggccgatttatataggtacatccattttgaccattttaatgtcataagatctcgaaggtgtgaaatgtgaatggtggtgattaaaaaaacaagagtgtgcggtgtcgtacggtgagacggtttattttgcactatcatcatatgtgattttcgtgcacgctttagagaaaaaaaaattccacaatccacactatacatatatagaccataataatattttatgcatggtacaaaatgcagaagcaatgcaaatcaaattgctttccatttccgctaccgcatttactagtgaatcaagaaaagtaaatgtcaaaacatttaatgaaatgttcctaagataatgtgtagtatcttttcatcaatctacttctaattaatcttaaaactaacgtaatttaggcgtatttgtttcttgatttatattcaatattaattactaattttagtttgatttgtttctataaatactttgtctattgtcaactttagaaaaaaaaaaaaaaaaagatgtcttaatataaggaaatttcaaaaaaggtaacattccaaaaataaatctataaatatacatacatacatacagataagagatagataaaaagaacacaaccaaagaaacatgatgaggtcgtttgtctcgttgatttctcttctccttcttctctcattttcttcatctgttctctcaaccaaaaagtcatcatttcaaaaacttccggtgccaggaaacagaacaggccctgaagctttcgcttttgattccaccggaaaaggattctacaccggagtcaccggcggtaaaatcctaaaatatcttccaaagaaaggttatgtcgactttgcccagatcacaaactcttcgtaagtttccaagatcattactttttcatttacttatatatgcttcttatgcatttgaattcaatgttatcaagagcttgatacgcaaatcagaattctttccatatacttcatgataatgatacgaaccttttatattactaaatccgtaacaacattatcttttcattttgttttggtaaataaacttgtctagttatcttatagttataaaataaaataaaaaataacattatatatcttctcatgtcacataagacaatgaagtaaaaataaactcgaaatcagatctgacatacacaaatgggaaaactttgttgtcaaatacaaacctcagagtcaatcatgtaatgatgatctaaagatttcgtgcactagagattcagaaataactgcaacctactttttttggtgggctactgcctccatgcaacctactttaaattaatttattcatcaactgagtgccctttatttctcttttcattcgacctaatttttttttttttttttaaatttcaagaattattatgtactcgtataatattcaaaatactaattgttgattaatgtatgtataggatgtataaatgtaatcatctttaatttaacaaaatagaatgtcctaaacaaacattgtaacaggctaaacacacgctagcattaatatcatccgcattgctgtcaaatacgtgtggagctatacaaatataagaatcatatttaactatgtgttaattttttatttttcatttttttgtttgtctatcaaatattaacaaatttgattcgatttacttcaggaagtcttcgttgtgcgacggagcacttggaaccactaacgtcgaaaaatgtggtcgaccagccggaatagccttcaacacgaaaacaggtgatctttacgtcgcagatgctgcattgggtctccacgtcatccctcgccgtgggggtttggctaagaagatcgccgacagtgtcggcggcaagccctttttgtttcttgacgggcttgacgtagatcccactaccggcgtcgtctatttcacttccttcagctcaacatttggccctaggtacagttttatttttcccttctatacgtaaatatataaatacacttatcatataatttatgaacaaagtaaatatttctattttaatataaaaatcatcttaaatgatttttttccctttctaagttttgttttttaatcaaatcgaaagtttttttttgttgctgtgatcactcaataaaaagcttatagtgtatttctttagttagagccaaattaattttgatgctttttgttctaattacgaattacgataaaccattttttaacattttcatttgaatcggttaattaatcaaatgatattacttaattactaatattgattatgatgcatatgcagggatgtgttgaaagcagtggcaacaaaagactcgaccggtaagttcttcaaatacgatccatcaaaaaaggtcgtgactgtattgatggaaggtcttagcggctcagccggatgtgccgttagctcagatggttcattcgtgctggttggtcagttcacaaaaagtaacatcaagaggtattggatcaaaggatccaaagctggtacttctgaagacttcaccaactcggtctcgaaccctgacaacatcaagaggatcggttctactggaaacttttgggttgcttcggtcgtgaactcagccaccggaccgacaaacccttcggcggttaaagtcagttctgccggtaaagtgcttcagaccattcccctaaaagacaagtttggggatactttggttagtgaagttaacgaatacaaaggacagctttacatcggagctctttttggtcctttcgccggaattcttaagctttaaagtgaacatgttattagtatgggttagaattaaagtgattgaatcgaaataaatatggttacaaagtcttgacggatcaatgtacgctcatgttgattctgttcaaataaatatgattttttttaaagatggttacaaatttcaagaattaatttgtataacctaatctctgctcttatgcaatcttcaacattctcctcagctaaggaaatggcagaaattgagagaaaggctacgaagaagataatattcttcattgagctcttcattattgtttctaatagggaagtacacacatatatatatatatatatatcttcgagattagctgaaacgtacgtttaagacttgaaacttgtttgatatcattttcgttttatttatgaatgtttgactttaaagatgtttcatcggtttctttagtttcattcaaatgagattcagtactagtgtcggaatcatctgagagagctgaggtaatctttaagcatatcaatgatgggagttgctaaagaatctcggccaagttgctgaaacatgattccgtccatacgagcttgaactccctcggtgattgttaattcgtcgagcagtccttttaatgttctgtcaactccaatcaccgagcttcctataccgcttaagatatctggtagtgatgtagaaggtcttgaaagctcaacaagagttacctgtatttaccacaagcaaaagccaaaaatcatatatcatctacttaatgccttctcaagttttaaagatttgttacaaagatgagttcactgaagtaaaagagagttgagaggccaaccttcttattaagaggaatattagctttctgcttagcaatggctatagctcgggacagcccaccgacagcatctattagaccacgagaatgagcatccttaccggtccacactctgccctgtgcaacttcttccatcttgtcgacctaggaacatggtaagaataaatatttagtcttgaaaaagcataggaatacaagaaagaaaacaagattggaacaaatacaggcatcgatcttgataaggctgctttatctcggaaaagctggtatgcatgctgtgcagacttctcaaacagttctgcttcctctggcctgttagcatacatttgttattatagtgaatgaaaggaacctataggttcttacaagagtagtttcgagaatcgaaattgacaaaaagagaaaaaccaaattggcatcaattgggtgacaaagaagtcttagacggttagagcctaactaagtaaaatcgttgtaataaacagagtgaggtcactcactttaaaggtctttcctcagcccccagaagctcagcatattttcctctagatatagtttccttgttgaagccaatcttttcatatagtttggccaaggtaaatcttgctgcaacaagaagaacaaacagaagcaatcaagcatggcgactgggtgaaagagatagttgtacaaagattcagagcacaaaactttctctttggtaagtagaaaaagaaagatcaccagtgacaactccaattgagccagttaatgtcaaattttcagcaacaatggcgtttgcagccattgccatgtagtagcctccacttgctgccacatctgacattgacgcaatgacgggttttgtttcagccagtagtttgatctccctccacattctgtataccattatgaataatgaagattataataaagcctagaaggatttccaaagctattaaattcaaatccacacatgacctctaggctagatagatatcgtatttgcaagttactagatgctcaatatagcattcttaacccattctcttgatttaaaagatagcgcttcaacttctaacctccattgacgaaaaatatataaaagtaatgggtctgagtgtatcatgttagaaggtgaaccaaacaattcaagaaatgttaaatcatacgagtatattgtaggtaaaatcatacagcactgacaatcaatataactacttacaaatcagaagcgagagcatcacctcctggactgtcaattcggatgatggcagccttatattttttggactcttcaaaagaaagaggaaataaagttctgagctgctattgacgaacacaacagcacactagtagatgaaaacgtaataaacagacctacctctaacactgcggatcttctcaattagttgttctgctatgatagctgaaccaggagtgcttaatggacccttaacccgagaaatgcttccccctgctctaataatagctatttggtctcggccgccagttagaccaagagtccacttcttaacacctgagtatttcctgcataaagtatttcaatcgagaatatcttcatgttactgtaaaattgataaaaccgcatgaagcaataagcgaagtaaaacaatatccaaaaatctttcctggaaagtttacatacaagtttataaaaaacagaaaacttaaaagtttatgaagtacgcatagcatcatttactataaaattgccaaaatttaattcctcccacaatgagaaacaaagaagaagacatatctatcctacactttgttgaattacgatttcgagtctgtacggctacagactctaaatcacactaattctaaatcaagattacccaccaatgcaggaaccaactaggaaccattatgtatacaatacctaatagtataaggcttgcgccaagagtactgcaaagataatagctctagattcagtaagcctcaatttgacaattccatatagtaagaatcatttacttgtaatcaacagtaggaagctttttgtctttctcgactccaagcctctctttcagcatcgttataacctgcaggtacattcaaagtaatttatatagatcagcaggagttctgggccggaatctaattccctttgtatagatttataggggaatctttataagtatgataactaatccatcccaatattttgagagtataccaaaagatccacaaggaaaaaagttcatgataaaggactgaataacaagaatcatcactcctggcttctgggattacatagaaggtactgaatctaatctacataagagaatagaaatggtattacctcatcatcatagcgaatatcctttatcagccccgcttccttgagcttttcgatttcgtaaactccttgattgatgaaattttcaacatcttctcgctttttccctgcatagttctaagcagaagccattcaggagaactaaaatgttataaccataacaacattgtgaacaaatctagcacctgttgcgtcagaaacaccatccagccaatttgaatatatgttatcaagaagcacactcagcatctcataattttcctcagatatacttttgcgagaaagctgatctccagcacttttgtattttccaatcctttgtacttgaggttcaatccccactttttcgaagacacctacatttttgaaaaataactagttcacgataaatgtgccaattactgctttgtaaaattgtaattattgaaatccgattaaggacctttgataacgagaacagggaagtgagatatgatcacattaaattacaaaagaggccgagtagcggttcaacaacagctttctcaacaaatgaaggatggtccgcacacagtatgagtgcataagatttcattgaacgatatttaatgaccacttttgaagtgagaaattgagccaaagaagacaatcccttaccgccaagaaaagatgcttgaacagtcaaaccatacagaaaggaataggcactaggtggggcaaagagctcgttgcatgcacatccaagatagtactcctttagcccacaaatgctgatatatccaacaatgaatttacctaacaagatgtgtatgattaggtcacaggaagcatgtatgaacacaattggaaaattataaactctgatattcaatagataatgtagattcaggagtaacctgatttcttaaaattcaagatatgccttctaatttcttcaacctttccccacccacaactcaaaggatcaatgtgaaggtagactccagcaatacgaggatcatatgccgctttcacaaaattttctgagagttgaggcagagaaagcccagaattgaaacggctctttagctgatcagagatctgaaaaatggagaaacaaaaatccaatttcaacctaactgtagatcatacagagaggatataacaagaaccccaataaggattctactcgcaaaggagatcataacaacagaaaatttgaatgtagccttccgagtcaactaagttcactataaatgctaccggaaccacaaatttacagtcctactactaaaatcagcgtctaagaacgaaacctggccgcgcaatgtcatggtcaagacgcttcccttacgaacacgctgccatggataagcaaataacatccgaaacttcacaacaaaaatctcccacgcgttcctattctcatactccatttctccggtcggatagtcctcatcttttttcccagaaactccatccagcagctgttcctgtttctctttctccatctccgccgaggaagcaggtgaatcgtcgaaggctcgagccgagaatctccgattgtacggagaatgaagacgaggtccgatatgggaaaattggggattcacgaggagaggtcttctgtataaagccgctgcggagaccagtgatctactactactgctgctaaacctaggtattacatgaggcgcgtgaagaagaagtagcttcgccattgtttctctctctcacctgcggaattttccagtgcgaagaaaaagaaaaaaggtgaagaagaaagagattgagtttcttccacgtcgtcactgcttcaccgtgagtgacgtgtgacggtcaaagtcattacgtggactaacggctcgcaatggttcactaatccaatttcggtttcgttcggttcatcgtaaataagagcaatatgaaccaaagtataaaccaaatttggtttaatttatatcgtatatgtctcggttcggtacaaagatggataaaccaggtgactcaatcaataaccgaagaaaattcaattttcaaatgaatctggtatgagtggtttactgtttgatttctctagtgatttctggtaaagcttccgtcttcctccttccatcatcttcttactctcattgactgctacgaaaatatctctccaactatattcttactatcgcttctgggtttcccgaaaatatggaataatctccggcgacgtttttccccaatttgactcttcttccgttaggtgaagtttgtttaaagattctcgctttttcgtctctaatttgtttacgatcagattcgaaatgttatctgttgagtatttgtttgatttttcgtattgatcgtgtagccaagtgttttagaagtcgtgttgcagtaatattaaagctcaaatcttacatttggagtgtgtgcatgtcaattatttccacagcttctgatgaatattgatcgatcttgttaaattgaatgaaatttctgctcatgctttgatttgattagacttatatcgtggattgataggtaactgttcgtattgatctaaaaaaaacattttttgctcactcgtatgaaattaaaaatctcaaattcttgtctttgtctgaaatttgtagcttccagatattcttcttcatttgcaactttgaggcaatggcgctcgatagttctgttgctctgtcacctcgccggcggcatggcttgttgcgagatcaggttcagcttataaaaagaaaggactctggaagatatgagatagttccaatagaggatccattgtcttttgaaaaaggtttctacgctgttattcgtgcttgtcaattattggctcagaagaacgatgggctcattttggttgggttagctggtccttctggagctggcaaaaccattttcactgagaagattctcaattttatgcctagtattgctatcattaacatggacaactataatgatggtactcgtgttatcgatggaaactttgatggtatgcacctctatgtttcacccttctggattctggttatggatttattcaatcattcctttcttatgtatatataatctgaatataaagaacatttgcgattctgttatattttgttacagatccaaggttgactgactatgatacacttcttgacaatatacatggtctaagggatggaaaacctgttcaggttccaatatatgacttcaagtcgagttctcgaataggttacaggtatatatattcttcgttggtgcatttactactatttcaaacttgtggacagacggcgttatacttgaattcctgggaaccacttgttagttgataagagctacacagctgcaatgacttatcagtttcttcgtgctttgtatagaacgcttgaggtgcctagctctcgcattgttattctagaaggcatatatgctttgagtgagaagctacggcctttgctagatcttcgtgtctctgtcactggtggagtgcattttgatcttgttaagcgtgttttgcgggacattcaacgtgctggccaggaacctgaagaaataatccatcagatatctgagacggttttcatgctagtctttgctatcttttattttttagcccagattaatcacccttgctgtcatgcctgctgtttggagttgcttcaaatatggaaaaaacatgaaacgatgtctcctactcctactggatgttttgagtttttttttacagtaaaattttgcttatgtttttttctccaaccaggtttatcctatgtacaaggcgtttattgaacctgatctgaagacagctcagattaagatccttaataagttcaacccattcagtggctttcagaacccaacatatattttaaaggttacagaatttatattgttcataagtgtagtatcgtagcatattatataatctgcaactagctatagcagcaatactttcccggttggagtgatttttgttatcttactgtagtcatcaaaggctgtaacacccgaacaaatgaaggcagctctatctgaagatttcaaggaacgtacagaggaaacttatgacatctatctgttaccaccaggcgaggatcctgaagcatgccaatcatacctcagaatgaggaaccgagatggaaaatacaatctcatgtttgaggtttggccaatacctgtccagactagtttttcttctgtaaacaccatatcatatcaaagctgaacgaatggtttattaatttgatgaatgattaccgttctatgtgttcttaggagtgggttacagatcgtccatttattatatcacccagaataacttttgaagttagtgttcgtcttcttggaggattaatggcactgggttataccattgcaacaatcctgaaaagaaagagtcatatctttgatgatgacaaggtaattgtgaaaactgattggttggaacaactgaatcggacatatgtacaggtaagatctgcttctcttatgtctctcaaaacgtatatactgtctttagagtggtattttgacattaatgatcaagtttgtccaactctattttgaaggtacaaggtaaagaccgtacctttgtcaaaaatgtggcagaccaacttggactggaaggttcatatgttccacatacatatattgaacagatacagctggagaggcttgtgaatgatgttttggtatgagttgtttttaactttttaatacacacagatccggttgattttgtcatgatggtaatttgatatgttccctggtcatgttacaggctttgccagatgacttaaaaacaaaacttagcttagatgatgatacagtttctagccctaaagaagccctctcaagagcttctgttgatagtagaatgaaatatcttcacgggtatcctctcgttccttctccatgattggcaaaatctgagatagagtttaagaatagagacaacatatgttaagccacggaatcacctgacttgtgtaatgattgcacgttttaacagcggcgtatcaaagtcttacacaaacccaagacacaaagtcttgcctaacttgacaagacttgctgttaacaatagaatgttagatgccagagcccctgcttcaccggccactcttccaaatcaggtaatgtggactctatgtttcccctgagatctttcaaatctatagttctgttgttgcaaagtgatactttggcttacaattaaatcaaatgtatggtgttgttctatagggttttatcactcaactttcagaccaaatatcaacactgaacgagaggatggatgaattcacatcccgcattgaagagttgaattccaagatcccgaacaggatagctccttcaggtagtcaacataacttggctttaccaatcgaaaacggtaatgggtctgtcttatcattctccgcatccgcatctcagctcgtaagggaatctcctctgatggaagaggtatgtttaccaactctccaaaatcaaaatcacatatgctcagttctattattgattgcttcactccaatagacaacaacagagcatcagatgcatcaaagagagctttagactcgatagaagtatgaatataagatagagatctaggctcacgatttgaaatataaatcatttctcttcgtgactttataatatttttatcatctggacaggtcgtactggttgctcgtggacagcgtcagataatgcatcaaatggacacactgagtaatcttcttcgggagtatgttggagaaaagactcgcatagagagactcgacagcagcagaacaaacagtacaacacaaaacctcgaatcctctactgtaccgattcttcttggtttggccattggctgtgtgggcatctttgcctacagtcgtctgaaatagttgctctaactgtggaaacccaggcttcgtgaaatagtggcaatgatgtaaataacatggtttgggatacacactggacaaattcagtcttgacaatgtaacatgtgccaagaataaaagactgattcgtttcttaccctttcaatccggttcttcttcgtaaccaaataaatttaaaccgcaacacatttaacaggattgactatttttggctactgatcaaaaaatggagatgatgttaatttataattcttttcaacataattccatgatacaagtcatacaaactttattctatttcacatgtttgtaaactatgaggagatccctagagtcgagcagccaactggttcgaagtgtctatcgttgatccagaagctaaaacttcagtacggttattagaacataagtagttcagtgactgtagccaagagaccaaagaaggcttgcgaatcacatcgtctgactcagccacttgaccatacaattcaccaagcacaacgttctgtctttcttttggtaactttataactagctgtgccaatgacttcataagatatggcaacacctaaaccaaaacaaaaatgtatacaaagacggagagaacattaacgtatgagcacagtaaccattttctagtagctcaagtagatggagatgaccaaaaaagaaacttacttgtatatcaaccaaagagacaagtcgcaaaagcaactcaagaatctgattaccaggatcagactttctgccttgcaatgattcggtgctaaatgtagaagccttctcaacaaggctatgaacagaataaaatatagcaggacttcccgcaggtagatgctggaccaaggttgcaacgccggaagctaaaccttcaaaaggtgtgatctcagggtaaacctgcagttatttcaaccaaccatatacattagagataagaaataaacagaaaaagagctacgtaacattcatattctttttttgcttagttacctccaaagatcgttgcatgtaatagaaaacaagttgttctttgaattgagttcgttcgtcctcctctgattcttttgctgaagagagaaatgctgccaacaacgtatgagatgcttgcgccacttttctgttaggatgtccaatatatctagtcacagaattgttaaggaataggaaagatagtttagtactcgtagttaagtaaaacagagtaaaagacttctcgatcttttctcaaggatacaaaaacatggttgatgcaaccactcccctgaaggcagaagcagataaccgtccgatgcaagttgggattactcgaagataaaacaatattcgagatgtctgcacatcatctcttgaccattcatattttatcctttgcgtaaacaagtctgcagaacaagaaaaaaaaaaaaaaaaaaaagagagattccaaagcttattaatgtaatagccaacagaaaattgtgatatggaaattgcagaaacaagtgatttctcaaacctttcggattcgtcaagctatcataggcaggaatggactctacaaatgaaacacaaggagcatcattctcctggacacatgaaatcacctctctaattgtctccatgtattcaggtaaacgaatatgcctgaaatactctacacaggagaacgaaactaatatcttaactgatgtcaccatttttctttctttagacactattggttttagccattgtttcgtaacagctagcgcaaagacgacaaccataaggaaagatgattctgcaattttctcgatgtctccaagcaatgtatcttctataccacaaagcaacatagcaatttgacggtgctgtaagtagagattttgacagaaatcccaaatcatattctccacaatatacttgttctcttcacttgctgatgaatattgattgcagaaagccccagatatggcccctgattccttgaaaagaacatcagaaagatgctccctgacccaaatgagtcttggtccaataggctctttgccaaaagcattgcaaaatgattcatatatctggcctaaaggaaatacctgagttaacaatgcagaagtgagacacaaaagcagaggagcagaggaagaaacagacccacatcgagccaatgcaatagcaaagcacttcaacaggggaccttctctctgtgtggttggaagtgtaacaacattaccattagaaactaaaatttgagctacaaattctattcgcttttcagctgaatttcttagtttagaaatctccaaactctgtgcaccactactgaatcctgccgtggaagctctcactaccccagctgctgccatgaagacagcgaaaacagcatacttttccttagaagtctctagtacctcgttcgcaaaaagagacatcttgttgatagaattagaccgcatataacctgacacaacccactcaatcaaatgaagaatcatcagaccgtaagtgacagtgccacgaggaccctcgtcttttaaccaaatgccaaacaataaatccaatagtctgacgtaatgaacatccaacgaagaagataaagcatacccaattcctgcaagcactacaggaacaagttcttcttgagatcccactaaagagtactcttcttccaaaagcctgcataacaattccaagcataagactttcacgtctcctgacagagaaggaacacacgcaaacgcaccagaaaccagaacactctgcgctactaaggctggttggagattacgcctgtcatcaacaacgccacgaatggcctgaaccgctacaccaacaagtgcttgagacggtcgaaatgctttcctaatccacacatagagtagtctgagaacaagtgtgtaagactcagacggaagagatacatcttgaaaagctagtatagaaataagtagctttgcttggggatctgcaacatggatagtggactcagagctaaccaaagctctcaaagcttgaaggtaacgtgaatcaaagttttggttttgaagagattcacgaatctcagaccatgcttgaataatcgacctagcagatggagcagaattttgcttcactagatcaccagagacactacttccactcacagtccttaaccattcttcaaggaaaaaactattgttagcttttctcgccatctttaatacaactaattcagtaaatcctcatcaaggtataaaaccctaatcacgacagattatggattgatccaaaactgaaaaacccagaaaaatcgtcgctgaaagataaacagagaaagaacgaaatttcagcataaattcgtcaaactgactcttcaaaatacgcaaaaccagataattaagcgacggaattgaacaaaagagcaaaattgaagaggctttggctacgcagcgagttcaccccgaggtatttcctctctcactctctcgtagataacgagaaaccgccggaaaaccagataatctgcctagtttgcggtgacggagttgtgacgtttgttttgtggttaaggataaaccaaataaaccagaaaaccggagataaaaccgcacggttagtaaaccagctacagaattgttaaatgtctttttcaacttcaatgaggtcaacataatacgtaaacaaactgtaattgcaggtttcgaaatcacatgagctcatttcctcgttgtctacttcccacaaaattcagaaaaagttttgcacaaaacctggaaaaggaaactaattaagtcaacgattcacgtgactggtaacatcgaagctaatttaatttctctttcccttaacaaacacttcttaatcgaaaactagtatagattactgtggtgctaacttcttttttggcatttaaacaaatgtgtacatgatcttttcttttatttctgcttacatgatgctttattattacaacgattagtatcaaatgaagaaagaataaaaagatgagtaaattacatcattacaccagaagtgaaaaaaaataaatcacatgacaaagaagaataaataattcaagacatatacataccaagaaagaatattagctaatatcttatgaattaatcttctagtattagtaaaatatacgtgttttactatatctttgaaaaaataaagaaaacttaaagcaaaaattaagaagacaaatcagtggtgcaaggggtttggaccagatgggacgagtcgtttttcaacgccatatctcgggtcaatctcggatcctcccgccggcaaagctttccgatgattactccggcgaagatctttcaagaacggtgtgaagtcaaacgttttcaccgccaaagctcttcttcccggccggtagtaaagggccggcaaggtaataaccggagaaggaaaagggtttatgggtttggagctgaaattgccaaacaaccctatggagacgaagatgagaagagagatccatagaagaaaccctaagacatgtgagactctagtcgtcgccatggagattaaagatcataggaccatcgaagacataaatgaaatatagtgttaatatatatacgtatacgtatgtgtgtacagagggaaagagaaagagagagatgtgaattggagacagcgttttccaacgaagaaacttcctttgcgttcaaggaagaggaggcctcattaaatttgaagttcgtattaaagtcaaacctctcatcatatattatttattcattatgaatttcaaattgtttttgtacaacagcttaatttacaagcagcataggaaacacaggggaacaaaaattaaatgatcgcttcatgtttttatctaatttgttagcatattgaatgattgattttcttttaatttggatatgttgattgtcttgttgcatcatcaatgtatgttttatttaacaccggaagatcttatgatgggttcattacttcataataatctccgagttctacaagactacaactttcacgtgacttttacagcgacaaaaaatgcatctagcgaaaattaatccacaacctatgcatttttgtcactcttcacacgcgtatgtgcataaatatatagtatatactcgacaatcgatgcgtatgtgtacacaattaccaaaacaattatttgaatattcagacatgggttgacatcaccaagtaatattcacagtatctgaaaactatgttttgacatccctaaatagtttgactaaccagtttaatatgagagcatttgtaagaggcaagagccatggttttgttggctcgtttaatatgctcatttaacccccccaaaaaatactattagatttaaacgtaaaagaattaacgaacacaagaactgctaaaacaaaaaaaaatcaatggccgacatttcatagttcatacatcactaatactaaaagatgcatcatttcactagggtctcatgaaataggagttgacatttttttttgtaacgacagaagttgacatgttaagcatcaatttttttaagagtggattatactagtttttttttttttttttaatgtatggtatgatacaacaacaaaaactataaaatagaaaaagtcagtgaaacctcaaattgaaggaaaaacttttgcacaaaaagagagagagagagaaagaatgtaaatccaaataaatgggcctaattgagaatgctttaactttttttttttggctaaaagagaatgctttaactaagcccataaaatgaacatcaaactcaaagggtaagattaatacatttagaaaacaatagccgaatatttaataagtttaagacatagaggagttttatgtaatttaggaaccgatccatcgttggctgtataaaaaggttacatctccggctaacatatcggcaaaaaaggaacatggccaaggctcgaaagccgaagaacgaggaagctcctggcgcgaagacttcagagaacactggagctaaagttcttcaccagaaactctttctctctattgacttcaaaaaacgccaaatctacgggtccgttttcctctctttctttcgatttttcattcgcgaaacaagtccgtgaatgtgatttttggttgatatatataattcgggatgaagaaaccggcagaatttgaatcttgcaccgacagtattctttggatttttcaatttatggtgaatcctctgcttttgattatttggggttttacttatataccttggttttatcattcttggctgcattttcatgggatatttttgttggctttctatagttacacagagttagaagtgagtgtgccagatattggtattgtgggactacacgcagagaacttgggaattgagagtgttttggtagatggggaacctactgtatttgagtactatccgcaccatcagaactctgaaactgaaagtaactggaactcggtctctgacccagcttcagcagctgatgctgcggccatggaatatgtcggggttcttaagagagaagacactgcaaatttactgatcaactgttgcaagccttctaaggatttatctgaacagctggacagtgtgactttagaaaacggttcccaatcttcaggggaggcaaaacaggtaattgttctgattctcatatacactgccatgggttacaagtgaccgctgtcctttgtttaacgatttatgtttgctcatatgatgcagaatgttaaattgattcggattaactactgggtagagaaaatagagtcaggaattcattttgatgggaacattgtacatactgataaccagatgagacgtgctcgttgttggtttccttgtattgatgatgagtaccatcgttgcaggtattcagttttgttaagaagtaacactgtattcatctcctgtcttttgagatcaaagtgggtatcacaacctgtttaacttttttttttaataactttgtggtgggtgcagtttcgatttggaattcactgttccgcacaactttgtggctgttagtgttgggaaattactctaccaggtaagttgtgtaaatctgtcatacatgaatggattagaggaagtgctattttcttcgatcctgtatcttacgtacaagacatattccattatagatctggattgaatggaaaaacttagaaaaagctgtcattcccgtgacttgtggacgtaggcataaaatctgcgtccaaatttggtttcagcttatatatgaaagaagccatatccagtgctgtttaatctgaaagtgtactatctctatttgcaaggaaacttgttcattgttctgtccttatattatcagaagattttgctgttcagtatagttatctaatgaatctggatcaaacagaagaactttttctctgttattgtaggcatataagctaaaactttgttgaataggtttacagtttccatcattcaattttattagtactcttacaaggtggagggggcgtaatctttaaactttcacacttttcaggttatgtgcaaagaagatactactcaaaaaacgtatgtttatgaactagctattcctattgcaccgcggtgggtgtctttagttgcaggaccattggaaatccttccagatcagaccaactttctcatatctaacttgtgtttgccgcatgatctctcgaggcttcgtaatacaatggaatttttccatgaagcttataggtccgtaaatttgtattctggcaacttattgtagtcaaactgaattaaagtataagtcttgtctactggaattcaacttctacagctactatgaggattatttaagtgcgaactttccatttggattctacaagcaagtatttttacctcctgaaatggttgttacttcgtcgacttcgggagcttccttgagtatctttagctcccacatactatatgatgagagggttattgatcaggtattgtttcctggtaaattgacctgtgggtagataataccttcatcagacacatgcacgtaaatggtttgtatatgctaatattaggatggaaggcacaccagacctaatttgtatgatgcatttttgaaaaaagtacaaccaagcacgtgtctgagcatgttaaatatatttctgcattaccacttatgaatattgcaagctgcgttcatctatttcttgcatttcaccccttcattggcatatggattttggtgtagaagttttcactatgtttataggaagttttctttctttggtggtgtttcgtcatctttttagttcctttatgcaaaaatctgatagagcttcaattatctttgcagacaatagatacacgcattaaacttgcttctgcgttagcaaaacagtggtttggagtttatattactcctgaatcaccaaatgatggtgggcttgtgacatttttctacactttgatttgcgtacgatttgttatatcagcttcatgtgaaaacatgtaattttgtgattcatgattgtccatgttgttataacagattggctccttgatggtcttgctggtttcttaacggatatgtttatcaagcagtttttgggaaataatgaagcacgatatcggagatacaaggtttatacctactactcgagttattcttccctgacgcctctgtaaccatttctgaactaagccatgaacctcatatctggattctcttttttttttttgatccaattgcaggcaaattgtgctgtctgtaaagctgatgatagtggtgcaatgtgcttgagctcatctccttcttgcagggacctatttggaactcattctattggaatgcatgggaagatacgatcatggaaatcagtaagccatattttttcttttcatatttatcattcatgctctcacatttttgtaggagtggatgagttctttgggataatttacatgattttgcatctgttgtttgttacgagtaataattattctctcatttttgaagggagcagtccttcagatgttggagaagcaaatgggctcagactcgtttcgtaaagtatggtcatggtgctatcgttttttcaggaaatcactttgtttgttttcttacgcatatgattaatagaccttctacatgatgatttacagatattgcagaaaattatttctcgagccaaggatccatctaattctatacggtctcttagcacgaaggaggtaacacgactgtgtttgttttacatgttacgctcgaaaagatccacatatttcctttattaaagtttttgtgttttgataaacctcttatttttagttggttaagaaaaataaataaatatgagaaagtattttgatctttcagtataaagtatatatatgtgggatagttgcggtcctaagatagtcatctagcgtaatcttttgggttagctgataacactaaaaggtcaggaagaattctgggatttcttctttgggagtttttcttaactaaatattttcgttgctcctggagcatttttttatttatcgaaatggatctgtctcttagctgtaacttgatatacttcacaaatgtcgtaaatgtgccactcgaccataatgtgatacggccattcatccgtaacttggttcaacaactcataacctaattgttgacaaatatgaagcatctcctccatttgttgtatatttctcttcgtgatcaaccgattatctttcagcttgaattttcgaagtcagttctaatatctgtgtttctcaaatttcacttttgagatgcagttccggcaatttgctaataagattggaaatcttgagcgtccatttcttaaagaattttttcagcgatgggttgcatcttatggttgtcccgtgctaaggtattttttttctaattaagagttacgttcttctgaacttagttcaatggattcctggatcttcatttaatcttatctcgatgttcttactggtgctttattaaactaggattgggttgtcttacaacaaaaggaaaaacaatgttgaaatggctgctctgcgagaatgcacggctgcactggatgcaagattatcagttataggggctacttctgattcagaaagccgggatgtggatgctggctggccgggtattatgagtataagggtttatgaactcgatggaatgtctgatcatccaaagttgcctatggctggagatagatggcagctactggaattaccatgtcattctaaacttgctgctaaacgctatcaaaaaccaaagaagggagggaaacctgatggggctgaagacaatgttgatgctatagcaccgttagaaaataaaacgaggtgggtttctgtggtacactatttctggcattcctggtctgtttacataccttgcaacaacacaagaaagagaactgagactctgagagattgaatctttctctgtagcattgaatctcccttggcttggattaaagctgaccctgagatggaatatattgctgagattcaccttcatcagcccctacaaatgtgggtaagagatcttctctgacacatcttgaaaatctatggtgcacatcacagtcgttatttctttcgctttctacatggttggttcgtgacaagaagctcatgaactagtttacttaggtattatctaactgagtctttctgtgtgttttctgtgtgttgtgctcttacttctagacatctcaaaatcctacattggttacagttcatgtttaatcgtttctcacacttgtgggtttctgtcacttttgatcaggtcaatcaactagagaaggacggagatgttgttgctcaggcacaagcaattgcgtcacttgaagccttaaaacaacactccttttccattgtgaatgcactcaaaaatgtcctcactgactccaaggtttagtccgtctcttgtgtactttttctctaaaaccagtttgaagatgaagttcttgtctccaaaatattattgtgacatataggtcttctggagaatacgtattgcggcagcgtttgcattggctaaaacagcatcagaggtatgataaaaattgttcaatcttatgttccaaagggacaagacgtataataatcaaatttgtaacttgatttaagtgcatagtatgaaggttagcaaaaggcattgattcaaaagtataagattaggaaccttatatgtgcaaattgttatgtttttagaggaatagaaccagctgaaatttcaccatttacaagaaaacttgtgggaaaagaattccattcattcaggtgagaaaaatgataagggaacaaatttaataggaaactttgcatttactacattgcagaagtaatgagtggaaaaaaaattcctctgatctcaacattcctttcatcaatcttccattcatcttaattttcatttatttctagcatgttaccagattttatttgtttctcttttgagattttcatgagtgtatgtctattggttttaactgcatagtatgccatctttcaacttatttttgtaaactgcactttctaaaggcctgcactccttttcgtgacctttgaaacaggtcttactgcaattgttgatttaagctcatttttgtttctagcaggagtctgactgggcgggtttgcaacatctaataaagttttataagagtagaagatttgatgcagagattggactccccaagtgagattggagccttttaatttttggacctctctttggtaaccagcagaagatttctcataaaactgatattctcctttcaggccgaatgacttccgcgatttcccagaatattttgtgcttgaggtaggaaatgagcttgatatagtgtcacgcattgatctcagatgttagctggagatgctatgacgtgtcctttcgatatgacagaaactgtgtctgctctacttagcatataagttgggtatctccttaaaagtttaggctactaattaatatgtcatggtaaaatagataaaagaatgaatgttgagccaacaaagaacataatagaaaataacgagcataaggacacaaatatccagaagcttccttgtgtattcagctttttaggaaaattcgttatgcagtgagggtgtgatttcttgtttctctcttcttagcctgctttcctctgggggtttccattgttattcccctgcctgaaactatggtttgtaacagtttaactcttttgtttcactcggttagcgccagtggttctttggttattgttgagttaaattcatttcttctcttgaactttgaacatttcgtctcttgaatgttttatctaaactattgttattttctacgtcttaggccattccacatgccattgcaatagttaggggtgctgaggggaaaagccctagagaagctgttgaatttatcttacagcttctgaaggtatacatctctattgggtaaattttgtgaaacctttgttgcctactgatatagcctttttataaaagctgttagtctttattcgctgcagtgatttctttcatctatgaaagattaggtgtttcgcttgttttcagtccatattatcatcttaactgatctcgccctttttttcctattccattttatagtacaatgacaacagtgggaattcgtattctgatgtattctggcttgctgtgcttgttcagtcagttggtgatctcgaattctgtcagcaggtctgtgatcttgtaaaagacactctatgatttatctgttgtagtgtaatatttatttttgtcttttcctactgacgctattaggagtaaaaaacccttgaatttggtacatagaaaagacaagatttggtacttagctcatgtattatatagctatcaaaattttgaggcttcattggtttatttagctttatggaggtctcatacttttatggaaaaaaaaacgatttggtctcatacttttatgacaaaaaataaagattcctattattcagttcatatgcaaagatgtggattttagaacttcaatataccagctttgctacatggttaatggttaattgctcaatacttcttgcctctttgtttccctggcagagtctaacgtttttggcccctcttctgaagcgcattgacagactcttgcagtttgacaggtaccctcatgtttgatgttaatgatttgataggttttaacagaacttattactgagagcttgttggagataaatgtactaggttgatgccaagctacaatggcatcttgacaattagctgcatccgaacattggcacagactgctctcaagctttctgattccatcagtttcgtaagttctttcctttcgcttttttcttccaattgctccttatgagatagataccagcggtgattaaaagcttgcaatttactgacttcaggatcacatctgtaaacttattgaacctttccggaattcggatacaatattgcaaattcgtatagaaggaagtagggcacttcttgacatcgagtaccaatccaaaggcataagttccgcacttttgttgtttatgaaatatttggtagaagaatcatctttgagaggttggttatattctcatgctggaacatagcagctttctatttctaatagagttcatttattgcttttatatctttggcccttgattacagggcaggtaaaattgtgtgtacacacaatgcggttatgtcaaatagcagttggatgtgactcagacgattgtgtcgacactgttactcttctggatttgctgcatctattcaagagccatgtagtatttaacaatgaacttcttcgctactacttgttctgcatttttcaaatcctcgctggaaggtctgtagtttacttccttcagtggattttgtttggaatccagttgttctatttgagcctagagggttatttttctctgttttcttctgcttatcaccataattatccacattctgaacagaatatacttattgttgtctcattttcagacccccaacgttgttcggagttcccaaagaaaaacctttgcagcttgttgatgtggaggcctgcattgaaccgaaaaatgtatttttggttcccggagcagaggcaggggagccttcactttcggcacttggagatgccaaaggacaatcgctggatgttgctccttatggtgttccaataataccacaggaaatgttcatgcctattgttcctgaactgatgttgccagaacctgttgcagcgtatgatgagacacagcatcttgaacctcgcatggaaagtcaaaaccaaccttcacatgaaaatcccatcgttcatgagattccatcagatgttgaaggtccaacagaagaattagctcatagggaagcaaaccctccaacaaaggaacctcaaaaagaacctgatgtggtttctgtgtctgttagtcatgaggtgaagaagtctgttatacggatcaaggtcagaccatctggggcaaccagcagagcggaaggatcagcacgaactatagaaagatctcaagggattgtggtacgccatgatatagaccgaggtcaaactagttcagcttcagtggacgccccacagagaatctcaactgacgctgtgagcataagcaatcagaatcacgtggaggaagtaaattcgtgtcacgatgttggttctcgcatgactgcaagcatcggcagtgtaaaatttgcaagcgaaggcgatatttttgggaaagagttgcaatgcactgctgagtctgggaaaccttcgacaagccagaaagcagataataacaaccgaactgtaccacctagcttcttaccactagaccacagtatggaaaacgaggcgcagcagaaatacgcgagcctccaaacactttcgattggtaaagaaaaggaaaagaagaaagacaaggaaaagaaagagaagaagaggaaaagagaagatcccgtttatctagagaagaaacggttaaagaaagagaagaaacgaaaggagaaggaaatggcgaagctcgtgagcagcactacggatccagctaaaaagaagatagagagtgttgcggaggttaaagaagaagaaccaagtgatggtgccatgttgattaaggttgaaccaaagactgaaccatcaacagcagaagctagaccgcttcccaaattccgaatcaaactgaaaagcaaagcgttcaacaactcataaggttagatccgagccagtccctccccgccaaaatctgagtagtaacttttatttccaaaagctttgttgttacaacttgcaaggtgttgtgattatatgtcaatgtaatctgtttattcaatgcgctttagcctctcttgtctagctttggttacacgccagagatgaagcgcgctccacgtcaaattcacgaactaacgttaggattgaaacagtgcacatttaatactaagggaacgatctgacaactacctttaattttatttgatttccagtgcgcaatgtcattaatttagactaatcatattacatcaagaggctaggctaaattacatcgatactaacaattaatggaacggttatctccaaattaaaacaatcagagcttgaatgattttctaaaattttgttaagaaaaataatccaaaaaaaaaaagaaaagaagagagagggttttagacagaaaataaacataaatgaaaagtaaatagagaaaaaacgaaagaggggaaagcgaaggagaagcactgtggaatcgaaaaaacacaaagctgcagcattttctctcaacttggtggcgtcttctctaaccaaccaaccaatcgtctctagtcaaagagaaaaagagcgagcatggaggcaaagctagaaatccttattccgtagtagggaagagaaacagagagaagaaagacgatgaactgttggagagtgttgaaatccgtacaagcctcggtggctcactgctttctcttctctttcacgctcgctttggtgctcaagctcgatcactccattacttactcctggtggttagtttctctcctctcttttttgtctctccttttctctgagactcaaattgtatgaaatcgaagtttttttttttttcttgttcgttgaatttcgagcgcatcattattgcgtcctacaagattgagagagttgaggatttgggttcagaccttattcgttgattttataattctgagcttggttttgtcggaaactgtgaggttttgcttgtatgtggcatctgtcggaacgaattttatgtgagattgttgaaatttagcttcccttgatcgaaaactgtatcgattctcctttagataatggaatccacgatggtaatttttacttaataagaattggaaattgccgtttttggtacttcttgtgtagaagacattaaaagtacatctctatcagctattagacagggaagccatgctagattgtgtcacgtgttgatgtaccaagtactatgtctgtatgaataaacatagggttttgtgtgaggactgcaattggagatgatgtcattatcttgggaatattcttttatagggtttcagattctttgattcttggttgtggaggtgtttttacttggttattcatttcgtcttggtgttggtagcaatcatatatgcaatgggttaatacataacaagtgtatatgcgccgctaatttgggtatgcagggttgtgtgtctaccactgtgggctttccatgctgttgttgcaaggggaagattctcgcttcctgctccaatcgctcctcgtaaccgtcatgtatgtcccttacttcttttaccacaatattattcaaagctcgtgtcatgatttccagttaatagtcgctagaaattactgatctcaggtttaacctttagatgatactctttgaaatttggcatgtaatgatttgtttacattttttttggtgtacagtgggctccatgtcatgctattgtctcaacaccgttgcttatagctttcgaattactcctctgtgtatacctcgagactgcatatggtatataaccacagcttatatgatattgaaaacctcttgttgtttagtatcttgacaaggaaagaaaattatttatgctagcaaatgatgactacatgactctgaaagcttctctttaggacttttggtttttggattaatgtgttaaattaaatagcattacaaagaacttataagcttctgtattttatgttaatttatttgagatgcagctgattcgccgccagctgtgagcttgaagattgtatttctccctttattggcgtttgaagtaataatactggtggacaatgcgaggtacttagataggatactcgtttatcttaccccaattacttcttacaaccatttgttcttcgttttgtgaacaccaaacaaaattagttcacatgatttgtgatacatccctcaattgagaagtgaatctactgagatattctccggtataggaagctagtaacaatgatgtcgagtaataactggaagtagacctatagtaaattttactgtttccttaattggaagagctcttgtaatgatttatctgctattctatactggaagtagacctatagtaaattttactgtttccttaattggaagagctcttgtaatgatttatctgctattctatatggagttcctaatgtactcatcttgtcttcagaatgtgtcgggcactgatgcctggagatgaagagagcgtgaatgatgaagcagtatgggaagctcttcctgtaagtcatactacatttttcaccaacggtcttagctgctgttgaaagtaattggttcagcagcttaagactaggactcttttttctttacttacttaagttgcagttagtttctacctgtgagttatcagtcatatacaaatgataaaccattctctgttttctaataacacgactttgaactctgattctcaagtcatgaattgagacaagttctccttttggtcaatttctgtaactttagcttacacaaagtcaggcttaaaaatcatttctgatctttgttagtgggtgggaagctacttcaaataaaatttacagatgtttttttctttctgcagcatttctgggttgcgatctccatggtgttctttctcgctgctacagtctttaccctccttaagctgtctggtaataatttgccgctgtaatagttaattttaagtatgggcgttatacttcctggaattcacaatcatgtttatagctagatattttctgtctagtgaccattaaaactagacagtttctccagaaaggaaaaacttgaaatcctgcagaatgagtcatgccttaatatgctaaatgtcctttgcatgaaattccctttcgtgtgcacagtgactgacatattcatataatcatagttaacttcagtcgtctcactaaatatatgtatattgtcatatctcttcacatatctaaatcatatcttatataagcaaatgtccattaattccttcttattttatttcaaatcaggcgatgtagctgctcttggctggtgggatttattcattaatttcgggtatgcattgtctttgccgtttctgttacatatgtgaatgtcttaatgctattcgtggaattgagcatgattgtaatcattgtgtacgtttcgcttgcagaatcgcagagtgctttgcgtttcttgtttgtacaaaatggtctaatccagtgattcatagaagctcacgtgatagagaaactgggtcatcttctaccaatattagatatcttgactggaacagtggccttggggttttttcagaagacgataggaaccaagatacatgtggcctgcaagacattggtggtcatataatgaaaatccccctcattgtatttcaagtggtactttgcatgcatctagaggtacacaacatttctatctatcatacatttcttgtgtatctagaggtcatttaccaaaatcgtgtggtttgaactttcaggggactcctgaagctgctaagtctatatctgtccctgtcctgttttctccacttttccttttgcaaggcgttggtgttctatttgctgcttctaaactaatagagaaggttgttctactgctgcgtggcgaagatgatacaggattatattttagatttctatccagagcacatgattgcttgggtttcttgcaccatggatccaggtgataattatgtttagttacttcctgatctgtttttaatgcgtatggaggctaaccataaaatatattttggtagctgcaaccgagttactaacaaacatcaagttgatgcctgacatttgatcctatacgtgctcgcttaggctactaggttggtggtcaattgatgaaggaagccgggaggaggaagctcgactatactttgatcaagaatctgggttagtacaactaaaccttctaaattttccaacgaaaatggttataactacctgctgaagacttccatgaatatatgtggtgcaggtacaataccttctgtggtcatccgcctgaaatagtcaagaaaatgccgaagaaagagcttgcggaggaggtattttgccttttttctcttacatgcaaatatgtcgtcgtttttttgtttgttaagtcttagatctctggtatcattattactcagtgctgttcatgtctttttgtatttgatctataatttggtgtcaggtgtggagacttcaagcagcacttggtgaacaaacagaaatcacgaaattcagtcagcaggaatatgagagactgcaaaatgtaatgctctcacctcttcttcttataaattacacttctcagggtttagctttcacaccgtttctcttttggtgttgcttttcctttggactgaatttcatatctcgatgttctctctgttccaggagaaagtgctgtgtagggtatgttttgaaagagaaatcagtgttgtactgcttccatgtagacaccgtgttctctgcaggtatcataaactattcaatgtttatgcattttcacaggaagaaactgaatttaaagcactaaattagttcggtgattaatccaagtgcaattgcagcctctgatgaaattattgagagctctctgatcatacctgcctgatgtttctgctaacgtgtttggtgccatgtttgttgcagaaactgttcagacaagtgtaaaaaatgccccttctgccgtataactatcgaagagcggctccccgtatatgatgtttaacatctaactagaccgtcttcgtctcttcgacatcaaatatttaagtgtatatatgtgtgtgtatagatgatatgattattcactcctttaagaaactctacattgctgagtcgttttatttgtgtgaatcagcattgagcataggtcgagcagaagtctattgttggataagatcttatgtcttatgtttaggctttttgtagatattatttacctctgacatagttacttcagcgagatattgtttgtataatatttgttttcttatatccttatgtatttctatttctggatctaattttgtggacatcgtctctgtattgaaatcttccaagacgaagaaaacgaaggatcgaatctaccaggaacattgaacaagcagttgtgggtaaatgtactaatttcggccttttcagatatttttggcgggtaattaacagataattctgtacacttttcttgggccgaataatagcccaatgggctaaacggcttattttgaaaatacccaaggcgacgcgagaaacctaacttactccggccgaacgaaatcgaagaagagagagagaaagagagtgagagtgacggcgaggaagaagagaaatgtggttcgccggcggtggtggtggactgaggaagctctgcagagcgtcggctattttcgataatgagataagttataactctttgttggtgagatacatgtccagagaacgagctgtgaacgtccggaagataaaccctaaagttccgatccaagaagcttacgccatttctaattctctctacgatctctttaagctacatggtcctctctccgttcccaacacttggctccgcgctcaggtttttctccctcatttctatgattatattcgtatgaatcttcctaaacctcactaattgatctgaaatcgtaacagtctctgtgatctttgatttttgatccttagtttctacaaacgtttattgattctctgttggttccggatgataataagctctttagatcagtgttataggttatttgtgcagtgtttgtttgagtttattttgtggtttgactcaggtgtgtaatttgctaagggttcttaagaactttaggggttgaaatgttctgatcaatgtgattggtgattgtgttacaatagcaacatgaagctgaggttatgtcaatgttctggagtattaagctctttagttcagtggtatagtttttttacttgtggattgtttgtctctgtttatgtttccattatattagtgactcagctgtgtaatttgcttaggaatttaggtattgaaatgttgtgataaactcagtatttgggttttttttttttttcgtcaaactcagtatttggttattgtgttacatgtaatgtaaacaataggaagctggggttagtggactgaatagcaaaacacatatgaagctattgttgaaatggatgagagggaaaaagatgctcaagttaatctgcaaccaagttggttcctccaaaaagtttttccacactgttttacctgaagatcctctacaagaacaaccggctgctccgattgagaacaagaaacaagccgtcaagaagaaacgaagcaaataaggaaactggagagagcaaatctctgtggacaatattttgtttgtttctgtctccaagggaatgaattgtttgaatctgtttctagtctcagagaaaacgttttttagttgctggtgtagaaattcttgagaaagtcaggaggacttaccttgatctatgaaactcctttcccttcaataaaagaggatcagttacctctgcacaagtaaccaccaatattactttactaacactcacgacgagtttttttggaagttgcatattttcaatttgatctcattgagtcatttctataagaaacaaccttcgtttgtgttgtgaagggataactaattaacagagcatcttccaaccactagtagatataatcagtaaatgatcctacattgaaatttttgtaatttttaaaatattcaactgcgaatcaatgatgggccttaacggtaagcccaatatcacattgtccaaattgtaccaaaaatttgtgaaaaagtaccttttattttatttattcaattaagaaaaacaacagctaacaatgctccatgaatcatttcggagttagccttccgtttttgcgattccttcgaatcaaaatgcaaaattcaccaacgaaaaacccaaactttgagttctaattcatcacgtgtaacgtgtaagacatcttcttctcctcttacaaaccctaatttctctcacgccttcagaaccagccctgttcttattgtattcaatgtggtgattcgattcaaggcattggagctgctaaaatggctgctgttgatttgatctaacgtcttgagcttacaaattttctttctttgggattcaatttcaggctgcgaaagtgtttcatgaagctaacccaccaaatctgagcttagtataagctaaagattcaaactttgatgaagcttttcaattggggaagtataagggacgatgaggtttgatggataggagagtttcttggttacatttgaaatgagtcggtctccatcgttttctgtgaagcctgagctaagtataaagcctgatcctgagtcattgaaacgatggattcatgcattttgcattatgaggtttgatcttgagcaagggcagctcttagaagagtgttatccaccagattgtctctcacaagaagaggaaattgaggtttcttttaactctttcccggattctgtctcacagcatcataatcgttcaagcatacatgactgcattttctttttccggtttcgtagaccaaagaagaacactgaggagagagatggtagtgagaggtacttgtatggttatgtatttaataggcagaggcatgatgaaagattgaaaaggggaggtgaacagaagtctgtggtgatattatcgcatacgccttactcgagtgtgtttaggcctttgttgcaaatcattggtcctttgtattttgatgttggaaataaggctattgaacatattgctggttatgtctctatgtggcctgctcctgtgcctggtaagctaatggagctgcctattggtaatgcaatgcttaaggtgaacttgccgcctgctcatagccttcccttggaaaatgggattttatatgaggaatctgcttcttccatggctccattactccctacaaatcagtctgttcctcaaggtcttttccatgacgcagatctttttggcatttaccggggactattgttgcagctatggacattatgggaattgttactcataggcgagcccatccttatcatagcaccaacacctccgcaatgttctgaggcagttgcttgtcttgtgagtttggttgcgccgctattttgtagtgtcgactttagaccatatttcactatacatgatccaggattcgctcgactaaactcactccgagaaggagacactttcccgccaatggttttgggtgtcaccaatatctttttccttaaagctcttcgtaacatccctcatgttgtctcagttggaacccctgctccaaactcaaaccgtgtagcctttacaagtaggtcggctggtaaattatctgttaaacctgaaggattaggcgtccaacagctttcattaagaaggttctctcctacaaatttgctcaatgctgtaaaacttaggcgagatggacctctgtgtctcatgacagaacacaaggaagctgtctggaccacctactctgcagtaaccaagccagacacttcgattttgaatagacttattgatgctgggatgtcgccaagggttgaggagtcgatgtcagttgtgaataatgagattctgcgacgccatttcctggaattaactacaaatttcttggccccttttggtccatatttccaggtcaatgctccttcagatgggtcttccccatatgttacccctcctgcgctcccatcatttggtgctgatgaattcctttcaaatttatctgggagaggtgtagggaagtttttgtctaaacggatgaaatctaactggcccgacttgtataggtataaacaatattgtctcattctgggctaccaatatttagttcccttgctaaacagttcattatatttcaggcggtttctacgaggacccaacttttcgccttggttccaaagacggcgagctgttgctgaacaagaacagcgtagattatggaggctagctagaatgaagactgatatgaggcagattacgtctcagatgaatgaattggaagctgtggattccttcaatgccattgagaaacacattagtgaggaagtcaaggtaagtttaccttcctttagactcttaatttcatgttcatgttacttctgtgctagattcttttctttggacactcccatgtaaacattacttacatgcctgagagatgtaaagatagattttattttgttagcgatgtacatatctgcatagttaggtagaatacgtaatgataaacataaactagttctctcttcagcagatttggaaccattatgacatatcgaaaacatatattttgcagtcgctggaatcaggaggaggtgcagattcagaaggaacgtttcagaaactgaagaaggatctacaagcggtgttcagtgtgcttccaaaggacatgcagcaacttctgcttttaaatccacaaagagcatctcttcttcaagatccatcagagctccaatgaatgctcttcttcactacggcgtccatgaggattctgatttcttttcttcccttttctgtttcattctttgaactgtaccaaagaaaaaagagaaaaattcttcatcttccctaattgtttactcgttttttcttttgaaacatgagaatcacacaacaccgaaatcactgatcactgctgtatttttaactctataaccagataaatttatccttcttggatccattaaacatgtaactgtaactatgatttatattattacgacaaatgaataaactgtatgacctacagaagttctatgtcaaagtatgcaaagattcgccaactatatgattaattggtctcttcagatcttccaatggaaaggaggaattttctggattcatagcatctttcatgacatcatatcattttcatggaaaccaaaccactagaaacattattatataccatacggctgaaaaaagcatctctcacaacaagatcatttcatcaagggatcaatctttacggtatatgtacactattatagccaagccataggatactggcatagaacacacacatgaagcttacacacaacatcacaatacaaagacaccaaactctacgaggcattgaacattggccatagatcggtttcagctactacactactgtaccctcctttttcttcttcttcaacttcatacctttctgactggtctgcctctgttgaactggtgtctgtttcacaagcagaagccgcgacatcacatatctcaaaagctcttcacggtgagagaatgtgaaatcaaggtgagcatactcaaactcattaaacgatacatcgacctcggcatctctcatcacattgtagtgtttcttcaccatagaggaacggatcaccttgtcgttccttcccgctactaaatccacaggcacatcgatgaacttgtaagactcccctagatcaagcggttcaggagagccataaacctccatgttagctgatctgcttccataatcatacatcctgaatttaccggtgtgtttgatctgagcaagatgttgcgccacacggaaggagacagctggcatgtcgttcatgttgtagtgaggcaatcctaagactccgacccaattcgagctgtctccaccaactacataactcattagagtttggaccaatccaccaagagcaggatagttgtgaaagtcacgggctaacttgttcagaagcattctgaagaatcttgtcggtatgtagaaggcaggcacgatgcgagccaaaactggactaatgaaaaggaatatgtactcaactattgtgaaacctaagttcgagtcctcatgaaacccagcaggtgaaagtaggattagtcgtgagagtctgtgtggcttctccttgatttttcgagtaataacatacatcagaattgcagcaccgcctagactgtgacagatggcacagagcttataaggctcctcctggttgatttcttcatcgatattgggctggcagagcttgagttctgtagtttttatttcatgaattttttctatcatcgctgggatatcttcagtaccgtgctcgttaatggagtatcgccagaacctgcattttggtcaataacaatgaacatttgtacaacttgcaaatatatacatatgatgaaactccactatcataaagaaaccagacagtgcatgtagattaagtaagaagtgaactttaaagcaataactcactcttttgaggatatgttcttgttcacatgatctcttgaaactaaaccccgaaagttacccagaaaaacatcatagcctgtaaaggaaaagagtgtaagaagctgataaatcgttgccgtatgtgaattaataaaagattggaaaatgaaaaacttgaggcttgaaccttggtcatacgcagcaaaagccggagatccaacaaccccattagatacccatctgaagaaaaacacgcagtagagaaaaagagtaatcaataatgtttcataggacatatattagatcaaaacatcagaggattataggatgttccaagtcaaaactaaatctttaagaaggatcggagagaaggaaagggaaaaaagaagatgagataactaaagtaactgaaagcagtatccctcctaatcgcaccaaaagattttcccaaatccatttttgtgtcttgagcaaatcaaacacacacgcaaagttgaagggaacaaattatgaaaataatttttttttgggtaaagagtcaggaacattgaaacgcctaggaatgttatgctacatggatatagaaaataatacttcctcaacttttcagcttactaagtttccaaagtttacgagtcatctaagaactagaccatgaaacttaccccattgaagaatccaaaaccccatgctgcaaaaaaacagctttccttgcatcacgtctgcaaagacaagagtagtcaacgatcacattaagagacaatgtaacaggaatggaaagcatgcacaagcgagcttaatatctaacaagaaagttataccttggtatcctttccaagacaagaacatatccgtcagatgtaataacacgaatagcttcgtaaggatacctaccaagagtaggagagaaatcaagtaaatatcaactacttgagaaagagaaaaaaaaaatggaagcatgagacatcgaatctgcccctttaccccaactctgttatgacatcttgacacgttcgagtatcagtgttcatagagttgtataaacgtgtgggactttcaacgggcctttccgtgggggatggatctgtatctcctaaagtagcagtctgcacagtttcatcataagcaacctcaccatggttttctttagggctgcgactggaagatgagaaccatgataacaatattgcaaaagcttctgatggagaaagaagaagatgcgtagccttgtgaaaaaaatcaaatattgcttctatgccgatctcgatagcaagatgaagatcctgaaaaataaagcacattaagtaggacgagtttgtcaaaaggtttaaaatcacaaaaatgattgtaacattgaatatttgttcgtgcatccacaaacctcaataaccccacgtcttctatcagtagttcggttgggaacatcatggtctttgcttgagttggtcttgctaatacgaggtctagatgaatgttggtgccttctcgggctcgcaggaattcttgaacttcgtttatagaataaacttataatatattgtggtatccatagcaagatccgtacaggaaacattaaccaccaaagaatgaacgtaatccactctgtccagtggttttcagaacttgcagaagtgctagcccaagagaggcgtgagctttgagatgatggtgatggaggcaaaggaccatcactatcttctccagaagaatactccaagcttgaagtatcagaatcaacagaaagctcatgaatgaactcattgaaagaagagaccccactgccatcaaaaacagagtaaaattagcatattttgaaggcttgcaaataaactaacaacagaagaatcatgagaaattattacttatgcatccaccgtggtaaacgtggtccacgaaacgtaggcctgagttcccagccatgtaagccttcaagaatattagccttccctgggagaagggtcaacagaagagctgatactccatttatgcacctcgcaatgttattcaaagactcatatgtaacagtttttactgatctgcactaaaagccaaaacataatcaaaaagcttatttagtttaagcttgttagacaacataagggaaaagaagaacatctaacaaaaagacgaaccaaaaaaaaagaaatagtcatttcaccgactcaaagttcatagccaacatcaactctaaaagacgaagctttgaatgaagatactagaataaaatggtctaacaaaactcaaaaacacaatctaccaatactaattaacaaagagacttactataatcaccaaacgatcaaaaacttaaaaatctctacttgtcatttatgaaacattagaacaactataggcgcatacacagatgaatccactgatgatcgataagaaaaaagactcactctttggttacagcgagagcgttgtccacgatccgttgcattgcttttttctcaaaaatcagatttttttgtttttttggaaatatcagaaaatttgaaaccaaaaaacaatctgattcgtcgccgtaatccgaaaattatcgaggaaaacgacaaagagaaaatttcttatccacctgagaaaacacaaaatttagccagaatagaaatctctcgatgctaggagatattggaccaaatcgcgatcgagatttaatccgaactcaaaataaggaaaacacagagacccacaggagccgcgattcgagaatcaaaaatctaaaaagaaaaaacaaaattggagagaatctgacgaaaataaaataaaaatgggagaatccgattaaataggggcacgtcggcgattcttgccgtccagagaccagaaaatggtgacacgtggacatgtgttattggataatgacgaatgtgacaaaaactacgacacgtaaattcgacttttggataacggagaaggtggatttaccaaacaggcaaacacacaagtacatttgtggttgttttcacttagaaaaatagtacatttgttgtatgttaacgttgaaacattatattatacgaagctatttctaaagcttcataataataataaaaaagtgtttaatatttgcctaaataaatgaaaagatactaattacttaatccctaaaccctctgactgtctccaaaggttctcgttatcttgatctcaagcagcttttaagggcatttcctctggatgtaagaagctccatgctctgcatacctgtcatgtacacaaaaagactcaaaccctagcgatgagaagacactgtttatacgtgagtcgagatctagagagcaatccaatgtgttacttactcagacttggagaaccacatttgctggaatgagcctaacgatgccagtatactaccttacttctaccaagtctttctcgaggcgttctttcaattactgcattgatgatgttccaccagaataatctgttcctaatccaagatgaactcagcatcgataaaaggtagagaaaccagacttttctctctgctgctgtgagttcagaggaggctctgcaagtagcattgggtgctccgtgggatcaatcattagacaattccttgaataataaacatttacacagatgaaatcatcaatcaactataaatggaaaagataaagattaaacagttaaagacaaaaactaacagattctgcaaattacctaaaagcatgatcccatacattgtccaccatatcccaatcagttacaatgccatcctttgtaggtgacaatatctggaacagacaaatgtcaactaatagagagacctgaaaatttatcttcatccctaaccattttgaagtttaataaagaaaactgacctccatttgatcgcggcgaaagttcaaagcttgagatcctgtgtaaagcttccttttgcctttttctttatcagactcctttgcatcctccgtggtgtttgcagcatcatcaatatccattccatttccatctatcgctccaacaaccttataagttatataacacatcaacaacagcaacaacaaaaaacctaaatttctcgaattgcttgctctacactaaaaggacctaactttaaccaattgaaaagagaggaagtaaagaatgagacttacggaagggaaaacagctttaggggcatcttctccggcgtaaccagctttgcaagtgtgagaacctaagtctactacgatagctgacacttcgtctgttcaatatataagaaaccccaccaaggaaaagtttacacctttacgagacgagctcaagcgaaaagggaaagaagtaatgctgaatttgtacaatcagagagagattttagagaggacgaaaataaaacctacctccaccgtacatggctgccgagaatgggagaggtgaagagaggttttctctaccggagcttcgtcggaaggtttaagaacggaaccggaaagtaaactatttaagtgatttcactttgtctcggattgggaagttgaatataaagaagagaaggactaaaacaaacaaacctgaaatatgagggactaaaactaaagaaactgaaaacaaagggactaaaataaaaacaaatatgaaaaaattaaaaatacgccgttgccggggatcgaacccgggtcacccgcgtgacaggcgggaatacttaccactatactacaacgactttgttgctcaagttttctaaatttggtatttcaattggttaactatttcaaattctaaaaatttgttaacgagattccggtaacattcttgttttcttgtggtcaacaagaagcacaatttacgaatgaactcaaaaacaccaaataagaaacgagcatgaagaactcaagtgttgcaacaaataaacacacatcatgtgtgcaataacaattcatgtccatagtcacacacaccaaaccaattgattccaaccttaaatactcagaatccccttactctcccacaaacaaagaagaaagaaacttagtctcctaggaaaaaaatggcttcttctactcttctcatcactcttttaatctccttatcagcattctttctccgaatggttctcgctcaagtaccagctacatgtgcctccagactgctttccttagctccatgtggtccattcgttcaaggctttgcccaacttccggctcagccatgttgtgacagcttaaaccagatctatagccaagaagcaacctgtctctgtctcttcctcaacaacacctctactttgtcccctgcttttccaattaatcaaactcttgctctacaattgcctccgctttgcaacattccagccaattcatccacttgctcctcctccttccctggtacgtaaacaacacttctactttgtcctctcctctgtgagatcaaattggtttcttggaacttacgagaatgttttcggtatataggagaggcgcctagtgattcctcctctgttgctccaccaccttcaagctcaactggttctcaaatctctcaaggtgcaaagaacaactctcgtgtcgctggtaaaccactttttaccaaagttttcagtatctgctaaaaccaaaacatggaaacagttaacatagtgttacttttcactttatcagctactccagtggctcaaatggcaccaagacccaccagttttatgggattaggttatggtttgaaatcctctggctccaagtctgagattcagctaaccatctttgcactcgcagcgatcttacccgccgctctcctcctcatctgagtctttctgcattaactaccatctcggtctcttctgttttgtgttttctcaatgaatcaagatcaactttataactttaccttacatttataaaagaagagattattggaatgattcctaaagaagtttgcagttcagaaatgaaatcggaaaacagaacaatgaagaacaatactcttcttttaactttgaatctataacattatgaacacaacaagctcaagatcaacttggaatatggctttttaaaacaccccaatagcaaaaagtttcagtctttaaattctttctctaaacactgaactgaaactattccaaactaggagccacttctgttgggttggactcaaacacatcttcagagtttgaactctctgcttcatcaagaaggtcacgagattgaatcgcctctttatatactggcgtctccttgaaatccgtcgcaccttcgttatacgtccccgccgcaagtccaccagagattagctgttacaacattttgaaccatagtgaattgattggtttaacttcaaaattggagaattgttataaagcaactgaaaagtacagaaatttaccgcgaaaaggattccgaaagcccacaagtactgaacgaagaaacctagaccatcccacttctcaccttcaaaaggatctggttcaagtccaggaagatccttaatggcaaatttcggcgcatctttcggatcacctctgaatcgagtattcaccaccgttctatctccatcttcgtcgttgataacgatctgagacggcgggttctcgccgtcaaaaccttcgtttccctcttcctgctgttcttagtcgttgtaggaacgagagtccgacgcttcttgctgtcgaaacgaccggtctgtgtggaaggttttttggcggcagagacaacgtgaagaccggttcttgatggattagggaagtttacgagtcggaaggtggagaaagggttacgagaagaatcggtgaggtcgttgcagcggattctagctcctccgccaccgctgctcacggtgagagccatttcctttgttgtgtggatatgtgagagagggaagcgaagccagattcgaagaagataaggaaaacaaaacattcgggtattattaaacttgacccgatatgacccgacccgaccaaattgacccgatttgtttaacaaaaatcacaaacacttatttatgaatcacaatcacaaacacttatttatcatcttacaacaatttaataaaatacactcatgcatatttttttagttcgtgaggaacatactgtattaaggaaaaaaaaaccataattagaattttgtttgactaaatcaaatcatttgtttagtcctaaactaacgacatgttggataaatccatctaaatcattcactgagctcccacgttcttgaatcgcatccaacgctgctttcctcagctccacggctttgatcctctccgtttgatttccggtcacggaatcagcgaaaactcgagctaactcgtccgggtcaggcaccgtgtcaggtccttcgcaagcacgcacacctactttcaactcatcaaccaccagagacgcgtcagtgtactggtcagctctcatcggccacgtcagcatcaaaacgccggcgacaaccgcctccaccacagagttccaaccacagtgcgttaaaaacgcgccaacggctcggtgacgtagcacagctacttgtggagcccatcctctgatcaccagacctctcccagccacgcgatcgtcgaaaccgtccaggatgttgccacgtgttgagtctttctcaacgggctcctttacggcccatatgaaatggacgccgcttttctcaagcccagaggcgagtgcaagagtctgctctttagtcaaaactacttgacttccaaagcacacgtacaccacgtggttatcctcacgtgcgtcaagccacgacatcacgtgatcaacagaaacagaagtcgggccaccacggttatccccagataacggaataattgggcctacagcccatacacgatcatggcccatctctcgcttaagatgttcgagataaacaccttccatggcggtgaacgagttcacgacgagtccccaactcgccacgttatctctaaaggagtctcttatgaactcccaagctggatctccgtgaacgtaacttctgtaaagagaggagatctgatcaaaacggtattttggacaattcgggatcttgggaaagtggaggatctcgttatcgtcatcttcgttgatcttggtgggcatttcgatccagagagtattgagtatgcagcaagtgatagcagcggagggagagaaatcgaaacgagggattccgaggtttttggtccaaccaaggaagaaatcagatacgatggctactggaggagaagggtgagaagtaatccaagagataagcggcgcgtggagattaccaagcgcgtggatcattaaagggaagcctgaaggaggtaagtcttggacgttttcgacgccggaggggattgaagggtgggagggaaaagggaggataagtggttcgatgttaactacggcggagagaagcggagagagaaaaggaaggttttttggagtgactaggacggttatttttaaggcggcgccgccgcggagagcaaggcggtgggtgaagtcgaggaggggaatcatgtgaccttgcgccggaaatgggaagattaagacatgggtctttgtcggcttgttgttttcctcgttcactttcataatgagcttttctagtgggacttttttttgtttatgccggaatgttttggtggagcaaagagaaaagagtgatttaaatagatgtgtgttaactgtaaatggccgatttgtgtacccaatgtattcccaacacttggaaagaatgcttacgacacttttgataataccgtgtggtattttgattaatgcagcgtcagatgacacttgagaagagcttattttggagtgaacagattgagatactttttacgcaacgtctcttacattgttttgcttctagtagcaaaatgggtcttcgctcctcataggtacacgtccagtaacatgctattttggtattaactttttaaaagcagaaagagtaggtgcaagtcttgggtaggtaaggtaaaaaaaaatgtttcaagtaagcaaatctatgtatgggaatgagcccaaaacttgtttatgttttacaatttactgaatctgtttccgaactccaattcagaagcctcgatgagcattcaaaaacctcaagggatggccaagtcaggtggctcggtttagtggttggtgctaacattttggctcattgccagtcattgacaaagccgagttcacatgcgatagcgagatggtcgcttccccaattctgcaaattttcattggtcagagacttgtatgcaactcttccaataatcccagtttttacattcttgaaaaaatgaatagagtaactcgagaaagtaaagggttgccccagaaaaaaagtttagcctagaaaaaaaaacttacctcactaggtagtccacctgttcttctcaatacatctgctggcaaggtctcaagaaccctcacaggaacgagttccttggtatgcctgggttcaaaacctcagattaattattgagatttcaaaattacatgtgcatatatcacaacattgatagccatatataattgaaagctctgattaatgattcggatttcataagcacaacagacttaccatatataatcaacagttccaaggaacctggaatgatacgttgttgccaatggttcaccgcgttgatctctagttctatatgtaccctgcaagatctcaggtcttagcatactagaaggatatataacatcatacaacatgctactttccctaaacgtttttcagtatctagtataaaagaaagccacagttcctaagaacttagttttcctgtaaggcagatttcaactcttttcgatgcgtccaccagtcgagaacaagaaacaaaaacacttacaggaactccactatatgcgctgttaagcttcagttgatgttggacatgagtggtttcttgaccaccagttgcaagctgtaattcttcctggctccactcattgagtagtgatccggagatggatgctgaagcactgacgaaagagggagttgtttagttagactaaattgagatagaaacttcatctgaggattacgtagttgattaagcgcaggccaaagaaaaatataagtaatctatcactctatcagttcatcaggtaaacagaagagatataagcaatctatccgttcatcaggtaggcagaaaaggaatatggatacattatttagagaaaccaaagaccccggtgaattacaagctacctaaatgcataatggtttctgaatgacctctcctttggttccacttcagtctggccagaaatttgcctgcgatcgtgaagttgtgtatccaactgtccaaaattaaaaaaggaatataaagagttcattctaactttcccagtaaagaaaggaaaaaaattatgaccaggcgaaatgtaaaagaaagagtccagaaccctcaatggaactcacatcagctgaagctatgaaatcatagattgcactctgtacagcaaatccagagtaagttttagaattcagctaaaaaataagtattagaacaaaaaaaacaaaagttggtagagatcacctgtggagtgctattcagatcacctgcaatcgccacaggaatatttccccattcctgtgatagcttgtaagccttctccagaaagagtcttacctataagttatgacatatcaaatatcaagaaatgagcgagctacttagaatttcaatgaagtttcaatactgacaggcattgatgtactgatgaataccataaaatagtactagctaaaaaattgacatttctaaactcaggatgtgtagtgacagaaatgctctaccgattttatggataagccagtttttatcagaattttgtaaggatctagcaagacatacctggccaagcttgatatccccacgcttaggattgaataggacatgtatattcccaaccactagccttcgaggactagtagaagtttgcataaatcaaccaaacatggaagtgcgcataaaatttagtaaggatcttaaaagtaagttcaatattcactccagtaaaggaatcagaacagaactcagacatactctgatgatcgcacccgtaatttagactttgggtcctcctcacagttcatctgttccgtaatagacaatcaagtaaattaattaattgcaagggctgaaactaagaaaattaagcaattagcctgcaaagctgaaaacacaacaggagggaaaaatatataaaataatgcccacaattaagcttgtcatatctctgtgcttctagaatcaagaaaagacagaggagaaaagagggggaagacgacaatacagaaataacttaaaacggtgcatacctctaaaacacaaagttgagcaacattgtttcgcataccaaatttatcaaactctatatgttgatggtctagaagttcaaatctgcattcacagcagaaatataacataaatgatgaaactagtagagtaagagtctaatacaaaataaataacatcgagaacaatagaaagcaaagctttcagccttgaacaatatattgtgaagccaaggtcaaagctgataacataacacaacgtgaacctaccattaacaatttcgaaacattcaaaacagataactagaagatctaatttatctcgttccaaaagagagatattccctgtagacaattcaaatggctagattcctgatcctgactccagcatatagagacttcccaccacattaaaaatgatcctaaatagaaaaaaactgaacttacagattctctttccaaaatatagcacaaccatcactcgcttctccagtccgactctaaaaaatactaaatgtatgaaaaaggcaccattgcatacaaggtaataaagcttttgactcgtatatataccttgtgaacacctcgaaatcctctatttttaagaagaacatctaaatcatcaaagcggtcaacctcctgcaataaatttggacatgagaatgcaatgaaacttaaatagtgtagatctaggcaatcccctggaacttgcctgaagacataagatgcttgcattgtaacgactaatctccttgcatatgagatgtttccgtctactccactctaagtgcttccgcggaacattgtaatacaagtccatgtggttcgacgcattgtcaacaccaagtagattgtacgaaactaatactaatttatctgaagaattgaaaaggagatatcaagtttttcatacacataagataaaaatgtgttcaaagtacggaatgtgatacttcgtgaagctaataaaagcatataagtgcattattcagtgtgattgcaatgcacacagacctgctagattttcaaaattgtttgcggaaaacacccattcgcgctcaacggaactcgagatcttctccttagttctccgtcgccggcggagagaagacttactatgtctgacaggtttacaatcacgctggctgaatcccggcgtaaaagaacggtgaggttttaaggttattgactccttcctattcgatttctcgtatacgttctccgattgttccgaaatcgagttacgcttccgcttggtgatggtgattgagttcgccgtcgtgttcttacgctcgtatccgctcatgtcaatcgtagcaagtcggcggcgcgtgagctatgcgtcaaccttgtgaagttaaccaaattcagtcggttgaaattcacgatttttactggttaacgattaaaatacgtacttgataacccaaaccggttggcttaagtagttgcctagttgggctctttatgttggtttttttaattgtgtgatgggctattcagccataactaggccttaatggcttttatttcttgcttcatttgtaaattgttggaaatggcatgttctaatttgaacttgtttcttgttttttttttgttttttttaattacacttgttttctttgtaacatgtcttcgctacgaattttttagtgttcgttattatcacacattatggcttttttctccaattcatttgataaacaaagagttttcatttgatatatacaataaattactcaatcaatcaatctataaaatcatagttgccggctacaagtctacacaaccatcggccccaagagtttcagttcattattcagtacattacgacaattacttcaaaggtcttaattacaagatctttaaagtgttgattaaagtaaatcaaatcacgtcaaaagtgacgtcctcttcacgaaacgacctttgattcgaggtctctgctcagcgttaagtttccgaacctcatatcttattttctttgagaacaacctcgtcctccgcttctccttgtacctcaaaaccctcgcctctctctccccgtccgatcctcctccgtctctcccttgctgacgtgtcaccgatccgtcgctcgacatcaatttctcgtacccacccacaacatgaggcagacacgtgttccctcccaactggatcagtgaactttataacgttatttcgtcttttataatcaatatatatcagctcaaagtcaacggaactcgacactactaaagactaacatagagatgagagatatagctagagacaccaacttaccatgcactccggtttgattccggttttccacggcgaaccgtgattatcccaagcactaatcacagctccataatctaatctcagaaacaaacttgtctttctatctttatcatttgatgcttctctatcactatcctttgatcctccattttcacacttggcttcttcttcttcttcatcttcatctttcaccctcttcaaatccttacaattaatctcaaaccctactttattctcttctttgatgactccaacatcgtttggttccttgaatcccaagcaaagttgttcttcctcaagtaaactctccacgtccatagtgagatcctcaagatccatatccaatggcacgaaccccataaaaccttcatcgtccatgattgccttctcgacttctcctaattctccattagtagtagtgttattgacttcatcaggaactaagcaaaagccgtttatatcatcaatcagcatgtctgagaaaggatcgaaaacaggcacgcaacaattcagactctcctcggtttcttctacggaggagaacgagaaaaagccatcatcttcgtctccaccaagctccggaacaagaggatcgtttgactcgatttgcaacaacttctcaaacgcacaactcttgctcctaggcgttctcgcctttctcctgaatccttcgtaccataccgacgtcgttttgtctgccgtctccgtcggcgaagatgattgtaaccggacacgttcgtgccgtttcgctaaatggttagccgagtggatcgaggcgtcgcagctttggcataggaaagcgtcatcggctggacagtaccaactagcacgtgatctcttcatgcacgcatcacagccacgcgccgccatcttctctcctgtcacgctcgcggttcggctctctacatcgaccaccattgtgtgtgtatattacacagtgagagagttgctgagatggagagagaggccttgagaagaacaaaatactgtaatatatatggttttgcaacgaattcactagtgtgtgtggcgtctcgatttcccggcagtatttttcatttttttcagaattattattttttcattaccttgtgtggtctaaattatttggagtggagatagaaatataaataaaaactcataattctattcatagtttattatgtacgtgtacatggtattttagaatgaggacttttcacgagttttttacttcaaatttacaatttttgttttcattatattacgtactttcaaataaatgtttagaaccatatactttttttttgaaaaattagaaccatatatatactttattcttaaataaaattttgaaccaatatgtctgtaattttgcgctctctccgttttcatgatatagtaaaatatgatcctcaaattcttaattacgatctaaccgctagttcatgtatggtactaaacttcatcattcttttcggaaaataagtcatagtgaaatacagtttggtgaagacactgttatagatggtgtttttttttcgttggcaaacactgttgaagatggttaatatcaaataataaaattgatcttgttgaaatattaaaagacaaaaaaaaatgaaaaatttaagttctgtgtaaaactagctattggtggttagtcaagaggaaacttataatggaacccactggtgatctgattctgcctccttattggttgaaatatactgtcatctccgtttttgcactctgattggctcaagttcttccatggagattcttacgtggaccccacattttcaagttttgttttgaaactattttgtttgttggtgcgtttgcatgaccgcaacgcagcgtgatactttaaacgcaggaagttacttttcatcttttcttttctttttttgtatagcaaacgacattcttttttggaacttccaacaacacctgtgaagttttgtagaacatttaacatccaacttctaatgtttgatgatagaaaaaaggattatatgtcactaaaaatgtaaaatttctgcttttgtgatcttagagatgggtgtttaatcagcacctaaagattcaaatgggtcctaaatttaattattatcatttattgtggatctaacataacggaaatgatatgagtaatggaattctagtcctttaaagaaaggaattgattgtggtgatatagcgacgtgacaatatatacaaatcaagaggttgtgacttcatcgaatttttggcaattttgcagtttacgccaaaagaaacaaggaaacaaacaattttacgccacatgacccacgaacaattgaacatctctctatcataggactcgttcctctgctttacaccaccattttatttatattactttatatggaatttacgcaagttatgtgacatgatatacaaaccttaattatatcaccattcaccaccaagttgaaatctgcacatttttgtgatacatgtgtagaattaataatataacctattgacgaacgagtgaatttcggaagtggaggcacaataggccttgattgatatgagagaccacttgctaacatagatgcgggaaatctttttgctttcatacgtccgattgctctgcgttgaagtgtgatagatcggtacttgaaacagttaaaattatcccaacactaattaataagtattaagtaacaacaataaaaacaaatattcctatattaaagctcgatatgataaataaatgtatcactacaacgttttccttaaatctgaagtattttcttgtctattttgaacgaaattaaagatcaatttaccactactatatttttggttttgttttcataacctatggttttaagtataaagtatgctaactctataatattgtagacggtggaagtaaagtaccacaacacgacgtgtgcccaaatcatacatgatacatattaaaatgttccgttggtcgtcgtaccccaattatatgttacaagttaatcgtttcttaatccaatttataatctgttaaaatactcgttaattttaggcaaggatttgccacgtgtaataaacccgtataaacgattggagaagccaaaaaagacttgttaattactgcgcgtcctcctacattcgcgctctctccctccgtacaacaaacaaaccccaattttttttttcctactctgtatagataatttttaatcattagagaaaaattaatcgtttaattagtttactattatccgctaataataatcaaaagatcaaatcaacccacattcccatcacgtctattttctccgtctctctgttttcttctctcaggttttagacctcctcaacgctcgtttccaagctttcccgataaaaacatcgtcttgattttctaaggtaatgagaacaaagatcgcatctttttttctttctcctcatatctttgttgccatgttgcgattttgctgatcgcgactttgagctatgttttgacttggtttttcaatgttgaatttttttttctcttgttgcaccaatgtacccttctggtaggttcgtctttagttttgtttccttctggctagttttgttttatcaagttttgttcgattgtctcacgttgctgtttttgtcttaatccctcaattcataatgctgtataacggttaaatcatgtgaatttatactgggaactagaaaaaatctcatctttgaatccctagattaatgaaattaatggaaatgtgattgttaggatttagtatcggctttaaatatggaaatatgagaaatttccttataataaattaagaattctcaaattcatcacagtaatccctgactctggttactatgttttattgtcagctaagattttttattacagagtaaagctgattacaatgatgactctgagatagttatgtctagcagtgccatttgatcatgttcttgcacgtctttgcatgtaggaaaagacaaaaagaactaggctttggttttcttttcatctagattgctcttctatgtgtgtgtgtgtgttcttatgaattttgtctaatgctcattttctttccctcaatcaactatgtttcaggagtttttgctaaagaatgcagcagttttggggtttccaggtgtttccataagtttgctttggacctcgaggcgtgatgaatcctatgcgtgatcaaccgggcagcccttatggagattcaactcctcgtagtccgttttctcccttttctccattatctgtagatgataggcatagaaatcatgcagatacaaaaactcctcgtagtcctttctctccattttctccattatccggagatgaaaggcacaaaagtctggcagagtccaaatttcagcaagcccttgccagctctggccaattaggtactctctttttttttttggcaaatcactcataccatttgtctcaatgcgtgcctacttatgtatgtgtatgtataatatttaaatgtcttctatttacggcagatccattatctcctggatcaatgcatcatggaggacacaagtttcatgaggttttccaaatgaaacaggggcgttatgatcttcaagcttcaaagatttctgaaatgatgaaatcaagtagcttagatgtattttctctatcttgttaatgatgaaactatagttttcttttgaagtctattgataatgtcgtgggcttgtgtttgatgcagaatgctcctacgcagtcattgctaagcgtcttgaatggaattctagatgaaagtatcgaaagaaagaatggtgaaatccctcaggtacttgaatgccaacaattattaagatcatcacgtctataagataccttcctttgtgcttttacttcttgggaaatgttttgacaaaagctacaatgaacagcgtgtggcatgcctgttaagaaaagtcgtgcaggagattgagcggcgtatatcaactcaagctgaacatctaagaacggtatgattttgtttacttaggaaaaatgcttcctagcaatgttcaagttctggtttttgtgaataatttcgtttttttgtttatgtgcagcaaaacaatattttcaaaactcgcgaggaaaaataccagtcaaggatcaatgtccttgaagccttagcatcaggaactggtgtagaacacgaggtatcatttgttatgatcttgtcagataacattttactcatgtgttacatatcttctgctctattgatgaacttattcattgccagattgcaacacaacagcttagacagatagaggtacattatacttgtgaactgtttgagcgataatggtatttgtaatttggcaatgacatgaaattaagttttgacctggagttttgtgtatgttagacagaaaagtcaatgtgggaggaaaagaagaaacacgaagaggaagatatggttaagctaatgaaacaaaatgatcagcacaacctcgaaatttctgcgctgaagcaagaactggagacaactaaaagaaaatatgaacaacaatactcgcaaattgaaagccaaacaaaggttggtacattataccgcgagttgttttatgaactgacttattactaattcatcttaacatggcgttacctgtatgatatagacagagaagtcaaagtgggaagaacagaagaaaaatgaagaggaggatatggacaagctattgaaagaaaatgatcagttcaaccttcagatttctgcgttaaggcaagagctggagacaacaagaaaagcgtatgaacagcaatgctcgcaaatggaaagccaaacaatggtcgctacaacaggacttgagagcaggctcaaggaacttgaacaagagggaaaagtggtaaacactgcaaaaaatgcccttgaggaaagggttaaagagcttgaacaaatgggaaaagaagcacattctgctaaaaatgctcttgaggaaaagattaaacagcttcaacaaatggaaaaagaaacaaaaactgctaatacaagccttgaaggaaagatccaagagcttgaacaaaacctcgtaatgtggaagactaaagtcagagaaatggagaaaaagtctgagtccaaccaccaaagatggagtcagaaagaactttcctataaaagctttattgataaccagtctcaggcactactggtatgataaccatatatacatactgtgctaaaataatcattttataatcgacagttggctaattatgctgaatcgcaggagttgaggtcctattcaagatccatcaagcaagaaatactgaaggtacaagagaactatacagaccagttcagccaactaggtgagaatgatctaagtgatgcttttgtagtcatgacaaacctttcatgaccttgcaatttttgtagtgtttataaattaaaatctgtctcttcaggaaagaaactgattgaacttagcaatgctgctgaaaactatcacgctgtactaactgaaaaccggaagcttttcaacgagcttcaggagctaaaaggtactgaggatcatgttcagtatttgttcagatgtgtattttcaaaacttatgcagcccataaattctatagttatgacttgcaggaaacatcagagtgttttgccgggtgaggcctttccttcctgcacagggtgcagcaaacacagtggtcgagtatgtcggtgaagatggagaattagtagttaccaatccaactagacccgggaaagacggtcttcgccagtttaagttcaacaaggtgtatagtccaactgcttcacaaggtgtgttcatctgttaccggttctgttatatatccttatgcttttcagttctgttttgtgtgatctatgcgagaattcatggtacatctcgagaaataatattatattgatatcaccaagttcatttgatattttggattcttgcagctgacgtcttttcagacataagaccgctggttaggtcagtacttgatgggtacaatgtttgtatatttgcatatggccagacaggatcagggaaaacttatacaatggtatgtattcactgttgtttctgagagtaagatttcataggaataacgctgatgcgcttttaccttcgttccctttctttcagactggtccagatggatcaagtgaagaagactggggagtaaattatcgcgctctcaatgatctttttaaaatctctcagtccagaaagggaaacatatcgtatgaagtcggggtgcaaatggtggagatatataatgaacaagtgctcgatctgctgtctgatgacaattctcaaaagaaatatccctttgttttaaatcctggttttgtctttttgttttctcattgctagtgttattgtagccattcctttttgttttccttgaccttcacacaacactagggatcctttctacaactcaacaaaatggcctggctgtgcctgacgcaagcatgtatcctgtgacatcaacttcagatgtgattacattgatggacattggactacagaatcgagccgttggttctactgccttgaatgaaagaagtagtcgttcacataggttctccttcatattcatcctctagaaccaaaacaaatatgtgttttcaacagccctccaggtttttacactgaatctatatgttttcttatgcagcattgtcactgttcacgttcgcggtaaagatttaaagaccggttccgtgctatacggtaatcttcatttggtggatctggcaggaagtgagagagtagatcgctctgaagttacaggagacagactaagagaagcacaacatataaacaagtcgctctcatctcttggagatgtgatattctctctcgcttcaaagagttctcatgtaccatacagaaacagcaagctaacacagcttctccaaacctctcttggttagtgaactttatatatgataaccacattcatgaataagaaatatcataacttttgtttctatgtgatgtggcttataggaggacgagcaaagacactaatgtttgtgcaactcaaccctgacgctacttcatactcagagtcaatgagtaccttgaaatttgcagagcgtgtctctggagtcgaacttggtgctgcaaagacaagtaaagaaggtaaagatgttcgagacttgatggaacaggtaaacagacactttatctcccctctctctccctctgatctctcttaccattaacctaaagatagaatgaatcatttgttgcttttacagttagcgtcccttaaggacaccatagcgagaaaagacgaagagatagagagacttcagcatcagcctcagagacttcagaaatcaatgatgagaagaaaaagcataggacatacagatgacataaactcagatacaggagaatattcatcacaatcaagatactctgttactgacggcgaaagtttagcatcctctgccgaggcagagtacgacgagagactaagcgagattacgtctgatgctgcatctatgggaacacaaggatccattgatgttaccaaaagaccacccagaatttcagacaggtttaaaaccacatcttcatcttgttcttgtggttttaaaagatatatcttttcttcttttaacgttttaagtattggaattgcagagctaagtcggtgactgcaaaatcatctacgagtgtaacacggccactcgataaacttcggaaagtagctacaagaacaacatcgaccgttgctaaggtcacgggcttgacatcatcaagtaaaggcttagcgtcatcaagtaagcaaacttaaaacctataggttttgaagattttttaaaagcattgattagtgtaaagtaggttcaatcatcagattaataataaagagttttgtgacttttgtctaatcgatgatgtttttgcaggcattaagaagacgggaagtacatcaagtttggcaaagtcttcaaaacggtgggcgtaaatcacgtttttttactcatacattacacgtaattcactgcaaatatatcaacttttttgtttcacaaaactttacgtacttatttcccctaaatctctaatatatggcttcgtttgggactagaagttttgcaatattttcatgttaatttgtgtacagaattttgtaaatacatacataaatcttattattctcacgggtcacggcttctctttatcgagtttttttttttattacatatttttaaggtatggttggtaatttctagattaacaaatcatacgactgtgcaattatattaaactattttgtgattccgtaaatttaataaacatatatagtgttattccacaatattttattttgttatattaccccaatcacaacctaaaaaaatccattcccatcattagtatggaacaaataatttgatttatcctccttaaaagtttatacctaatgttgtgattccttgagtgtatgagtcacctaacctcccaataaagcctgaaacttaatagctaataaactaaaaagtagaaagatatagagagcaagaaaaggaaaaacaaagacaaagtataaagtataaagaactaaagcaatctacagtatatccctatctatttattcgatattaaaactttatggttctctttatttggtgggtcttgtctaaaagatctcctacaggctacaatatgaggtgtaaaaacaggaaaataaaatatgaagaagaagaaggatgtgggtggggaaagaataaagggtatattcagagattagattagaatagtggggtcaatgtggaggaaagaaaagtggagtggaatctttttgaagcacctttccaccttgaataattttaactttgytcatcttctcttcacaccaatgcaaattctcttcgttcatttcattcatccttaacactcttgaaaccactttcaaatctattaatcccatcaatatctccatttcctcctctatactcatcttcttcttcctcatgtatttccctcctcgacgcatctctttcagcttcgtctttttctgttcaccattatatatcaacataatgttgttaataatattagaatactactcacaaaaaaagtgagtaaaagacattatttaataatgataaaacttagaaaactttaatactaataaaaaccactacactacatgtcttggttaagtaagactatttttcattgttttgagaagtgagtcatgcataaagtagtagaagatgtggaagttgaagtagtcatataatttatatatattgacctttgtgttgactttcttcatgagatgtacaagggttggatcaacggggcctcgtttacttctcccaaaaaaggctttgatgatcttctgacaaggcttttctttatccgcttggagaaaattcatgaatgttcttatgcattcctccattatcatcaagaacgaagctgacgatatcctcgacctgaaaccctcttcgttctcgtcttccttctcctcctcttcctcataatctacatatccaaacaaattaaaaatttaccaaatcttacctagaatatatagttaccgtatataccaacataccctcaatgattaccttggtattcaggaacaagaagcaatttaggagcaagagttcgcatgcgagcataaatctctggtcttcttccatgttcataaggttcattttctacgtatctttgtaaaagaatgtgaaacgtacggaattggtcggcgattccggcgggacatcctacgtcgttgaagcttcgttgcgtggttgatctttttctctcgaagtttttgtagttccaacttagagcttcccatgttagacatatctgtgccacgtaagcggattctagttccacgtaagggtttggtctcgacccattgctgcctggatattgtttttgttttttcttgtgaccgtttgatgataacttgtgaacgatcctctccgagatagatcttggctccaccataattgacttcaaagattctataaatagacaaaaattagaaaataaaatacaaaccaaaacctatatattgaacactcttttcaatatttactgtataatatatgatgattttcacctgcttcgtgaagcttttgagcagagattctagtgagaaaagtcatttcttcgtcgtacttttggaagacggtgtaagattcccatttagggcaactccggcgagaggacgttgagaaagggtcgtcagttttgacagagtttctccattccgatgagcttttcgacgttgacccattcgtgcatgactctccgaatatttgtcctctctcttcttcttcttcttcctctaattcctctgcttttatctctctcatgtcaaagcccgatgatggctgtatctcgtcgacatcattcttgattcctccattggacacaaactctcttgctatagccaaagagcaaagcaatccacatatttttagctcaaccggtttatcattgattttaaatcataattttaattattgtcatgtgtatatatatatatttttaactatgaagaatatttcatcataagcgtcacatgaatatactaatacctaataattaaattcggatataagacttgtcgtttcagatttttatttcactgattattaaataaaaaatgaaaccgtgttaattttggttatttgtagaaagaaaactacttttgatttgcatgtgaagaatgaaaaataaacatgtgaagaggtgaggagtagaaatcataataccattgtaacttttgtcattgaacaccaaaccactttggaaacgagagggaccacgagtactagtagtatttggttgcttacgaaccaaatcctcaacgacgtcgtatcgtgacactcctcctacctcttcatcttcgtcatcatcatcataacgatcgtcaggaagatcttcaacgccatcatcttcctcttctattgatgattcactgcgataaggagaaacattggcagaagaaaagtgctcctctgtagaagaagtgttagaatcttgatcatcttcttcctcttcttcgtgttcatgagtttgatagacattattgaactccttcgtgtgttgattatttactcctccttgagaaatattattgtaaaacactaaagattctccgtcgtctgctatatcagctatcaaatccggatttggatctctagatatcacatggtaacttgagttacacgacatcttgagttcttccccttcttcttcctcttcctcctcttcttcggaataccatgccgcggaatcatattcatcttcattcctacataataagaaaactattaagatttgtcccaactgagaacaataatgtttaccgattgttttttttatcacttttcagaactatatgaaaaactcatcaaaagcaaccatttacctttatttttagctgtatatatgctaacttccggaaacacgtaaatatgaaactactctacaaaacattgcagaatttaaaagatcttcaatataaaactaagcaatatgctaaaatccgaaaacaagggaaaatgaaacttagtatcatatacatatatatatatatatatatatatatatgtgtgtgtatagagtaaggtgagcatataagcatgtatagatagagacctttggaggagagggtagccgccgatgaagtggagaagcttgattaggagggagacggcggagtagaggaggatgaggagaagaaagaaagatgttgagacattgatgaagagacttgctagtgcttcttcatttgtataacattgcattttaattaaaactctttttctctctttcttttatctttttgtatctttcttcttcttcctatcaaatggagagagagagactacctcggctacaaaatcaaaagcaaagtttgtagttttacaaaaataaaaaatagaaagttgagttgagtgcgtctctttttcttttttttttcttttttttaattctaatcttttaattgtctcaatacatgtttataaatttggacttcttataattttcttgagacaagattatacgcctactcattctttaaagggcatgctgaaattataccaagtgccaagtttaaagatcactgaatcccttgagatatataacccataagtatatctcataatcatttgatttgttatgaatgaattgtgaaatatacatgggttagttattcttacccaaaacttaaaattagcaaaacttgtggaagatgaatgtagtggaagactctatttttacctgaaagaataaaaataaagttgatgatgtttaccgacttaccaaaggcaagaatccaatatatattgaatattatggatgaaataaagaaaactatcttcgtatgaaaattatggatggagacaagataaaaagaagatttctggagcaacaagaaagtgaagaggccaaaaccgtgtcacacgcttctctctaatgtaaacttgtgtttataagcttttgcttttccaaaagacatattatacaatatacatgcatgttacgtgtacaattaacatggtacatgtaaagaaacatattaataatttcatataaatatatttaacgtacatatctaatgcatctctatattttattgttgtgttttgttttgagaaaaatggtaaatttttgaccaaaaaaagagttgatctacaggcgccatagactaataagtctagaattttaaatgggccggaattatactaattgggcccgtattatacttggcccaggtttgttcacaagtactcttgtgttgcgtctttaacacacaggttaagctcggtagcgattaccgacgagaaccatggcgggtaagcagatcggcggagacggaggtttaccggcaaatctcgccggaatgactaaaagtcagctctatgatattatgtctcaaatgaaggttctctcttctttcttttctatacttttccgattatcagctataacactatcctttacggatttgaatagagaacaattgatttcttcttctttttttcgaattctgtttttttgatcagtcgaatctaattgtgcagacgttgattgatcaaaaccatcaacaagcgagggagattctgattcggaaccctcttttgacgaaggctcttttccaggttcttcttcacttcgctaatcttttccatcttctaaatctgcaatccgtgtggtcttataagcaatgaggaattctgatttggagcttcttacttgagtaaattgattggactagtttgggtttagtattgttgaagaagcaggtaggttaacaattagggttttgtgttagtttccagatatgaacaatctttaggtttatgcctctatttacaaatagatttcagaatttgtatatggtgatgatgatgctatgtttgttgaaatgccaggcacaaatcatgctcggaatggttcagcctcctcaagtggtatgtacttgcgtcctcttaagtcattttgttaatagatttcatttcaagcatcttaaattttacaaaaatctgtttctattagactcckaaagttgagccacaagctgtacaacaacctcaacaatctcatcaatctatcccgccaaagccaaacgttcaagctcatatgtcttctttccaaggcggtggcagtgtacatgagccagccaatrcgatgcagccacaagccccgattcgaaaacacccaacaccacaaccaatgcctatgcctccaccaccgcyttctgtttctgcaaatagtgctcaatcacagcctcgtttttcgcatccccagcgtcagggacatctgaatcctgctgtcacttctatgtctcatccacagtcttctcaagttcaaaacgcgcctcctccggcttcccatcatccaacatcccagcaacctccttttcatcatcttgatataccagcttcctccactcagttgcaacaacaaccaatgcactctggtggaggtcctcatgtggcacagcaacagtctagaccatatcatcatcaatatggacaagctcaaactggtccaaacactggatttcagcaccatggcgcacctactcagcatctttctcaacccatgtatcatgtgagtcagagttatgacttatgagtagctattgtcggtttccttttatttccctcattgtgaattatgaagtttttgactgactagaactcgttatttgagccaattttgcagtcaggcaacagaccccctgcttccggtggaggtcaattcccgcagggacagccacatctgcctagtcagccaacatatcaggtattaatactcttactttttgacctttaggcgatatgtttgatgttttgcaggctgagtatgcaataatgttg

SEQ ID NO: 1248 - DNA, 39601 bp, Arabidopsis thaliana
ctttctactggagttttgttgcagcatacataacaatccttcttgggttactcgcatcactctcatttgattctccttggagcagagtttggttctacatcgtcgatgctttggttcacaaggttaggaaattgttatggtaaaatactgcaggtgacaaaatgtttcttacgtgctagtttcattgtcgtccccttctgttgttcttcttctcaaacctcctgctttgtttcacaaaaccagaacatagcttatgttttggttcctctgtactgtctttttgtctttgaataaaagtaatgcctcaaaacatatcttggactggtttggtggttggtttaattcataatatacagtaacacatgaatttcttcaggaaacaatttcatcgtagaaacagtacacattacgaaagacaaatgaatataaatacatttaatttccattttatcttatgttttaccgaaataattttattttatacaactaatttatttcatctatttggatgactagttgaaaattatttgtaaaaaaataaatttgttttcttcgaagctgcgagagttagtcacagttgactatagagattttcttcgaagacaaaatgacgccaacaaacgacgccgttacagatcaacctctgtttcagactttcaggagtaactgatccaagagagcctcctcatcaactccgtcagcgttgggcttcctcaagtctagtggttgttcaacagaattcaaaggccatgacatcaaagagaggcatttcaacaaatatcattgacatataacaaatatcattgaatgattcaaaggtactataacttataaggctaaaccagtcaaaataaacgaatgtgatcacttgaatcttaagtgtttaggtaatagagacttcaacattgtaaatataaccaatattattcgtcgttgaccttgacgttattctgttttcaccggatgtagaaattcttataaacgtggagacacttgtatatatttaactacattgccttgaagtgttttcattaatctttgagtttgagtttcatacattttcttctcttctttttttcttccatcacattttcaatggaagggaaggtgttcttgggtcacaacctgatatgggtgatgctactgatggggcagttacatggatacaaaagttgtattgatgaagaaaagatcgctttgtttgagctcaggaaacacatgatctcaagaactgaatccgagtctgttctccctacttggaccaatgatacaacgagcgattgctgtcgatggaagggcgttgcttgcaatcgtgtaagcggacgggtgaccgagatttcctttggtggactgagcctaaaagataattctctcctaaatctttctttgttgcatccctttgaagatgttcgaagtttgaacttatcaagctccagatgcagtggcttgtttgatgatgtggaaggtataccatactgattactttaaaacatttttctgttgcatgctcactttgatattttccatgtgtggactaattcttatttcattgttttaatacaagaaagtccatatcttctgataatacagtgcttagcttttctctgtctctgcatttacttgctgagaaatgttgcattttgcaatgacatcaaacgttcacttacattctagtcccatttgcatagagttcctctctcactatctccatttgcatgcatcattgctcagcatgtaagtgaactatgttattttcatatactttgttaacaagattcttgtttgcaggttataaaagcctcagaaaattaagaaagttggagattctggatttggcttcaaataaattcaacaacagtatatttcattttcttagtgccgctacatcactcacaactctgtttcttaggtccaacaacatggatggctcttttcctgctaaaggtatctctacattcttaactaaatcatactatctagcgtgacctttctatcgatcatggatcatttgttggcttgatattgctgtaaaatttgtatgtctttaattttagtatgtagcattcttttatttattggactccctttcacttcagaacttagagatttgacaaacttggaattactagacctgagtagaaacagatttaacggctccataccaatacaaggttagttattttaaaattaacgcttgcctttcttttctatattggaaacttaatactagatttaacatctaaaaacaacatttttggaatggtttaagtcatccttaaagttatttgaccttagatgtgtatttgcctttcggcagagttatctagcctaaggaagctgaaagctcttgatctaagtggcaatgaattttctggctcaatggaattacaaggaaagttctgcactgatcttttattttccatccagagtggtgcattcacgtttgttaagtgactaaacttctgcattcggtcattgcagggatttgtgaattgaataatatgcaagagcttgatctcagtcaaaacaaactcgtaggccatctcccctcatgtttaactagcttgactggccttcgagttcttgacctttcatcgaacaaattaactgggacggttccttcttctctcggtagcctacaatcccttgagtacttatcgttgtttgataacgactttgaaggttctttctcatttggttcactcgccaacctctcaaacctaatggtgttgaaactttgctcaaagtccagctctcttcaagtactgtccgaaagttcttggaagccaaaatttcagctgagtgttattgcgctacgatcatgcaacatggagaaggttcctcattttctcctacaccagaaggatttgcgtcatgttgatctctccgacaataatatctctggaaagcttccttcttggttattggcaaacaatacaaaactcaaagttctgcttctacagaataatctctttacaagctttcagatacctaaatctgctcataatctgcttttcctcgatgtgtcagctaatgacttcaaccatctttttcctgagaacattggatggatctttcctcatttacgatatctgaatacatccaagaataattttcaggagaacctgccatcttctcttggtaacatgaatggtatccaatatatggacctatctcgcaacagtttccacgggaatctaccaagaagttttgtgaatggttgttattccatggcgatcttgaagctgtcacataacaaactaagtggagagatttttccagaatcaaccaactttactaatatattggggttgtttatggataacaatctctttacaggaaagattggacaaggtttgcggagcttgataaacttggaactgcttgacatgtcaaacaacaatctcactggtgttattccaagttggattggcgagcttccatccttaactgcacttctgatttcagacaacttcttgaaaggtgacatacctatgtcgttgttcaacaaatcaagtctccagctgctagacctctcagcaaacagtttatctggggtcatacctccacagcatgattcaagaaacggggttgtcttactcctacaagacaataagttatcaggtactattccagacacattgcttgcaaatgtagaaattcttgatctgagaaacaacagattctctggaaagattccggagttcatcaacattcaaaatattagtattcttcttctacgggggaataactttacaggccagattcctcaccagttgtgtggtctaagtaacatccaacttcttgatctttccaacaacagattgaatggaaccataccttcatgtctcagtaatacatcatttggttttggtaaagaatgtacatcatatgattatgatttcggcatttctttcccttctgatgtcttcaatggtttttctctgcatcaagacttctcttccaacaaaaatggtggtatatatttcaaatctctgcttacgcttgatccgttaagtatggactacaaggcagccacacagacgaaaatcgaatttgcaacaaaacacagatatgatgcctacatgggtggaaatctcaagttattgtttggaatggatctctcagaaaatgagctgagtggtgagataccagtagagtttggaggtcttttggaactacgagctctaaatctatctcacaacaacttatcaggtgtgataccaaaaagcatttcaagtatggagaaaatggaaagctttgatctttctttcaacagattacaaggccggatcccatcacaactaacagagctgaccagcctctctgtattcaaagtctcacacaacaacttatcaggagtcattccacagggaagacagtttaacacctttgatgcagaaagctactttggtaatcgtctcctctgtggacaaccaaccaacagaagctgcaacaataatagctatgaagaagcagataatggagtggaagctgatgaatccataatcgacatggtatctttctacttgagttttgctgctgcttatgtgacaatacttattggaatattggcatctctatcttttgattctccttggagcagattttggttctacaaggttgatgctttcatcaaaaaggtgaggaatttattgttgtaaacgactcctgctttgtgtaaaaaaaccagaacataagttatgtatagttcctacgtactatctctgtctttgtctttgaagaaatgtacgatctcaagcatatacaacgaacacctaattacgaattgagagaaaagattaaggaacaactgaaaaaagccataagaaactgcaagtaacacatgacatttgtcacatttgtttgaaaatccatgacacagcagagagtaagtagagacatatgttaagggaaagcattctgtaagatgatgatacaaagccaaaaacagaagcaagacctaaattcagattcaatagaatgtgatgtctctctcaagaccaaaaaagataattctagcttgtaaagaacaaatttcaagaaaatgccgaagctaatgcaataaaataaactgatcaagcaatattcccactcagatggagtaaacccaggaattcgaaagagttaaaaattcagaagctacttgcagagttgatggcttgtagtttcagttcgattttgcctttttcttgtatcttctcatcgtatatggtctcttttggcatttaaaaaagtttcagtcattcagtgaatattaacaaactttttagttagagcaaagaaaataatatttacaaagtaacccctcagccaaaattaacaaaactaccctctccctttgctctctttctcaacaaaacacacataaaaagaaaaggaaaaaaaaactcaaaactccagtagaaggctatcatcatctccgccgcggtttcctttctttccactacttcgtagcaatcgatgttcccaacgccgatgaagggaggtgtcgatggcggcttccacattattttagcgtttggcgattggaaatctagggcttgcgcttcagactataacaatgtgaaacgacgacgtttcaattttcagcggtaaaggtagttgtttccgacgtggctgattaagagagccacatcagcaagtcagttaccgtttgagtgttttggcagaatgttttttaaaggttagaccttttacattaaaattgcatcattcttctatggaaaatcaattatttaggcttaatgttaatctgtatgtgtatatatacattgaactaggaataagctaaagctggaaattgtctttagggctaattagaagaaatagtttttgacttttttccattatgtttattcttcttttctttagtttaatatttgtcctggatcacataatgtgtgaagactgactaaccctgcataacattcatctatctattataacggtttcaaatatatgatatcatgtcatcgttcttttactcttgttccactttacattaattgcacttgaagtatagaaataagttatggcagactctacactgtattattcagaatgagtaaattgtcatgtggctaattccaacaattttgtctttgttagttgtgcttaaacctttgcttaactttatcatgctaagcaccccacaaatatgtcatatgagatgagtacttttccaaagattgactttatatatatatattatattttcttatgcaacttgctttttccatttcctctttgtcaaacagcagtgtatatgcttgtaaaacatgaatatatgtctaaacttacaatccaaattttgaagtttctgactatttttggctctaaccaatggaaaggaaggtgttctcgggtcaaaacctgatatgggttatgctactgttggtacaactacgtggatacaaatgctgtattgaaaaagaaaggaaagctttgttggagctcaagaaatacatgatctcaaaaactgcagattggggccttgactctgttctccctacttggactaatgatacaaagagcaattgttgtcgctgggagggccttaagtgcaatcaaacaagtgggcggattatcgagctttccattggtcagacgaactttaaagagagttctcttttaaatctttctttgctgcatccgtttgaagagcttcgaagtttgaacttatccggggaaatatacaacgaattcaatggcttgtttgatgatgttgaaggtataccaggcttttcacagtgtttaattacccttttggtcttcatttggaaacagttttcatgcagtgaaagtttagaattctagatgatctcatttctttgttctaattcttgtaagttaacgctcttttaatctattgtacttaaattttctcctgcctccagaggttgtaatagtactttattctgtatttactcaaatgagatgtctatgccatgcaatatctttcttgccatgaagtatctttctgtattaactaatctgctgattttcgtttgcaggttatgaaagcttaaggagattaagaaacctggagattttggatctctcttcaaatagtttcaacaacagcatctttccctttcttaatgctgctacatcacttacaactctttttattcagagtaactacatcggtggccccttacctattaaaggtgtgtttttccatttgcatttaggtgcctatgtagcattaattatgatgtatattttgtagttctaatcattcttacttacttctggactgggtttcagaacttaaaaaccttacaaagttggagctgctggacctcagtagaagtggatataacggctccatcccaggtaacatctacgtcatttgtcacagtcttttttcttcagagtagaacgtttacaagatttaactccatacataactgttgaattagcttttgccatcgcaaattaataatatgttccatgctttgtgtctctttgtcgtatggtagagtttactcacctggaaaagctgaaagctctggatctaagtgccaatgatttttccagcttagtggaattgcaaggcaagctttttctaaataggagtggagatgaatatagcttatacatttgaaataatcatttttcaaggtaccatatgttgtctttcactcaatttcagaactaaaggttttgacgaacttggaagtcctgggtcttgcttggaatcatctcgacggaccaataccaaaagaaggtgttctctttatgcttgacctccaagattatctatgtgaacaacataacatttacttacgagttatgagagttatctcatgaatctcgagaaaagaacaactactcttgttattctcatcatcttgttgttttctaaactattttttttgtagttttttgtgaaatgaagaatttgcgtcagcttgatctccgtggaaattatttcgaaggtcagcttcctgtgtgtttaggtaacttgaacaagctgcgggttcttgatctctcatcaaaccagttaagtggaaatctaccagctagtttcaatagcctcgagtccctcgaatatctatcattgtcagataataactttgaaggcttcttctcactcaatccactcgccaacctcacaaagctcaaggtgttcagactttcgtcaacatctgagatgttacaagtagagacagagagcaattggctgccaaaatttcaactgacagttgctgcactacccttttgcagcttggggaaaatccctaattttctcgtctaccaaacaaatttgcgtctagttgatctatccagcaatagattatccggagacattcctacctggctgttggagaataatccagagcttaaagtcttacagttgaagaataattccttcactatctttcagattcctacaatagtgcataagttgcaggtcttggatttttcagcaaatgatatcaccggagtgctccctgataatattggccatgtgcttccaaggctgctacatatgaatggatctcataatgggtttcaagggaatcttccatcgtccatgggtgagatgaatgacatttcattcctggacttgtcttacaataatttctctggggagctacctagaagcttattaacaggttgtttttcattaataaccctgcagctctctcacaacagttttagtggccctattcttccaatacaaacgagactaacttcattgatcgtattgaggatgcataacaacctatttaccggagagatcggagtcggtttgcgtaccttggttaatttgtcaatatttgatgcgtcgaacaatcgtctcacaggtcttatctcaagttcgataccccccgactcgtctcatctgattatgttattgctatcaaacaatctcttagaaggtacgttgccaccttctctgctagccattcatcatcttaattttctggacctctctggaaacctattatctggagacctaccgtcgtcagttgttaattctatgtacgggataaagatattccttcataacaacagcttcacggggccacttcctgtcacgttgttggaaaatgcttacatacttgatttgcggaataataaactctctgggagtatcccacagtttgtcaacaccgggaaaatgataactttattgttgagggggaacaatttaacaggatctataccaaggaagctgtgtgatttgaccagcatcagacttttagatctttcagacaacaagctcaatggcgtcatacctccatgcctcaatcatttatcaactgaattgggagaagggattgggttgagtggcttctctcaggagattagctttggagacagccttcagatggaattttacagatccacatttttggtagatgagttcatgctatactatgattctacatatatgattgttgaaatcgaatttgcagcaaagcaaaggtatgactctttcagtggaggaacacttgactatatgtatgggttggatctatcaagcaatgaattaagtggtgttatcccagcagagcttggagatctctcgaaactacgagccctgaatctatctcgcaatttattgtcgagttctataccagctaacttctccaaactgaaggacattgagagccttgatctttcttataacatgttacagggaaacattcctcaccaactaaccaacctcacttctcttgctgttttcaacgtctctttcaacaatttatcaggaatcattcctcaaggaggacagtttaacaccttcaacgataacagctacttaggaaatcctcttctttgtgggacaccgaccgatagaagttgtgaaggtaagaagaacacaaaggaagcagataacggaggagaagaagaagaagaagatgatgatgatgaagctgctattgacatggtggtcttgtattggactactggttcaacttatgcgattgcgttgatcggcattcttgtacttatgtgcttcgattgtccttggcgtcggacatggctctgcattgtcgacgctttcatagcctctgggaaaagtatgttttcttgaaaccgtttcagctcagttattggatattccttaccaagcaaaagcttgaatacaatgtgtgtcttaatatgtgttttgattttaccttacgtagctatttgattattttgtatggactgaaattcctttctttgtcaattaagggttttttttctgtcttgtttacctttttctataatcgcaacaaaaattatttgtgcttccactatttttttttggttttaatttgcttcatgttgacatgacattctgacggtttcttatacttgctcttgttctctctgtttcactctatctttctttagatataaaacaagagcactaactcgcttcctctctagtctttggtttgtttcttgttctaacacaaagacataaaatgagaagagagaaatatcgaggactacattttgttattgatcgtaaggatcattttacaaacaacacacaacatttttatactagttactattctactacacactcttagactcacttagacttctagatactagccactacgactagatatgattaactctagacacattttattagcaagaacttaagcagctctatattacacatccaacaaggcaacaactctaacgactcgctttactcgtatgacttggttgaatagttagcaaaaccgcttcttttattgggtcctaactaatctaatccctacataaaacacttcaacagtttgggccttgaacaaaaccgatggctcaattgacaaaacacaaacccatttggtttgttgactttgttatccacttttgactcttcttcttcttcttctttcactgtcgacctcgcgtctacttcttcttttctcttcatctttttctcactgattccctattattcgttgtaggatttaatcaaggattcaatttccaatactttcgcctcagtctctaacaaaaataaaataaaaaaatgctcaagtcctaaacaaatggcgattgtctacttaaatcgcatttttctttttcttcatttccagcgatctaataatggactttttcacgccgtcggcgatggagacgtagggtatgaactaaatggagctacgccggtgttttgaattttggctattacaacaatttgtttcaggcgtaactaatccaggatagctttttcctttaaagttcaatgggaattcaaaggtaagaaagaccagtctgtttcttccctaaaatttcgtggagaaaaagtattatagggaatttaaacgaaaatctttgtctaccagtctgtttcttctatttttcgtaactagaaagaccttcacttcactagacttggcttaacttatttcgtggtatattatcattacgcttatgactgtttactacaacgaccttgacttttcctatcatacaaatgatacaattcaaagtaaatgacagcgatcactaagtttacttcgactttttctaaataatacaataatttcttgttgaattttcataaacgtggaggtgtttgcatttttaactcatattcccacattgctttgtggattttatttcttttgcaatggaggggaagcttttcttgggacaatacttgatatgtgtgattttactgttggggcagctacatggatacaaaagctgtattgagaaagaaaggaaggctttgttggagctcaaagcatttctgatcccattgaatgcaggagaatggaacgacaatgttcttagttggaccaatgacacaaagagtgattgttgccagtggatgggggttgagtgcaatcgtaaaagtgggcggattaccaacattgcctttggtataggattcattatagagaaccctctcctaaatctttctctgttgcatccctttgaagatgttagaagtctggacttatcatcctctcgttcgtgcgaagactgtggattcagtggcttgtttgatgacgttgaaggtacaccaggattttactttttttttgttttttgtttacaatggtactttgatcttccccctgcgtttgggtttacttctctaaagaacctatatggactatatcttacttaattaactgtttctaattcttgaaagtttttataccttatggtactcggcttttctttgtttctgtgttgatgtctgtgtgccatgttgcatgttgcaatcacatgttacggtcacttacattcccttcccacttgcgtagagttcatctctcatgatctttcttgcatatgttctcattatatgcttagcaaattctcgtttgcatttattcgtttgtcttttgcaggttacaaaagcctcagtagattaagaaacctggagattctggatctctcttcacatagattcaacaacagcatctttccttttcttaatgccgctacatcccttacaactctttttcttacgtacaacaacatgcatagcccatttcttgttaaaggtgtgtttctccatttttaactaattagtaataactagcgagacctatttactgatgatcgatgtaccttttgttagatcgaatcagtttattttgctataactttatatttctaaatttcagtttgtatcaattttatatatgttgaacttcctttcagaattcaaagatttaacaaatttggaacatctagacttgcgtggaaacagatttaatggctccataccaacacaaggtagttaatttgttcataaatgcttgcttttattggattggtttttgtcatctgttcgtatttaaagctgtttaaatatgtgaattatcattctatgcttagcaagattctcatttgcagattataacagcctaaggagatttagaaagctggagattctggatctctctgataatttattcaatagcaggatctttcccttccttaattctgctacatcacttaaatctctgtctctttggggaaacaacatgggtggcccttttcctgctaaaggtgtgtgtcttctagaatgatctatttattgatttttcttagacttagtttgcgtcatccttatatttgttggactcccatttcagaacttagagatttgacaaacgtggaactgctggacctgagtagaaacagatttaacggctccataccagtacgaggtcaatttgtgtccaaatatgcttgtcttcctttttaatctatctataaaaaaattcatttgattcgtgtcatccttgagatcctatctattctatattgttaggtaatggtgctaagctttatttgccctgaggaagctgaaagccctggatctaagcgataatgaattttcaagctcagtggaattgcaaggcaagtttgctaaaacaaaacccctttctggtaaagaattgtgtttaaattcagatttatgtgctaaagttttaggatctgattaacgtagggacttgcccatggaaaaatatggaagagctcaaactcagtaacaacaaactagctggtcagtttcctctatgtttaactagcttgactggacttcgagttcttgatctttcatcaaatcaattgactgggaacgtaccctctgctctcgctaaccttgaatcccttgagtacctatcactgtttggtaacaacttcgaaggcttcttctcacttggtttactcgccaacctctcaaaacttaaggtgctcagacttgattcacaatccaactcacttgaagtagagtttgaaacgtcttggaagccaaaattccaattggtagttattgcgctacgatcttgcaacttggagaaggttcctcattttctcctacatcaaaaggatttgcatcacgttgatctctctgacaatcaaattcatggaaattttccttcttggctgttagagaacaatacgaaactcgaggttttgcttctacagaataattcttttacgagctttcagctaccgaaatctgctcataacctgcttttcctgaacgtgtcagtcaacaaattcaatcatctctttcttcagaactttgggtggatactccctcatttagtctgtgtgaatttagcctataatggttttcaaggaaatctgccatcttctctggataacatgaagagtattgaatttctagatttgtctcacaacaggttccacgggaagctaccaagaagatttttaaagggttgttataacttaacaatcttgaagctgtcacacaacaaactaagtggagaggtttttccagaagcagccaactttactcgtttatgggtgatgtctatggataacaatctgtttacaggaaatattggaaaaggttttcggagcctaccatctttgaatgtacttgacatttcaaacaacaaactcacaggtgttattccaagttggattggcgaacgtcagggattattcgcactgcagctttcaaacaacatgttggaaggtgaaatacctacttccttgttcaacatatcctatcttcagctactggacctctcttcaaacaggttatctggggatatacctccgcacgtaagttccatatatcatggggcagtgttactcctccaaaacaataatttatcaggggttattccagacacactactactgaatgttattgtacttgatctgagaaataaccgactgtctgggaatcttccggagttcatcaacacccaaaacatcagtattcttcttttgcgggggaacaattttacaggacagattcctcaccagttctgcagtctaagtaacatccaacttctggatctttccaacaacaaattcaatggatcgataccatcatgtcttagcaatacatcatttggtttgaggaaaggggatgattcttatagatatgatgtcccttcaagatttggcacagctaaggatcctgtatattttgaatctctactcatgatagatgaatttaatatggtcaatgaaaccaactcccagacgaaaattgaatttgcaacaaagcacaggtatgatgcctacatgggtggaaatctcaaattattgtttggaatggatctctcagaaaatgagctgagtggtgagatcccggtagagcttggaggtcttgtggaattagaagctctcaatctttctcacaacaacttatcaggagtgatactagaaagcttttcaggtctgaagaatgtggaaagccttgatctttctttcaacagattacaaggtcctatcccactacaacttacagatatgatcagccttgctgtgttcaatgtctcctacaacaacttatcaggaatcgttccacagggaagacagtttaacacctttgagacacaaagctactttggtaatcctcttctctgtgggaagtccatagacataagctgcgcgagcaataactttcacccaacagataatggagtggaagctgatgaatctacagtcgacatggaatctttctactggagttttgttgcagcctatgtgacaatacttcttggaatacttgcatctctctcatttgattctccttggagcagagcttggttctacatcgttgatgctttcgtcctcaaggttaggaatatgttgtggcaaaacactgcaggtaccaaatgttcttacgtgctagtttcattgtcgtccccatctgttgttgttcttctcaaacctcctgctttgtttcacaaaaccagaacataacttatgttttggttcctctgtactgtcttttgtctttaaataaatgtaatgcctcaaacatatcttggagctgctttggttgttggttcaatgcataatctactgaaatacaagaatttgcatgaaacaatagatacagagaattttccattagttgtctttcttcttttatgaattctctttctatatcgctttacagttttttctttaggtagccatctcaagaacttcagtaattacataacacaccatatgattataattctgctgtagaatacggaagacccaagaacgaccataagaatcagcaaagacgaaaaaaaggaccagagtgaaacataacacagttaaagagttagagaaaccacttgtgtatatattttgtcttcttcaacagacttagctactggtcagcaaaaagcgttcgtcgccttcctgactttgcttgcagacggcttgtctctgcatgcacgatttcattaaccagatccttgaagacaagcctctcaacatccagcaccaatcctgacatttctccactgaagtctgcccagttcccagatcgaatcgtcacatcttcagcaagtatacttttcaagaagtcgtcttcttcttccaataaaaagttttctgatctctttgtggcttgcttttgctgtgtttctatcgctgaacacagttctttcagtagttgttgcgcactcacggctttcttagtcaccttagcatatgacttcatcaatggattcgtcgtggcttcaactgacgctagtttctccaccagaatctcattaacgagatcaaacacaagtttccggttgagcttctcatttttcagaaccttactttcttctttgtgtaacagatgcgtagtgctgcttccctttgtctgctcaagaacaaagaacagctcaggattgattgggtggccagaagggtgaagttgaaacgttgtcaatcctgagccaaggtctcttaggagaagacccgaggctaatagaatctcagaaatgtatctatgatcggtggtaggatctgcgttctcacagagcgatgcaatataatcttggctggcttcatcatggctagagttcaatcgtctgagcttttgaaccaagtgctcaacattctgtagcttcttacggtttatctctggcgaaaagcttgatgtggtttctgagaaactgtatgctggattccactggtcctcacaattttcatcaccaaaatcatgggcaacattacctatcacatgatcagctctgagtcaaaaatggaaggaactgaacacccaatccttacattggaaaaaaatcgtaaaagagaaactttcccaaactaaacaagctacagacaaatgtaagagttaactcctggtcatagaatcctaaagtgactttgatgtttgcaagttcttattttatgactgtgatagttgatgaccactaggacactagagatagaatccctttgttaccttgtgtcttcacgggtgatggttcagtctctctgtacgttgaagcgtcgagaacagaaataggacttggatgttccaaagcaactagtgaaaggttagctgacaatccatcttcactaaaccttggactggatttctgaaaacaaaataaaaacaaaccttgtgagaactaagtgaaaaaaatttgtcatctaacactaaagaaatataaatgagagtcagaactcacattctgcattaagttagagactacagctttggctgcctcgattacagatggacttttaccaccatcagcttcagtagatttttctacacaagcagaggcttctgtttcggattgagtacaaatgccatgacttgacgtcctagattcattgcttgcttgactaagttggtcatcaacttgctgcaaactcttctgacccttgggtctacgtctgccaccaggagaagtagattccacaagttgttggtttgacggtttccttgatttgctagaatcaggaggggttggtggccgtgaacgcttatcatactcaagcttcttctgctgtaatcttggacttacagatcctgaactctttgaagcactttctttggaaacctgctgaggcttttttgaagaagaccgcacatttctgctgtcagatttcttatcaaacgagctggtacatgattcagctcttcggtttccaggactacaatcttttgtcacccgtttactattacttgctgaagttcctttatcatcaggtttttctctacggatcttcttgatgccagttaggctgtgaatgggaataagggatgacgcaggaataccagccttctcaacaagcttggcaggtttcataatcacaatcggggattgatatacctggttagatgaagaagactgaactctcgttctggatgacattgcatggttggaagttgcagaattttctctttcataatctctttgaactgcaaagtttgtggattgttgttgtttctcagtatctaggaaaccttttgactgcatagactctaatatttgtttaagggctcgcagatcttttccagaatgtttgaactcaagatcattcaatctccgctccatttcactgtacacagtaggaggaaaattaggtgcttcatacggcttcgctttcacaggcatgctagcttgcttttgcaaaactcggtttctatcagcgtgtttccatggagctggttcaacggggaatcttgtatttgatagaggtttcataacaaaatcagagtttctccatcttggagaagccgggtccttccccaagcttctcggtgagctaggagaaaaacggattgcacggttcagatttttctccctcaatgatcttgagaatggatcgtcattttggtcagagatgttggttttgttcagaccaaactgatgaatgtctctacccaatggagaaccgggcaatgtctccaatcccatgagctttgctacaacactgggaggccgtttcttgctactgcttgaacagctttcactgaaactttctgaaagcttacttgatttgggatcaacactggagtttcgcgtcgctcgttctctactatccagcgaaagcctaggcaactctttcagcttctgtctggatttcaacgtatcatgagaatcaactgagtaacgaggcgcatctttcatgccaagctcgttataatgttgagatgtttctctaagtcttgctagaactctgaaggactcattgagatccatgggagttgattgcttcaaaccataaggccttggagaatcctctcgtctgctctgtctaactacttcctctctagtcattggagtcttactcaaaagccctctggcttctctgtacattgagtctctcacaacatctctgaggtcaagtcccaaatgtgaaaatccattcccttcagtcatctcaggatcacttgtaggagattcttgaaaattagctcggtcatacgcagaagcgtcaggttgaactcctctattgaactcagaagacgatggggaggaagagcacgaagatgagaaagaaactctagatgattctgttgaaacccttcgcttctctttcacattcccaccaatgttggagtcctgaaactgaaatgcaagaaccttagatcttatagaaaacctctgtatatgaatgaaatcgtagatggttggcaaaagaaccaacttacagtttctttttgttgataaattgtatcaacagagtctctttcataattgatgttaatggcatttccattacctgcaacaagcacataaaacaagcatgagcatcatatcaaaactctcaaacaaggaacacccgattacgcattgagagagacgtttaataaaacctacaagaacctgctagtcaaacttgaatttatcacatttggttggaaactccatgagcctaaaggttaataaaagtcaaaatctagcaagaaaaaaccggccataagggaaaaattaaatctaaccaaaagattcggcagatcaacacaactgagaaagaaaaagtaacaaccataactttagatctctgagactataacaagacctggttaatgaaagaatcactccattggcagataaagagccaaaacaaaaacagagaagaataaacatacaaaaacacatggatgtaagaataacatatgtgaccatatacaagtcaacgactactggacacgaaccatagagatcagaagagagtgtttaaattatcaaacaatataaatatatagtaattattaatttacctaaagtaagactttttcgtcggccagtaagaacatggtgacgatcaaagatttgaaaaatcccattcatacatccaatttgcttctgcagatctgcactatcatctgccaatgaatgcagaagcttcgcagccattttctacagatcacaaaaacaattctccggcgccggaaactttctacttaaagattcaaaaagacttctccttttttctttttggctttgaaagctttcttctatgatgtgttcccctttactgatttcccaaaaacccaaactttatgcctcaatgatgtgtttgcaataatttggaagagataactttaaaagctttctttttttctttctccatcatcaaacagtaaccaccattaaaactataacgagaatgacgcaccttccatattcataaaactccaaaattttagcccttctctttgtagaaaaaaaccgtttaagatttcaaatcagaagaaacccattgtcttctccagcttaattaaagctcaagaaaacccctaaattaatctgagtcctacactaacagcaatcaaacctacggatcttaaaaaggaaataaagtttaaacctttttacaaacctaagattcccagattccactgaagacaaaaggagggagaaagataaaaacccttttggtaattagatccaatcttcaataaactactaaaccataaacagaacactagaacatgtgtgccccttttgtctgagaagtttgttgtcctaaaacacggaatgtgtgagtttaaatctacagaaccaatgaaaagaaagagttgcagaaagcaaagaaaccgccaaatcaagaagaagagagattaaagaaagaaaggaacaaaggaatctcctacagatccaagaagagactaaatgttcctctgttttgtactctctctctctctctctcactgctataactgctcagagaacaaaccggaaattcagccacatatggggactggggttccttattggaaaatggcaggattctttttttttttcctaaataaaatgtgagcaaaaaaaccacttatttagattatcatattaaataggtaataaaagaaaaatagagtaaaagagagagacattggagaaggggtgtgtgtggagatacagaggctctacatctcacaaaagcatgtgagagagtggatctgttttttacttctcctagatgcatgtgacctctgtgtcaggtcatcaacatatccagagaatgattcattttttttggttttctgtcaccaaatttatgtttattaaagatcatggatttgaaacttgaaatacaaattatcactagtatcttccttcataatcacaccaaatacaacttttcacatataagtataatgttcttggtaagattttatttgcattttgatcaactcagtgagatctttttttctatgctaaaaactgtcggcaagttagaataattaacaatatatcataacaaacagacgttaattcttggcttttttatgactcggatattaaaattcatacaaaaacaaaaaagaactaagattacggcatgatattaatttaaacattttatctgagcactaagtttgattaacatcaccatcaaaacgatataaaaatgtatgaatctactacaattagaagaccttcacaattttttggtctttaatatttgccggtgaggtcacggatgtgcattaaattaccacccgcataggtagggaaaactgcgtaaccaaagtaaaatttagaaatacttttttccatattttcccccaaaatgtatttttttctttaaaagctaattagtcaatttctgcttctttgtccttgaaacaaaaaaattgtcatttctctgttccctttcgctttatagatttctcacgtcgaaatgtctccagttttttcatctcaacaccttattcttgttgttctttttcgtgtcattttcgactcttaattatccataattgacaaccacataaattgtttttgacttttctttctctaactcaactaggtggcgtatactatagagagtctagtagcctaaatcgggtaatgtaatttcttacgttacttaaaacaaaacaatacatgtaaaaaagaaaagcataaaatagttactaaaaagcattattaactttactgaatattcatgatttatgtaatgcaatttggagccacgaaataacaacaaaaaaaatgggtgtctcgagctttaaaagtcgcgaaatgtttatttttctcttcttagtggaactctttctcttttcttaaacaaaaaatagtgaaactctttctgtcttttgcatggaacttattaaaagcaatattgaggataaaataagagtttgaaagatataaaaggtacgtatagtagtacgtcgtagtaagtaaagaaaccaaatgggtgtatatatatatatatatatatatactttttaacaaaatatgttaattagtcacaaaattagttgaagtatatacatcctttagtggttgggtttgccaacaaagataatttggacttctatatacctcatctccaaattatatttttttcgtatcacacaattatgtattttatttttgacatattaacattgttatgaatttaactaacgatgctaattggaaattatagcatttttctccatggaaatagctagtacaagaaaaacgtacgtatttggtaaaagaacaaaagcattaagacatgtcaaagaaattggttatgaattaatgagagaaataactacggttggtaatatagcaatcccttaaagtgattatctcgtgtatctctctgctttctttagcatttactcttttttgtcgttggatccgaacgtgtataaacataattttttatttttatttttattttgtgcatagatgtgtatgactgtactatagatactccatagtatcataattaacaatttctaaagctacacataatagagtatatatgtaaagttaatagttgcataagtaaagcggttttcggaaaaaaaaaaaacaagttgcataagtaaaagctaaagtggtctttggtcaaagattaaaaatgctcaatcatcgaggcacatggtttctcgccgttaatgatttgtcaaaaacttgtaatcatcgaatttttgtctctttactttgtatctattgatcaatggtttacgttaagtcgttaactatcattacaaagatctatgtcaaactttaatttctatagttggtgtaaaaaagcaagagatcttttctatataaaaaaaacaaattaaagtctatatattgtcacatcatataaaagcaaaacttattgctaaagaaccagagactcaatccgaagagttttaataagccataagttaatgccttattccacctgtaaagtttcttcaaaggtaattttactctgtttacgtgcgtgttgcttgtccaaatcagattaattctggtgattatgtaagctgtgtgaaaaatgttttttaaatgcaaatttgaaaccaaatacagaacaagaagcaaaagacctcaattcaaatgttagcttcttctgcaattcattagttttcttctacttagcttctaaaccaaattctatctccagctactacttactgtacatccccctcaaaaagatccttcctgatgttaatgctgttgtggttgcggccctacgtttgcatcttcttcagcagatgttccctcctctgtttgaatccaagggatgagtaagacttattactcaattgttaagaaagaactgcttaatcatgtattttcatgtttcaccttgctttcgtgtcgatgaatctactccaggatcagcttttgcagcatctgttgatatcacattcacctgatcatgagaaaccggtaatggatctgtgttcacaatcccctgcaaagtattccatatataaattctggtaagaaacagcatcattctaaatagcaaaagctgttgtagataatgtcacaccttatcgagttgagaagcatcttgatctttggcatcaatggtaacggcagcggtttctgcttcatgtgttccctccatgttcacattagcatcgacagtgtcaatcatgggtgtgtccgtatcatttgaatctgcaaccttcttgttagtatcatcagaaggatcagtaggaccagcttgttggctactaccagctggatccttgctaaaagttcttggtatctttgctctatgatcacaatctccatctgacgtagcaggcctttccctgttaacaatcacaaataaaccatgctttagaacaaaggggacacaagagaaactataacctaagcaaaaaagagaataataactaacacttgcctactactaatgcttgaatctgcaattcgcacagagctgtgtctgtttgaaaacaaaacaccgcgaagaacctttccatcaatgatcgtttctatagtgtaacctagaggggcgttttcagtaaccctggcttgaaacatcggttttctttgatcaatatagccaatgttcaaagggacattctctcttcctacaataacaccgtatacaataaatgctacattttttgttcccaagataatgtcgattaaagtaagagttcatgttagcacaccatggtcaatgttggttttggccacagttaattcctgcccttggcattttagcttcatttgtttccttagagacgatctccctggattttgatgaaaccggacatcgtatctaccttctattagccataagcaaagaagattaggagaataattagcaaccttgcacaaaagcaaatttgctataaccaaatacagaatattagctacagatactgaagaatcagagaaaacccgataggtcctaacaaacctgtgtgtaagtagtaaatgtcatccaacggctcaagattcttattgcagccaccaacaaagaaaaacgaaccagccttgtaaggatctaaacaaaccgctgcagaagagaatctagcagatggcccttctaccatagcaacaaccttggaccatacacccgtttctacagagacaacccaacaataataattattttgacttcagagactattgagaattgaaggcttgtcattagtgaagcttttggttacatacccaaatcaagcacatatagatcatcataaagattttgagaatccgtaaaccctccaaagacaaataagttcctctcaagtgcaacagttacatgaccggctcgaggtgttaacacctgtcctgaagttttcaattccttccaaacaaatttatctgaaaatacagaaccagaatatcagaagaaatacacacaagcattacaagatgtgcttaaagaatgatttttgcacctgtatcaaggatatgaacatcagagagataatagtcatccaaatcttcaccacctactacaatgattttgttcttccacgctgagcaagtgtggctatctcgtgcagagggcggtttcccagatgttacagcacgtttccacatgtaagtttctaaacaagattaaagccggttcagttacacgcatgcctccacgaaaatgacatcaaatttttataattcaaaaattaatgcacattgtggctaacatccaatatgtatgtcaatgctcacataaggagtcagttgaaaaatgcccattctctaatctctctcagattccatatcagttgactatagataatatatgaagaggattaacatggaaactaaaaaaagcagcctaagcagtatacctgtattaagtatgtaaaggtcattatagaatacttcatcatccgaatcagaagatttcccacagccgccaaatatgaaaagacgtttgtcaacaagcgctgcactatgagcctctctaacccttggtccttcccctctaatatccggacgtatccaagtgtgtgaatctaccacacacaaaaaaagagaagcaaacccaaaaacaaagaattggattcaaactcaaaaacgtcaaaccaggaacagttaacacaagcatttttttaatctaaccgggtaacaaaagaaacgatggaagagcttacaagtatcaaggatgtgcacatcgttgagatatttggtcccatcagtaccaccaaacacaaaaaggttatcaccaactgttgtacagctatgactgtccctcgggcagggcggtacgccattgatttcaggtcgaatccatatctgcgtctctgcaacaaaattgccacaaatgagactagtttcaacaatgaaaattttgaaaacatgactacgagtaaaccacaaaatagcatcccaacaaatagtatatattaaatcttgaaaaaggatcataaagtccaaatcattcaagtaaggtataacaaagaaagaaacattgagtaggttactaaaggacaaaggaaaaagatcaagatttgcaacaaaataagataagtttgtgggagtggggtctaccgcacgagcaaattgaacaaaatcatcgatacatacagagatcctcaaagattaagactttatgcaaaacccactaagagaatcgacgcacaagaactgatatttgtagaaaagatactaaccagcgtcgaagacatgaacttgatttgttaagcaattgtctctgccaaagccaccaaatacgtagagaaatctgccgcctttaatggcgttacaagtgtgtccccatctctttccggggccgaaagaagaagaatcaccgagacccacttgttggaccctctcccacctcattgtcttggaagaaagatccttcctttgcgttgagaaagtgcgggaaaattaagggttttgtggaatagaagattataaaattgaagacgagaagaggaaaatccaaaatcccaaaattatttctttaatggtaatggcgatacagaggaatataaaggtgattcctttgctttaggtttttctctaataacaatgtattaaagtatatacactctaatacacgattattgaaacaatggttactgcaaaagaaaagaaaaaaaaaaagaaacagttaccgaaattaaaacaatggtgcgacgacgtaactgaataaatggactgattcgtgataaacggagccttctttacttttttatgttgagctttaattcgaatgagtaatgatgtcaacaacaacaacaaaaataatccaatgagtaatctttcttaccttaaagtctatgtgtccaatgagtaattcgtggtacccgtaattaattgttacatacacaaattaataataacatggtaaaagtctaaaagaaattaacgtaacggcatagttaaatagaaaattgtcaaaggaaatatattgaatatttttgcagttaatggagtaaaattcattgtttgtcctatataatctttgtgattgacgtgaaaagacaaccatatcttggggatgagacttggaataaatgtcaagacattaaccttaagataatctacaatgttcaaataaaagttccaattttgacgataaagagagaaaaaaaaatagtttccaatgtaaccaaacggtccaaacccatcaaattgatctcttggtttcagtttacaaaacaaaagtccaacccaaacgaaaaaatgttgacaaaaatctcatttgtcacgaagtttaacataacttgcatgatgatgatcaggtccactgaatcttttgcagcaaatcagttcagtatcaaaatcgacctttctttatccgtgcccacgccatggcagcaaccacaactcctcccaactgacccgaactcgatgcgatatggttcggtcccccctgcattcccaaaaaagttatggttaagagatagtcatatatagtgtttcaaagcaaatgcggattaggttttcagattatacacacctctggaatatttaaaatctcgactcctaagtttatgattcgctgaagattaaagagtgcgagttttttagttggttcacatgactttcactcaataagaagagtatgtagagagttcttacaaacattacatgcactcggagcatcaacgcaaagtatgttgtaacttttgggtagatgaacatatcgagaagcgcgatggcaaacatagatccatcagcaccctgtacacaaataggaaagagtttacctcatcggcatttggtgatccaaaaacaagtgcatgtgcattttcgtctcactctctatatctatcaaccaagtctgttcatgctcagacaaatcatttagttaggtgagtacgaacataccagcagctgcgaaatgggggctgttgattgatgatccttaatgacaactccttcaccctgtatgattgaccagccaatatcaaaggtaaagcatttcgtttaatctccagaggtaaaatcatttagtctaaacctcaaaacttcgttttgcacatataacatgtactgcaaatgaaatgcaacatgatcaatgaaagaaactatcaatctgtggaccttgttgggtaagcttcaagtcttgaagcccaagacaacttaaacaagtcggtttaagttatgtcaaaaagagtaattatctagttcaagaagaaaaggaaaaaaggagtttcctaattcatgtaggactaggaataggaaattgcagtgtgtgctaaccctatatatatgtttgttgagttgtggcaaacataagagaaaacattaaaagagctttggtgtttagtttttgagagagttttctaatcatcaataaaagagagttattcttttaaaagcttttttatagcatgatttaaggaaacttgctatataccttgagtgtagccaagagggcgtgataactcaggaagcaaacagagccaccaagtgctccagcaaagtacagcttcaaaaggtagagcggtcccaaggttcttgcaatctaatagcaacaatggattttagagatgaagataaatagttaattcaatggatagatcagcaggtagcaaatttcccaaaaagaaccgacttaatagtatctagctaaggacttttctttcttaagtatattagctattagtgaatgtgtctccaataaagtgaaagtagccacttcataggaaacaaatgaaagcatttctcatctcatttacaaaaatcgaatattgagaagcatttttctatggagaaacgacaaggaaagataattcatactctggagccgaagtaggagattccaatcatgttcaagatgatttgactggtaccaatatgactaaaacccgaagttatcagcgtgtgtatatatccactcgtaaaactgtacgttgatagctgctcaaaaatcaaggttcaaacatatcaaagatcaaccaaatccaagacaagagcttagcagtaatatgttagaccacaaaatttttcaccatccagctcctgtctgaaactcgccacattgtaaatacagcagcattagctattaccagtccaaaaactacaccattagctccattgatccaagacttcctgccagaggaaaacacaaaccaaaatcaactagagctggtgaagaattttaagattctgatgttatttctatatctggagaacaaagttttaatgagaagggtgtgtacagtgtcgagctgctagtctatctataaagagaaaatcatcaaatgaacgttgcgctactcaaatcaacaactacacagaaatggcaaaatagcaagtaaagcctactaatttctcatcttcttctctgaaattctcatacatgtcgtatgtcttggacgagccaaacgtgtacttaaccagaaaagcttaaaaaggtcgataatttaccacagaaactctgtttaaaccctaaatcaaaaccagaaatttcatccggaagacaagtttatctcagaaaaatgtagacttttacttagctaacgagaaacagaggatcatagagaaaaggaactcagaaatttcagaacttttcttaggaaagcttcgaactttactttgaaacccagcaaaatcacaaaaagagagacgaaaagaaacgattccataccatccccgcttttgaaacccagtaaaaccaccagactcgaatccatgactaggaagctcagaactgaagaacccagctctagattccataacatttccaaatttcagctttaggttggtgtttcccaacttgctagcgaagaacccatgaactttcgccgatcgcgatacagcagaaggaacaaagtggggtactgaagaaggagatgagaggcgagaaggaagaagatggcgactctggtttggcttcttcttcaccattttggttagctgcgattgcgaagaagcaccaacgttgacgacgaccttgcgagagaagctcgagaaaatcgcatgcattttttctcctttttcttcggaataaattttcaattttttataccaaatgcatgaacttctgattgttttattgtcatgagacaccatgaggtatgtgtgttaaaaacgtcaccttttttttagtgcaatcaaaagtgacgtcacactaaacactagtaaaataaaataaaatcacatgctcattcccgtttaggaaagttgtaaatttaaaccataacttttccatctccaaaatcacaatttacatacatcaaattatcaagtaaccataaccagaaactgctatatcttattattcatcttctcgctattgctgcaaccgcaatagtgtaaaagaagaatcaaagcaaattcaccatcaaatcttgtactagaaatcggttaagtagtctttcacaaactcacataatgagatttactcgacatcaaaacaattatgtaattggacactgaacaattcctagaatgtacccaagtgactagaatctactctctctctgttctctataaaacggctaacttaaacaaagtcacaaagatcctcaacttgacaaaatgaggaaaaatttgcatttgtcttttcacaataattttttataatctttttggatattctcataagtatttatttgcatgttagtactatttgtaaggaaaaaggatttagtctttatagtttaggtttgtctattttaaaggaatagataattcgttgtttttctgtataatccttgtgattgacttcaaaagaaaacaatagcttggtgagaagacttggaataaatgtcaagacaataaccttaagataatcttcaatgttcaaattttgacgacaagagaataagaattagtttactttggaaacgaaggtttccaaaatgtgcaggccaaacgtaaaaaatagtaataataataatctcattgtcacaaagtttaacataaccagtactccagtagtataatgatgggacaagttatatgaatcttttgcagcaagtccaaggtttgatggagaaagtaaaataatcaatcagtagcagaatcgacctttccttatccttgcccacgcaatgactgcaactacaactcctcccaactgatccaaactagtcaaggtattgttgtttttcccctgcattcccaaaaaagttggtctggtttaagatatagtcatatagtctcaaagcaaatgtggattagattctcacatcatacacacctctagcatctttataatgttgagtcctaagctatagattccctgaagattaagagagtgagagtattttagatgattcagaaacgtttcactcattatgacgagtatctagagagaccttacagcaaatacaggcactcggagcatcaacccaaagtatgtagtaacttttgggtaaaggagcatatcgagaagcgtaatggcatacacaggtccattagcaccctgtacacaaattggaaagagtttgaccatccaaaacatgagcgtgtgcatctctgttccagtctgtttatacttttaaaaaataatttaactggatgagtgaaaaaacataccagcttcccaatggggacttttaattgatccttagggacaactctttggccctgtatgattgattaaccaataacaaaggtaaagcatttcgtctaaacctcacaaacacatagagaacatgtacgtagtacaaatgcactggaaaaactacacatctgtggacctagcatggttaggaaaatgagaaaattatgcttgttgcactataccttgagtgatataaccgagagagcatgactactcaagaagaaaacagagccaccaagtgctccagcaaagtagagcttcaaaaggtagcgcggcccaaagcttcttgcaatctaagaacaaatgggattcgatataaagatcaataggtagcaagtttttctttttaaacgaactaaggacggtccttagatgagccagattaagtgtaagtagccggttcatacttcataggaaacaaatgaaagcatttctcatttcgtttacgaaaattaatatatggaaacaaggaaaaaatcttactctggctccgaagtagcaaagccccatcatattcaagatgatatgagtggctccaacatgactgaaacccgaagtgatcagcgtgtgtatacgtccagtcataaaactgtaccttgataactgtccaaataccatatggttaataatacatgtagattttttatttttaaaaaagttgttagaatttgatgaggtcagaccataaaattcttcaccatccacatattgtccttgcctaaaacccgccacattgtaaatacagcagcattagctattaccaatccaaaaactacaccattagctccattaatccaagacttcctgccagagttaaaccaataaagtggttttttctttttggtattagtatccaaaatcaaatggagcaggtaaagaatctaagatttttgatgtaggagaacaattttttaaaggagaaggtctaaacagtgtccagcttgctattctatgtcttatctataaagagaaaagcatcaaaagagctttgtgctgctcaaaatcaagaactacgcagaaatggaagaaaaaaaaagcctactaatttctctgaatcctgacacgtcttttacttggaagagccaaacgtacaattgaccagaaaagctaaagagagttgtgaaaaaaggtcgatgctttaccaaataaatcctgtcaaacccagaaattttatggtgaagacaaatttatctttgaaaaatgtagtttttacttggaaacaaataggtacaatataaaacagaggaccatagagaaaggggaactcagaatttttcttaggaaaggttccaactttactttgaaaaacaaaaagggagaggaaaagaaacgataccatccacgtttttgaaacccagtaaaaccaccagactcgaatccatgactaggaagctcagaactgaagaacccagctctagattccataacatttccgaatttcagcttcagattggtgtttcccaacttccctgcgaagaatccatgaactctcgccgatcgtgatacaacataaggaggaacaaagcgggaagagagatcaaaaggaagaagatggctcagggaatggcgactctggctcgcctgcttcgtcaccaatttggttagctgcggggaagagcaaccgacggcgaccctgcgacagaaaatcgcatgcatttcgaaactaatttcaaatgttttaccaaatggcgcaaaaataagagaatagcatcaacttcttctgattattcatgaaaagtgtgtgtttcaaaaactcaggtcttttaagtgcaataaaatagtgatgtaaatgtaacaagaagtaacaactttctttttttaggtaaacaaaagattccctccggtttagggaaattgtaaatatacaacttccaactttcattaaaccatgacgttcccatctctaaaccacaatcccactcaagacaaggttaaatgtcttacaaaacaaatagtgggtggcattttcggaataagatgaaacattgagggtacaaataataatcttaattttgtacacgtcgtcatcgtctttcttcctccttcgtacagtgattgagtgccttgaaactaaataaaaaaatggcctcaaaactcaaaaccttcatcaatctccgtgactacccaataaccctattcaaccagattcgatcactatcctcacgaattctcacacctatcaatcaatctcactacaggaaacgaattttactcgcgaatctccttcagaggtatggtttccctccttcttctcttcagcacttcctctcaagaaacaatcacctattgaattcggacttagtagaaaccgaaatttctctcggcatcctattgtcattgaaaatccctcagaaatcactcgtttcgttgatttccgattgccctaatgttctgcgatcagagtttctgaggaaatggagagttcctctgtctaattgcggtaaacacggtgtcgtctcatcttctgcgattaagagcgtccttgaacattctagtagaattgggattggtccagataagtttaatgagtgcgtaagggttttgaagagtttagggttttgtgatagtactgtgagtaggattttaagttcattccctggtgttcttttagtgaatgagattgaaattcgtaggaagattgagtttttagttggaattggcattgctcgagataacattgagaggttctttcacgtttttcctgaagttctagggattggtactgagactagacttaagccattgcttgatgagttcatgaagatggggtttagtaaggatgatgtaaagaaagagattgctagagaaccgagagttcttggtttggagttaggtgagcttccgcggtgtttggagttgatcaacacattgaaatgccgggaagtgattagagttagtataatcagcgaaggagcatttcgtgctgggtttgaagtgaagctcagagttgattgtttatgcaaatacgggttgattcgtagagatgcattcaaggttgtatggaaagagccgagggtgatcttatatgagatagaggatatagagaagaagattgagtttttaactaacagaatgggatttcatatcaattgtttagctgatgtaccggagtatctaggggttaatcttcagaagcagatcgttccacggtacaatgtcattgattacttgaaactaaaaggtgggcttggctgtgatattggattgaaaggtttgatcaaaccaagcatgaaaagattttataatttgtacgtgatgccatacccagagtgtgaaagaatctttggaaagagaaaagagaatgtccgagtgaataaacgacatcccgcagggctttggaagcttatgaagccgcctagcaatctaacaacaaaagaagatgtgcagaacatgaagtcctttatagagtcacttgcttagtatgttggatcttggacttgcctcttactagattgaaagagatcggccactctctagagggttcttgctccctcactttgctatgagctgctctgaattgatatgggttatcaggaactttcagtgactatcgaatctgatctcaactcgctcgagttcatggcttgattattcaaaggacaatgcatactcctgaataagccatgctcacttctcgttgtgcatcttgggaagacatctaccaatgccattgccttcgtttccatgtctctgcctgatagatttgctgagcaaatgtaattggactttggttctaaaaagtcaagtgccatgttccaacttccaactgtaactactagttagggatgttacgtgggccgagccaggccggctagtagcccgttttggcaacttttatgctaggccgattcatctgttccgtgatccatcccagacaaaccatttgtttttggcatttataccaaaaatatttgtttccaacaattttttttcttaaacattattttcaaatgttttacgtaaaagctctgttaacaagaaacttagatttatgtatggaagaattggttatacatgagtcagtaagtcatgaaatctgtataatgggaagaagttaatcagttaaatcttatttattccaagagggtgattggagaaaaaaagaagaagaagagagttattggtaactagtgttatttatgtattaatgaagaagagagttattggtgttatatatgtattaatcaatcacaaattgtactactagttaattatgtaagtaaaatcaattgaaatgcaatattaaatttccatgaagattttaattatagagaaaattaaacttttctatacatagatagattacatggttcaataaaaattattgtgaataacaagaagtatttaaaaaacgaaacttatactctaaaaaaaaaaaaaaaaaaaagaccaagtgttaaaaggcttgtaatgtaagaagcgacagttggtcaaataacatctttgacttggtcaacgtattttaacaacggttttctgttagaaatggactaatagtattaacttacaaaagacacacccgatttgtgagttgtgacatttgctttgtccttaagtatcaccacaagccagcttatattgtctctatagttagacaacctttgaccttattatacatacgtatatatggagcttttttttcaatttcatatggcatatatttgtgtcactgtgtgtgtggtatcaatgttcaagggagacagttttgtggttaacgaggtcgatgctttgtttggtccataccctgcatcgtccatggccaccatattactatgtttcgtgacgtaattgatgatatgtatatcaaatttcaactcaaactagttgaatatgaatgatgcaattatgcacattgatttacaggccagcgctggatttaatatccattgagcaagttatgagaaaacagtggtcaattagtcaattaccattaagttcttttgaagagtccaatatggaacaagatcaaacaaattatgagactacaaagacttatgagtttataaccaactgaattaaatttctataaacagactcttccctcttgcacctacttcatcttctttctcttactatgtttcttcaatagtcttgtaactgataatatatgaccattgaatgtaaatcaaacctctgtgtaagttgatttatatcagtttctgtctataaactagactatataatataagccatcccccggacggttttacttttagaatttattaaaatagtagtataagttcgcatgaaggaccgacactgtcgagtcatgtgcgttttaaagagacaatgaggaaacagtgacttttttgttgggtcaaagggaagcaaatccatcttgttggttaacgattccattattaattttggtggattcccaatggaatatctaggtagaaatcatacagtatttacgggcaaatttgaattcaagtattgaaaattctgctcattatcccatccatgatccatttcttttaaaattagaaactacagtaaagcactatgtagtcttacacacgtggtatcgaatgagcgagatatggctgagtacatttttcattgatttatgagatggtcggaagtcggaacacacaataatatcgtactcgaccgtgttgacctatatgttactatgtacatcaaaatagtcatgtacatatatgctagtttaagctgtagcctttttttacttcctaaacgtccaaataggtagccaaccctatataactctttcacatttcagtcgaatcatattctaaaatttaaccgaccatattgtatatcttcctccttccaccggtaactgactttcccttgcgcgaaaaaggatattattctctaccagttcgcgatatacattctaatatttgattcgttcttaattacatgcattatcgattaaaaagtatcagaacaactaacgatcatcattatctagtcctcggaaaaatattaaagaatatctggtccgacattgctagatccacttgactgcgagcgtatcggtgtccgtaagatttattgactaggtggtataggaattggtagtaaataaatgaatattttttcttatgcatatatctttatatttatatacagtctatgtttttaagttctaacttattcatctgatctgctgatctcttattagatatgttttaacaaaaaaaatctcttattagagtatgaggtttctttaatatgttttttcctctagttaaatgaatagaacaaaatggaaattatattttagttagttcaccgaatctcttatttaatagaggaattggtttctatcttttgttctttctcgtcattggaataaactgaatgatttattttgtttttgtttcaatataagttatataacttctaacattcagtaagaactatatatattctaatttatttacatgaaaataatatacttagttttaaactcctattattaagatttttggtcatgatgaaacattcctttgatttagtgacttctatcacacagcctttttctctctttgggaatttttggtatacgttcgaagaaatatgttccgtacgtagacgataatctaaatgttgtagaaaagtaacgaagaatgattacgtgataacaattgttattgaacttttaatataacaaattattggtacattcattaagcactttctaaaaaatatggagcctgtaggtatacaatggcttcactcggatgtcatgtaaaccaaatcatgtataaaccatgcaaaaaggggtaaatccatcaaattagaatgaagaaaagcggtgcgatgtcttgaccatggttaaagggtacctaactggactttctatctaatccatctaaccctagttaaaatcctccactatataaattacattctcatgcactgtcccaatcatcaccaactgtttcttctcttatgctctcactagctaactaaaaatccataatttcttcttcaagaaaatgactattgatatgtatctttccttcgcttctcgttctggatcttctccatttccaagtctcgagctttgtctcagcattttcctcttcatctcccttttcgttttctggttgactccaggtggctttgcttgggcactctacaaagctcgtttccatacccgacctgagtccaaaaccggacctgccattcccggcccgtctggtctccccatctttggcctcctcttggcttttgtcaacaacgccttaacacacagaatcctcgccaatattgctgacacttgcaaagcaaaagctctcatggcgttctccgtagggtcaacccggtttgttataaccagcgaaccagagaccgcgaaagagcttctaaacagctctgcttttgcagaccggccagtgaaagagtctgcttacgagctgctctttgatagagccatggggtttgctccctttggtgattactggagagagttgaggagaatctcttctacccatctcttcagccctaagaggatcttcagttctggcgagtcccgccgaaaaatcgggcaaaacatggtaggagagatcaagaacgcaatggagtgttatggagaagtgcatataaaaaagatcttgcatttcggatcactcaacaacgtgatgtctagcgttttcggtaaaacatacaacttcaacgaaggtattgtctactcgaaagagagcaatgagtt

SEQ ID NO: 1249 - DNA, 50821 bp, Arabidopsis thaliana
aagagaacaatataaaaaaggaattatagttaattgctaaaatgatattttgtgtcattagaaacaaaatctgcaaaaagtagtattactcagaaacaaatcaaactttcaaagttgttgatagatgatatgcaacaagatttaggataatcatctaatattttttatcttaaaaatagtctacttatatgtttatcaactacagtcatatttctataacttcaattttattactttaaagatacagtagtagcttcaagcttcaactaatcatagtaggaagttgaatcactctcttctgccacatatgtttcaagcatccatgttgtgtcttctgacactagaatgcataatgatcaaaattctaaaaaaatcaaagtggtaccaattttaaagttattaacttccaccagttgaaaagaaaaaactaaaggaaacctccgataaaaaaacaatggtccattcaacaacactaaggacgtgtgaatggtattgagccaacattgttcatgccaaaacaactaaggcaaacaactaaggcgaccaaacaaaagaaaattttgctatgaaatttaaaagtccatgccacttgaaagccacgtcgtttgtgcgttttggtttttctctgcgtacccatttgttgttttgatgtttccattggtcaaattcaacattatcacctaaaataacttgcacatgcacgacaccaaattaaatagctttggatccaataagagaaagtatatattgtaggtactaatatatccactcgctctaatccgacccaaacccgagttcttgaaccttgaaaccttttaaacaattagaggtttagggggtacgtaaacttaaaacgtagctcaatattagatattattgtattcgtgggggaatgaatataagcaaagcatgaagcaacgcattttacatataagaaagtgtcaattgataggaaactgataaacaattgaacaagtagatgatgtcggtccaccgcgtaggaagagctgatcactcatgtttctatcttaattatcaaactgaattaacgaatttattaatttaatcatttatcatttaatgatatttttgtctatattttttcttgcgctttcatggtaaatgaaactgcctcattgttgcgtactaaattacctgtaagtctgttataaaaaaaatgtttaaaacataaatattctacaactaaaggtgtcaaaatgtaatttatagaagtaagcaatagtttatgttatttcataaatagtccctccttccttcctattctcaagtcacgagttcttcttctcaatctcgagtaattcactgtgcaaagcaagagcttcttcgatttctatctctcagaccaatcgtgcttttcgcatccctgaacgtaagtttccttccatttctgtgttgatttaagcaaagagattgataaaaacctgattcgtcccgtttcattgtagaaactttgtactggcttagtcgggatataatcgcataggttttagaattaggaatcggaattttaacttgatgtttaggaaacggaacctagttttagatttgttgcgccgatgttacatagaaaccctaatcccacggggcttatggagtcgcacaatctccacgtttcccaaatcggctctgcttgcaacagataatgcagaaatggctagtaaggaaactggaatgttttcactagctggggaattagcttctcttgtagaagaatcttcttctcatgttgatgatgatagcaaacctagaagtcgtatggaactaaaacgatctcttgaactccggttgaagaaaagagtcaaagagcagtgcatcaatgggaagtttagtgatctgttgaagaaggtgattgcaaggcctgaaactctccgggatgcttatgattgtattaggcttaactccaatgtttctataacagaaagaaatggtagtgtcgcgtttgattctattgcagaagagctctctagtggggtgtttgatgttgcttcaaatacgttttcgattgtggctagagataaaacaaaagaggtccttgtcttgcctagtgtagctcttaaagttgtccaagaggctatcagaatagttcttgaagttgttttcagtcctcatttttctaagatttcacatagttgtcgaagcggaaggggacgtgcctctgcattgaagtacatcaacaacaatatttctcgttcggattggtgtttcactttgagcctgaacaaaaaacttgatgtttctgttttcgagaacttgctctctgtaatggaggaaaaagtagaagacagcagtttaagcatcttactccgttctatgtttgaagcccgggtgctcaatctcgagttcggaggatttcccaagggccatggtcttccacaagaaggggtgttgtcccgtgtattaatgaacatatatcttgatcggtttgatcatgaattttatagaatctcaatgaggcatgaagcccttggtcttgattcaaagactgatgaagatagcccaggctcaaaacttcgttcctggtttaggaggcaagccggagaacaaggtttgaaaagtactacagagcaggacgttgcactcagagtttattgctgcagatttatggatgagatatatttctctgtgtctggtcccaagaaagttgcaagtgatatcagatctgaagctataggtttcttacggaactcactgcatttggacatcacagatgagacagacccgtcaccatgtgaagcgaccagtgggcttcgtgttttgggtaccttggttaggaaaaatgttagggagagtcccactgtcaaagctgttcacaagttaaaggagaaggttaggctctttgcattgcagaaagaagaggcttggaccttaggtacagttagaattggaaagaaatggttaggacatggattgaagaaagtcaaagagtcagaaatcaaaggtttggcggatagtaactctaccttgagtcaaatatcttgccacagaaaggcaggcatggaaacagatcattggtataagatcttgcttagaatatggatggaggacgtgctaagaacctctgcagatagaagcgaggagtttgtcttgtccaagcatgttgtagaacctactgttcctcaagaactaagagatgcgttttacaagttccaaaacgctgctgcggcatatgtttcatcagagacggctaatctggaagcgcttttgccatgtccacaatctcatgatagacctgttttctttggtgatgttgtcgctccgactaatgctataggaaggcgtctttatcgctacggattaataacagccaagggttatgctcgttcaaattctatgcttattttgctagatactgcccaaataattgattggtattcaggacttgttcggcgatgggtgatttggtatgaaggctgtagtaattttgatgagataaaggctcttattgataatcagatcagaatgtcatgcatccgtactttggcagcaaaatatcgaatacatgaaaatgaaatagagaaacgccttgatttggaactgagcactattccctctgctgaagatatagaacaggaaatacaacatgagaaactagattctcctgcttttgacagggatgaacatctaacatacggcctttccaatagtggtttgtgtttattgtctttagctcgattagtgagcgaatcaaggccttgcaattgcttcgtaattggttgttcgatggctgcacctgctgtttatactttacatgcaatggagagacagaagtttccaggttggaaaactggattttctgtttgtattccttctagcttaaatggaaggagaatagggctgtgtaagcaacacctcaaagatctgtatataggtcaaatatcacttcaagctgttgattttggagcctggagatgattactactctccacgacaagagtcttgcaagtgtttgattcttcctaggtcaactctgattcgttttaggcagttgttgagctttgtgtatctgatgtctagcaaatcatatgtccggtgattatcgttcttcaaatgttttaatttctagaggccttgtgcagtagcacagtttgcataccctcagaacataaaaccatggcattagctggtctaatgggaaaagtctaggtgaaatggtctcattgacattcacaatataacttccttcacttttgactgtatcttccaatgcttagcttcttgaatttttctgatttttttctcacaattgatttgcggtgctgcaggttttgaacttgacaaaatggaattagcggatcgagcagtcgggcttctactatcttcaatcagcttgtccatattcacgtactatactttttgggtcatcatcctggtaagtgacaacatctcccccaagttccttaaaaagacattgtcagtttgatgtaccaatgtcatctaatgtttaggatattactaggaaaaagctgacataatagaattttcgttttgtacagccatttgtagatagtgatcacttcatccacaagtacttcttaccccaagactatgccattctcgtacctgtctttgccggcatagctcttctctctctcatttccgtattcatcggcatggtcatgctcaaatccaaaaagaagaaggcttaatttcattcaactcttgccgtaagacaaagttctgtccttgtttcttaagttgtccctacattgttttggtctttcagaggtttagtccggaaactttaaatgggtgtcgttgaaccgtacgagactatatcttattgactctaaatacatacacatgttaagctcaaataaattcttgagagaatatatactaatgatgatggattttaggctccctgacaattcaactaaaaaactatttacagaatatacgaatgatttagatgaatgatgcatttcacgaatatatatatttgtttcttattttgtcttttgtgtattctccatatggcagttactgatctattttcttttctggtttcgtcttttttagagagaaaaataaataaaattgactgataggaattcagtttgttagcaatataagcaccttaaatcataattagtgcttttgaaagttgagaaacagatatattatgaaaaatatcagtagtagtagtcatcataggctaagagctggcaaagcattagagacacaagtgagttttctctttgcaattattctatgtctgtaatgaattttggttttgacttatcttatgaaatttaatcatagttttagctttttctaatctcattagcactacttagtgcttatggataaatcatttcaagtcatcttcgtacaattaataaaatcaatagcccattcacttgtactgtactagagaccaaaacttaatacatacaaccaaaaatcaatttccttttttattttattttccaacacgctttgaattctgttctaccacatttgtatagtcaattctttatttcaacaaaaaagctgtcattaactatttgctaaaataggtttcaaaattttggaaggtgtagattcgtttttttggaccagactaataaatgcatgttttctttttgaagtaatgtaccgtcttcttctgataaaaaagtgaagagcctaaaacattctcttctgaaccttcattataaaaatatatacgaaacctctcaagttttcaggagattcactttggttccggatccgaattacggcgacggatcttatcgtgacggcgccggaatatacggatacgaaatcagctagtcacttgtggtggttgtgaagttacgaactaatcggaattctgttaaaaatgggttgcgttagctcgaagcagacggtctctgtgacgcctgcgatcgatcactcaggcgtcttcaaggataatgaaaatgagtgttctggatcgggtcggattgtggtggaggatccgcctcggccgacgttgaagaagctcgtgtcgtggaggagtaggagcgggaagaggaggagtcagaagagcggtagcgagttagggagtgagtcaggacgtgctagtgactcgcttagttttcgactcggtaatgttagtagataccttgaagctgagcaagtcgctgctggttggcctgcgtggttgagcaacgttgctggtgaagctatccatggttgggtcccacttcgatccgatgcgttcgaaaaactcgaaaaggttcgaaatttgataattctttgtgtgttatgtgaatgttgtttagaagaagaatttgtgaaatttagtttagatttggtttctgtagattggacaaggtacttatagcaatgtgtttcgtgcggtggagactgaaactgggaggattgtggcattgaagaaggtgaggtttgataattttgagccggagagtgttaagtttatggcaagagagattttgatacttagaagacttaatcatcccaacattatcaaactggaaggtttgattacttcaaaactatcctgcaacattcaacttgtgttcgagtatatggagcatgatcttactggtcttctttcttcccctgacatcaaatttacgacgccacaggttcgtttgattttatagtggaagtatcattgttcataatgttggggtgttttgttatgtgtttggttgcgtgatcatttgtttttggctcctgcagattaagtgttacatgaagcaattgttgtctgggcttgatcattgtcattcacgaggcgtgatgcatcgagacataaagggttcgaatcttttgttgagtaatgaagggatattaaaggtggctgattttgggttagcaaacttcagtaatagttctggacacaagaagaaacctcttaccagtcgagttgtgactctgtggtatcgtccaccagaacttttgctcggggcaacggactatggagcatctgttgatttgtggagtgttggttgtgttttcgctgagctgcttcttggaaaacctattctccggggaagaactgaggtaaacctcttcacagttaacactgtcttcaactatatatgatataggaccttttggtcatggatatgttatgttttacttggtgtataattcagtgctattacttgaattgtatggagcaggttgaacagttgcacaagatattcaaactgtgtggatctccaccagaagattactggaaaaagtccaaacttccccatgcaatgcttttcaagccacagcaaacttatgatagttgtctccgcgaaaccttgaaagatttgtctgagactgaaatcaatctgatagaaactcttctttctatagatccccacaaacgcggtactgcctctagtgcccttgtttctcaggtaacctttttatccttggtttaatatatcaagtttaaaaagctaagaatttgatatctgtggaaacacagcatattgctgtattttgttcatcttttacaaatgaagacattgccttttgtgttttcagtattttactacaaagccttttgcttgtgatccctcaagcttgccaatatacccacctagcaaggagatagatacaaagcatcgggacgaagcagcaaggtcagtaatttctttcattacctgatagagaagtttctagttatgcttatatcatctctttaatcagaataaaaaaaagcttgatacacagaatctactgttccacagctctgggaaattacatagtgtaccattttggttggccttatatgtcaggtcttgaaagcatttgtaacatccgtatatttcatgtctgactttcaggaaaaaaattagcgggaatgggagacgtggtatagatccgaggaagccatcaaggaaggcccattcattcaatagattggcaccagttgagttacttcctacttactcacttttctacatgttatctgtatcttgggagtataatttctcgttcaagaaactgaatgtgccctctttttctgtttgcaggatgtgcggcaccaaactgaaacatttcagaaacgaattggtcatttagttcatagttcgattgaaagtgatgccaggttatgtgggaaactgcaaaacccgttagatcacaagaaagacgaagcttcccatgtgaagcatgcatcacaaggagatgtgcctttctcagggccgttacaagtctctaaatcaaacagttttgcttgggcgaaacgagaaaaagatgacgtatgtgttagggtgcataatcgatctctctcaagaggttacattcctagcttgtcaggacattcccccgcattcaatgggaaaagtgatgttgaatccaagataaataaggatgaaaaggaggacaagacagattctcgaggcgaggagtcatatgagatggtgaagcgttctatgctaaagcagtggagacaacttgaacgtccagattcttttggtgcatctgacgagtatcactcgcaggaactgtcattgggactctatcagagagatgaaatggcaaaaaagatgggtaataatttggtacgtccatagattatagaagctctaaaagcagccttatagtttatttaatatccaaattccatatagcagattgttatttgcattgttagtgctactgatagacatagtagagaccaagtatgctttgtgccagacgttcttacatgtgaaacttaggatttggtttcattctttcttatgctgtaatgcgagtgtcaaatttgattctgtgaaataaaatgaaagtaattctaaagatatgattgtagtagttatatatgcaacatacatataagatacggtgtaaatgtgatatacagctcaaaaagtagaaatattggaccagattaccgttggtagtcagatcatgtttcctcagctgtttaattttttttttaatcttctctctctctctctccacgctttcacctaaagttcagaggagagaggaaaaaataggcatgatttagtttgtctactttttgtgtttagtgacaagcatgctcaatgatactgatgacttaagccttgacatgacagggtgatggggacaagatcgaattctcgggccctttgttgtctcaatcttatggagttgatgaactgttggaacgccatgaacgcaacatccgcaagctaattcgaaaaccgtggtttcaaaaaggtaaattaagaaaccgtcgtacactgtgtcttggttcttctcttttacaaataagacttgcgatttttcttcgccgaaataggcaaactggttgagtataaatgaattcatctttctcaacaaagtccaagacaaacaaaaaaagattttgcttttctcatctgaattgtaacttatccattggttttggattcagccctccattaacaagtatgttggacctttgaacttgcagataagaaacaggggaagtgactctaatcacaaaccagcaaggagaaaagagctccaagaaaaggccataaagcattcttttgttgttaattttgtattgatttattcttaagttatactatggaggtacactttttgagagcctattcacatatttgattcagaggtaataatgtatagagctcagttcctagaatatttatctgtaggcatatatttcgacagctttatgctttctttcgagtccagttgtagaacacagagttatgttataacttataagatatacaattgtataatacgaagttaggaccatcttctttttcatgatggtgatctgtagctactgagaagtgaaccaactaaaatgatcccaagagggttaactttaaagttctttcattttcaaatcataatcgacaaataaaaacgatttaatttgtgagaactacattttatctgaaacaacttcaactgttgattataaactactgaccattacattttgcctcgtaaaaagggtaaaacagaaaacgttacattttcttattttttgaagctgggaaataccattgtaatcaggcacctttttgtgtgtatatacctctttaacaccgtcaaaatactcttcttgggttgggtccatagaaatttacttgtgttcggaagctgcaaggagcctcggctttgttaaccaatactgctcgaacctttgtcttgcatactccatgtagtcaaagtcgatttcattcacatgttcctgtaaagttttacaaaatgaaaatcaagcctatatatggttcagaaaatgcaagtatgatagaagagtattgtagaaattaccgatataattccccataaaccccaaattagatgactagcaagtgtatatttctcaacgtcttctaggagttttttgaccatagtatcgctgggcttttcatctggactcacaagaacaaatacaaatagagaattatggctgtacagtgatttattgctgaagctcatagcaagaaagtgtgataaaataatcacctgaataactcatatatgttttcagaaatctttgtcgctcctccacacctgttataatttagtcacatattaagatatatgattgatcttctatcatttcaaaagataaagaaagatgactttgaaatagacacttaccagggtatttactataatccatgatgtgaggtgtttcagtgtggtaatcggcagccatctcacagaagtgattggcaatgtcataagccacaggattatagcatgaatattcataatcctattttttataagacaaaataataaaatcagagttaggatccattttttctagtaatggtatacgaaaaaaggagagctgactaaacaaattcatgaaaccttacaatgatggttattgctttggtctcttcatccatcatgatgttcccatactgtaaatcattgtggcaaaatccaatattttcatcattgtcaaagagagatttctcaagcatattaatttccatctccataacatcgagacgaaaggacttagcttcttctggtgaagccagtctcttgcatgcagtgagccaatttctgaagttacaaaaaaaacaaagtggagaaaaagattacaaaaaagaacaaaattttaatgatttgttagaaagcaaagtagaatctggtagaaagcaaagtagaatctggtagaaaacaaagaaatgtaccgtaatctgtcccaaagcaaagcctttttcgcaccaggcatttcaagaccatgaaactccttcatcctagttgctattcgaccagatatttcaggatcacgcaagtcacaagcagatagggtctgaaagttcatagttcagcaaacaagttacaaattcagtaaacaaatacaaaaagattcacaagaattacctgaagaatgaaaaaaaccagggaagtgcaaagatactcaataacttaggaacacacagaatcagatattaaaaaaataattacccgtgcatggaggaactcttcgatacgaccattaccaaaccgacctaacaacaaaggtccatgaccatgcttcgacatgaactcaaatgtcctgatctcatcctcacgatcaaagaaaatctcaacaccttcaccataaatcctaaccaaaaccttacgagaaggacctttttccctagttggccatttgatctgaaacacctcatttgtcattgcaccttttaaaggaataacttgcagagcctttgaatcaatcacatcttcccactctgatgctattgcttgtaaagcttccttgacttctcgaggcaaacgatattgtttattctctacattcttttcagtaccacccatcgtcatttgaatgccacacacaaagataaatctctctgtacaagataaaaacagatacttttagcgaatacttataacaacactgtgttttgtccaattcaggggaggttctacgatcaacccaatgcaacaattctatatgcttccgtttcataaaaattctgaatatcaatctaaacctatacaattacatccttactaatctagataaagtgtatacaataaaatgagagcaataaggttcattaatctttatacttagctcctccacaggacgatatactttgagactgacacaaaacaaaataaggaagaaagcttacgtttttgaaggaaaatcacaggagggacgcggaagcaagattggtctgagaggaaaattgaggaagaggggttaatcgagatgaaaatggagtttgaagtaatagagagaacgttgcgcagatcgaggaagaacagaggataggatcaacacaaggatcttgtgaaaatgaaaatggctgaggaaatgaaggactatttgttaaataagatataatattatttctgaaatatttccatctgactcctttaatttatacaagcctccttttttgtacatctattttcagaagatccaaataattgtttcttctatttgtgtatttttgatatttaaacgtaaatctttggattttgatcaataatagacaattagccaagttcagttttcattaattagatttataattttaattatttttagcattcgtctaaaattaaataatgcggcaaaagaggagaaattaatttttgttgttattaattcaaagcgttacaaataaaaaaggaaattccacgctggcaataaaataagcgaaaattccacgtgacatctacctgtcggatcaaaaagagtggaattgacatttgtttctctcacactctctctcgaattctctggtagcttctagttctatgcaaaaaaacgacgatagttctctatctttccagatgaatctccttccatatacaaaagcagtcatgcctcctcgctctctcgcaattcacaaagtatccaaacatctaaagttatcaattttacaacattaccgctataatctgcttgattctctgcaaaaagagaagactttttaccgagaagaagtcctctggctcattgaagaaactcaacgaaacaaacccagttctcatatatcgttttaaggtaaatgatcgcgacaatcttgttctcatttgtgtgtttttgtgtttgtgattagggtttacaaaagatactgagattagtttttttttttttttttttttttcagggattacaaaagctaatcgaagatgaatccagagaaattcacacacaagacaaacgagacaattgctacagctcatgagctagctgtgaatgcaggacatgctcaattcactcctttgcatttagctggtgctttgatctctgatcccaccggtatatttcctcaagcaatctctagtgccggtggcgagaacgcagctcaatctgctgaaagagtgatcaatcaagccttgaagaagcttccttcacaatctcctccacctgatgatattccagcgagttctagtcttattaaggtcattcgtcgtgctcaagctgctcagaagtcacgaggtgatactcatttggctgttgaccagttgattatgggtcttcttgaagattctcaaatcagggatttgttgaacgaagtcggtgtagcgacggcgagggtaaagtctgaggttgagaagcttcgtgggaaagaagggaagaaagttgagagtgcttcaggggacacaaattttcaagctttaaagacttatggaagagatttggttgagcaagcagggaagcttgatcctgtgattggtcgtgatgaggagattagaagagtcgtgaggattctttcgaggagaacgaagaacaatcctgtgcttattggagagccaggagttggtaaaacagctgtggttgaaggtttagcacaaaggattgtgaaaggagatgtgcccaacagtcttactgatgtgagattaatttcgttggacatgggtgcgttagttgctggtgctaaataccgaggagagtttgaagaaaggttgaaatctgttttgaaagaagttgaggacgctgaaggcaaagtgattctctttattgatgagattcatttggttcttggtgctggcaaaactgaagggtcgatggatgcagctaatctgttcaagcccatgttagctagagggcagcttcgatgcattggtgctacaacgcttgaagaatacaggaaatatgttgagaaagatgctgcctttgagaggaggttccaacaagtctatgttgcggagccaagtgtgcctgacaccattagtatccttagaggactcaaggagaagtatgagggacatcatggtgtgcgaatccaagacagagctcttataaatgctgctcagctgtctgctcgttacataactggtatgttaagattcttaatcctaagctgatgtttatggtttcatatagtgttgttcttgacatgacatttttgtggcgatttaggtcggcatttaccggataaagcaattgatttggttgatgaggcttgtgcgaatgtgagagtccagcttgatagtcaacctgaagagattgataaccttgaaaggaagaggatgcagctggaaattgaacttcacgccttggaaagggagaaggataaagccagcaaagctcgacttatagaggtatgatacagctttcttttctcatcagtagatagcgcttcaaatataagactattgtgcttgttctggaattcttgattgttagcatctgtttttgcgatgagtctttgatataattttctcaaactatgaatctgtaggtgcggaaagagcttgatgacctgagagacaagcttcagcctctcacgatgaaatacagaaaggagaaagagagaattgatgagattcgaaggcttaaacagaaaagagaagagctcatgttttctttgcaggaggcagaacgaagatatgaccttgcaagagctgctgatctaagatatggcgcaattcaagaagtggaatctgcaattgcccaacttgaaggaacttcttctgaagagaatgtgatgctcacagaaaacgttgggcctgaacacattgctgaggttgtgagccgttggacagggattccagtgacgagacttggccaaaatgagaaggagaggttgattggtcttgctgataggttgcataagcgggttgtgggacagaatcaagcggtaaatgcagtttctgaggcaattctaaggtcaagggcaggacttggaaggccacaacagccaactggatcattcttattccttggaccaactggtgttggcaaaactgagctcgccaaggctcttgctgagcagctgtttgatgatgaaaacctcttagttcggattgatatgtcggaatatatggaacaacactctgtctctcgcctcattggggcaccaccagggtaagtaacttatcttttagttttcaatatcttctgattatgaaaatattttttcttacttacacgattactacactttctcaggtatgttggtcacgaggaaggtggacaactaactgaggctgtgaggaggcgaccttattgtgtcatactctttgatgaagtggagaaggctcatgttgctgtcttcaacactctgctccaagttttggatgatggtcgattgacagacgggcaaggcaggacagtcgatttcaggaactcggtgataatcatgacatcaaaccttggtgctgaacacctccttgcagggctaactgggaaagtaacaatggaagtggcccgggactgtgtgatgcgggaggtgaggaaacacttcagaccagagctcttgaacaggcttgacgagattgtggtgttcgaccccctttcacatgaccagttgaggaaagtagctcggcttcaaatgaaagacgttgctgtccggcttgctgaaagaggagttgctttggcagtcactgatgctgctttggactatatcttggcagagagttatgacccggtaagtctcttcacatgatgcagaatgcatatcattgttgatctctcaggctggtttgttctgttgactgactcttgtggttgctttcttgttttgttggttaggtgtatggtgctaggcctataaggagatggatggagaagaaggtggtgacagaactgtcaaagatggttgtgcgtgaggaaatcgatgaaaactccactgtttacatagatgcaggcgctggtgatcttgtgtaccgggtagaaagtggaggtctagtggacgcttcaacaggcaagaagtcagatgtgctgattcatattgctaacgggccaaagagaagtgatgcagctcaggcggtgaagaagatgaggatcgaggaaatagaagatgacgataatgaggaaatgatcgaggattaaagtcttgacctccaacgtttgagttcttttgaggtgttgtgattgtatgacttgagctttcatgctctgttttggttttgactcttttggtagactataatggtgtggaactgtaaaaaagtctactttattatgttttcgtatatgtaaatcattttacataagaaatccattgtacgtcccataatcttttggggttttttcatacctttgggatcttatcttacttaatgctacgcatcagtggttaagagctgtcttaacaatctcatcaacgacacctttagcgagggggaagaagtggccacctccggcaacctcatgatagtgaagccaaggaagcttatctgcaatgtaacgttgcagcgtcacaggcactaacatgtcctcgtctccttgccacaaatgaacagagccttctctgtttaaaaacggattctcgagttctaaaggatcaaattcccaatttccaaaacccacaatcatatcacggttaatactctcatgtattccttgctgccttacttctgccaaatgcggtttcctcgaagatcccagcttcaaaatgatatctttatcgggctgtgacaagacaccgccatctcggttcacaacactcgaacccgggaaccagttttgtgtgttccaccagtaaataagccaaggagcgtagtgagcaacacgaaccgcccattgatctctcttttgctgcaagttaaatccttcagtggaaatgttcaaaggtaagttcctccaatagtagttaaccacaggagcaactagtgttactccggctaaccggtgaggggtgtacttaaggcatccccacgccgcttgtcctcccattgatttcccaatcacgtagaactttgatcctagactcagttgatcagctagctcttcaatatccaaagccaagctttttggtgtacggattggatccggatcactctctccataacccggtttgtcaaacgaaaccatatacacgcctcgttcttgaactaaatcctataaagtgaaaacagatcaagaaattattatgaaccttagttccaagagttggtaagaacgtaccggagaaagaagagtggcgaaaacggcgtcgtgtctacaactatcggatccatggatgaagactattttgtgtttagctttctctcttggaagtccatactccttgtatgccaaatgtctcccgtctcgcagctttatacgcggtgctgtgatcggtggaccaccgggggagccacatagattcggtggaggaggtttcaagattgactgataagtcaacgccaagattatcccaacaataatgatcacacttgatggtccaatcgccatttccacgatcaggtagtgagaaagattaagtgaacaagtggagaatttggggagaaaccaaattatattaagttttcatcactgaacaagagtatatttatagatgaagaagggctcttaggcttgtgacaagtcttctcagccacgtcaatttcagggatgaattaaattcaaatatgttgcagtgatttgatactttaattgtgtggttgccaaaaaaggaaaagaaaaagatacatgttaagctgtcgaattacaatgctacaatttggctaaaaattactccaaatgtctaagactccaggtttcttcgttatctccaatgaccactgagagtctttttagattattttggtgaggtgtcacttggttgcagcacaagcatgtgccgcagcacttacattagtgagattaggtctagtttagatataccaattagacctaattaatatatgtatagaaactaagcaaagcaagtacacaatcaattagatgaattctccattcccttaattaaaagacaaacatagaaaatataaccaaaaagaccagacacatgtttaaaagatcaaagtaaagaacatggtaagcttgaaaggacaattgaccagccttagttgtcactttacgaagtaaattacgagtaaccgaattaaacaaacatataatgctgaccaattgtaacgggtctattgtatatccgtgtttctggaaactacaaagtacaaatgaacaaatacaaactctagacgctctttacttaatctcttattaaggtttcaataccttagctctgtaaacacttgatagaaatgtagaatcgattaagaaaccacaacgagaagataagaatcgtatacttagatcaagatagatctaagtaaccgatattgatctcttcctctggcacatcaccaggccaagtctctctcgagagtcgagaatctcacaacatcaaaagcataaaactcaaagatagatcacagtagctatatatagaagaagactccgtaacagcaaaacctctggcttatccagagtctttattcttctttgctgactcatctgcctgtgccaactcgactgccacctcatcttcttactgacgaatcgtatcagtatcggtggttaagagcgtcgttacaatgttatcaaccacacctttagtgaagtggaagaagtggccacttctcggaacctcatgatagtgaacccatggaagctgatgagcaaggtaacgctgcagcttcacaggcactaacatgtcctcatctccctgccacaaatgcacaaagccttcattgttcaaaaacggattgtctaggtctaaaggatcaaattcccagttcccaaaaccaacgatcatgtcacggttaatactctcatgtattccttgctgccttacctctgcccaatgtggtttcctcgtataaccacgcttcgaaatgatatctctatccgattgtgacaagagactgtctcggttcgcaatactcgaaccagggaaccatttttgtgtgttccaccaataaataagccaaggagcatagtgagcaacacgaaccgcccattgatctctcttttgttgaaagttaaaaccttcagtggaaacgttcaaaggtaagttcctccaatagtagttaaccacaggagcaactagtgttactccggctaatcgatgagggatgtacttaaggctagaagtgtcaattgggctgtccaaagcccaatggttatgtccaattggaccattagttttaatgggttttaatggatggtctttattggacaatggtctgaaaatttgttcaagaccattaaggaccatgtccaatggtcagcccatggtcagcccataacttaatgttatttgccaatgtctgaaaataagttcatcaaaagagttaagcttagatttgggaattaacaaatatctgaatattatttgccaatgtttgatcgccaatcttgtaaagctgatgattccatgtatggccactctctgcaaaaaattaataaaccaatgagtcatgaacttgctacctctaatccgtttcctgcaaaacaacgtttgtcaaacaagtgatggattttggtgagaaacgattacttaattacaagctctaaacgttcataaacattagcaaacacacactaaacgttcatacacttagctccatacataaacaccaagctctacacaagtaattacaagctctaccaaaaccaaactctacatattctgtgaggcatttcatcaaacacatggttggcatcaaaggaagggagagagagaataacaaagaatagcaaacaagtgaaatttggacaaacccacaagctgaaatcaaagaaagcatatgcagaatcacaattaaggaacagaaaataacaaagcgatgaaattgcataaggacttagagaacaaaatcgatgagactatcatatgaacgcatattttagagagaacttattctaatcaacggattcatattatagtagaactaacgggagtaggagttgagagagaggtcgaagcgagagagagagagcttcgtcgccgagatagagaagagaagaaaattgatgtgttgagaaaattgatggaccaaccatagaccgtgtgggctagcccattaaatccgcggacataattggtctttagaccatttaacccgttttcgtgacgggtcgaccatggactgtccataatgttgtggactgggcttagcccatggtcagatgaccatttgacggttctacttaaggcatccccacgccgcttgtcctcccattgatttcccaatcacgtagaactttgatcctagactcagttgatcatcgagctcttcaatatccgaaaccaagcttcgcggtgtacgacttggatgcggatcactctcacaatagcctggtctgtcgaatgaaaccatatatacacctagttcctctactaaatcctataaaatgtaaatgacacaatgttagaggtcacaataaaaaaaaaacgaaaacgtcattctcaaataactttctcactaaacttctctatagtacaaggaattctaacaacactacttgctagaaattaacataccactaattagataaaaggtttaaaacatagtgatcaaagtataattacataacaactatctatcaaatcaaccatagaagcatacatgcataatcttgagtgaataaaacttaccggagaaagcagcgtggcgaagacggcatcgtgtctacaacaatcggatccatggatgaagacgattttgcggttagctttctctcttggaagtccatgctctttgtaagccaaatacctcccatcttgaagctttatccgcggtgctgtaatcggtggaccacttgaggagccacatagcttcggctgaggaggtttcaacttcgactgataagtcaacgccacgattatcccaacaatgacaatcacaacagaaggaaaaagaaaactctttcgagaagatggctttagtgagctcttccttgatgaatcacttgccatttcacgaacggtaagatgatcggagaggcacggcggcaatggcgacgattcttgaaaaagagagccaactgttcaagaactacaacatatcgtgtgtttttttttgtgataagtcttctcagccacgtcaatatcagggatgcattaaattcaaatacgttacagtgatttgatacttcaattgtgtggttgccaaaaaaaggaaaagaaaaagatacatgttaagctatcaagttaaaatgctacactttggctaaaaactattccaaatgtcttagattccagctttcttggttatcttcaatgaccactttggtgattgccacttggttgtagcacaagcatgtgctgcctcacttagataatgtgattaggcctagtttagattgtaccaaaaactttaattaatgatgtattagacactaaggcaaatctagtagacactcaagtagatgaattcttcattctcttaattaaaagactaacatagaatataaaacaaaaagaccaaacacatgttgctaaaagatcaaattaaagaacatgataagcttgacaagacaattgatgaaggcttggtcgattaaattacacgtgtaaccaaataaaaataaactacgatgctgacaaatgtaactagtacataactctattgtatccgtgtatttttttgggattttttttcagagtttttggaagctacaaatgatcaaatacaaactctagatgctcttacatcggaggttaagagcgactttacaatgtcatcaactacacctttagtgtagtggaagaagtggccacttctcggaacctcatgatagtgaacccatggaagctgatgagcaaggtaacgctgcagcttcgcaggtactaacatgtcctcatctccttgccacaaatgcacagagccttccttattcaaaaacggattctcgaggtctaaaggaccaaattcccagttcccaaaaccaacgatcatgtcacggttaatactctcatgtattccttgctgccttacctctgcccaatgtggtttcctcgaagaaccaagcttcgaaatgatatctttatccggctgtgccaagagactgtgatctcggtttgcaatactcgaaccagggaaccatttttgtgtgttccaccaatagataagccaaggagtatagtgagcaacacgaactgccaattgatctctcttttgttgaaagttaaaaccttcagtggaaacgttcaaaggtaagttcttccaataatagttaaccactggagcaactagtgttactccggctaacctatgaggaatgtatttaagacatccccatgctgcttgtcctcccatcgagtacccgagcacataaaatttcgatcctagactcaactgatcagctagctcttcaatatccgaaaccaagcttcgcggtgtacgacttggatgcggatcactctcacaatagcccggtctgtcgaatgaaaccatatatacacctagttcctctactaaatcctataaaatgtattgacacactgttagaggtcccaataaaaaaccgaaaacgtcactctcaaataactttctcactaaacttctctatactacaaggatttttaacaacactacttgctacaaattaacatgccactaactaaataaatgattaaaacatagtgatcaaagtattattacataacaactatctatcaaatcaacgatagaagcatatagacatgcataatcttgattgtgtaaaacttaccggagaaagcagagtggcgaaaacggcatcgtgtctacaacaatcggatccatggatgaagacgattttgcggttagctttctctcttggaagtccatgctctttgtaagccaaatacctcccatcttgaagctttatccgcggcgctgtgatcggtggaccaccggaggagccacatagcttcggcggaggtggtttcaacttggactgataagtaaacgccacgattatcccaacaatgacaatcacaacagaaggaaaaagaaatttttttcgaggccatggctttaatgagctgttccttgatgaatctctcgtcatttaaaagaatgggaagttgatcggagaggcacggaggtcaacggcgacgattcttgaaaagagagccaactgttcaagaactacaacatagagatcgtttttttgttgttgttttgagataaaaatagagaagcccatttttatatgttattcattatagtaatggcccaagatgcttaatatactaatgccccaatagtgttaaggcccataagcccatattagggcttcttcttcgtttttctccctcgagtagcagcagcagcctttggatattcggcggaatcgaaaatggtcaagggacgccaaggagaacgagtcaggtctttcttcttctatttctcttttcgttcttcttcaagtttgatctatatcaccaagatggttttctatcggtgtatcatttgagatttgctctgttttcctcacttctgaaactgttttgctactattgttattgtctagatttgagctgattcttcatggtttagtaatcttgtaatcatcgataatgcgaaagtctgattctttttatgttatctaattttgcagactctacgtgaggggaaccatcctcggatacaaaaggtgacccatttctttcatcgctttcgttttccattttacactgcttatagcttatgattggacgccaataagattccatgtaatgaacgttgattggtatttatgtaagccaatttgacagaaacgagtcctataaccaagcttctcgtccacttatgatcagattatgtgtctgatgctttcactaaatgggaacattttgactcttgattagttagttgtctacatttcttaggacacttatctggcattttatttttgagctgctttgtatttctattaatcaacactgttgttaactgagttctgctttaataaccttgtcatgctgaaaaccgagaccttactgtttgatacttcctctggtctgacatttactatggtgtgcaggtcgaagtccaaccagtatccaaacacgtccctcgtccagatcgaaggagttaacactcaggaggaggtaaactggtacaagggaaagaggatggcttacatctacaaggctaagacaaagaagaacggtagccactaccgctgtatctggggaaaggttaccaggcctcacggtaacagcggtgttgtccgtgccaaattcacatccaaccttcctcccaagtccatggtacttaaacagattctataatcatcttctctgtttagaagtgaaatcttttgcttgggtttttaacaagatattattccttatgttcttgcagggaagcagagtgagagtcttcatgtatccgagtaacatatgaagcaatgcaaaaatggcttaaacttataatttagccgccttggttttgttcactagtttgttattttgtattttgatattgaaagcatttcctttctttgtttgaagtgtttggagattctctaaattgactttgatcatggatccggtttttcatcccaaattagactcccttttccccttttataacgaattaaaacagacgaatggtaacatattttctcaaatcactattacaactttataattagttcttagaaacacttaaattctcagaatcatccatggcatatgttaattgttgaagtctgaaaatcgaaaatcactcaaaataatcaaaaaacaagagctgattgaagttgtaaactgaaacatttgaaactcgatttgtgatatcggcccttaggcccattagacctttattgggcttacctaggctcaactttagaattttcaatcagaattttgttctcatgtaaacaaaaaagtaccaacaaacctaagattcgttgagaagagagaccagacaagaactctgtgtcgactgccgtactctcggagtcggagcttcggtcccgttaagacagtaacagagaaaaaccctaaaccctcttttcactttgtttgctgttccggtcatatctcgcgacgatgaatacctcccaagcaactcgtgcggctctgtttctaaacgtaaatattctcttactgctattcttatcagtggtccaagttttgtgtcgattgatcgatgaacttatttgattccgttctgttgcttaatcttttcatagattgattataaggatgatttcgaaaagtactttatattgagaatttgaagttctgttgatgttgaatgcagtaacttaggactctgatttactggaaacttcttggtatttggcatccataatgttttcgttttaacaagttagtgtttttttgcagggttccaatagacaagcgatgcttttgcagcggagctcaatgagtcaattgtggggttctgttagaatgagaacttcacggctgtctctgaatcgaacaaaagctgttagcttgagatgttctgctcaacctaataaacctaaagcagctgtttctactggttcttttgttactgctgatgagctaccaagcttggttgagaaacctgctgctgaggttatccatttttatcgcgtgcctttgattcaagaaagcgcgaacgcggaactcctcaaggctgttcaaaccaaaatcagcaaccagattgtcagtttgactacagaacagtctttcaatattgggcttgaatccaagttaaaagatgaaaaactttctgttctaaagtggattcttcaagaaacatatgagccagagaatttaggtactgttatttgcatgctatatcatgatatggttacaatattgttaggcctctctgttattgacgattgagttaaatttcaggtacggatagttttcttgagaggaagaagcaagaaggactccatgctgttattgttgaagttggccccagattgtctttcacaacagcatggtccaccaatgcggtttcgatatgtagagcatgtgggttagacgaggtgactcgcttggaaaggtcaaggaggtaccttttgttcagcaaggagccacttttggaaaatcagataaaagaatttgctgcaatggttcatgatagaatgaccgagtgcgtgtacactcaaaagctggtttcattcgagacgaatgtggttccagaagaagtgaagtatgtgcctgtgatggagaagggtcggaaggcgctggaagaaatcaaccaggagatgggtttagcctttgatgagcaagatttgcagtattatactagacttttcagagaggacattaagcgtgatcctaccaatgtggagctatttgatatcgctcaatccaacagcgagcacagtcgacactggttctttgctgggaacatggttattgatggaaagccaatggataagtctcttatgcagattgtaaagagcacttgggaggtaacaataaaggacttaagtcaaaatttctctcctttcctatagtttgaaatgtgtgttcgtataattcactcttatcttctgtgttgaattttgcaggcaaatcgaaataattctgtcattgggtttaaggataactctagtgctattagaggctttctggtgaaccagctacggcctctacttcctggttctgtgtgcttacttgatgtcagtgcacgtgatctcgacatattgttcactgctgaaacccataatttcccttgtgctgtggctccttatcctggtgctgagacaggtgctggaggtcgaatcagagatacacatgcaacaggaagaggttcttttgtggttgcatccacttctggttactgtgttggtaaccttaacatggagggatcttatgctccatgggaagactcgtctttccaatacccatcgaacctagcatcacctctacagatactcatcgacgctagtaatggtgcatctgactatggtaacaaatttggagagcccatgattcagggatatactaggacttttggaatgagactgccaagtggggatagacgagaatggttgaagccgattatgttcagtgcagggattggacagattgatcatactcatataactaaaggggagccagaggttgggatgcttgttgttaagattggtggacctgcttaccgcattggcatgggaggaggagcagcttcgagtatggttagtggccagaatgatgcagagcttgatttcaatgctgtgcaacgtggagatgctgaaatgtctcagaagttgtaccgtgttgttcgtgcttgtattgagatgggtgagaagaatcctattatcagcattcatgatcaaggtgctggtggaaactgcaatgttgtcaaggaaattatttatccacagggtgcagagattgacataagagcggttgttgtgggtgatcatactatgtcggtgttggagatatggggagcagaatatcaagagcaagatgcgattttggtgaaagctgagagccgggagattttgcaatcaatctgtaagagggaaaggctttcgatggctgtgattggaacaattaatgggggtggtcgctgtactttaattgacagcacagctgcagcgaagtgcagtaaagaagggctacctccacctccacctgctgtggatcttgaactcgagaaggttcttggtgatatgcctaagaagacgtttaagttcaaccgcattgcttatgcacgggagccacttgatattgctcctggaattacattgatggatgctttgaaaagagttctccgattaccatcagtttcttcaaagcggttcttgacaaccaaagtggatagatgtgtgacaggtcttgttgctcagcaacaaacagttgggccattgcagatcacgcttgctgatgttgcagttattgcacagacattcacagatctaacaggtggtgcatgtgccattggtgagcaaccgatcaaaggcttgcttgatccaaaagccatggctaggctagctgttggagaggctttgacaaatctggtttgggcaaaggtcactgcactttctgatgttaaagctagtggtaactggatgtatgctgccaagcttgaaggagaaggatcagcaatgtatgatgctgcgattgctctatctgaagcgatgattgaacttggcattgcaattgatggtggaaaagacagtctttcaatggcagctcatgcggacggtgaggttgttaaagctccaggaaatcttgtgattagtgcctatgttacctgtccagacataacaaagacagtgactccggatctaaagctcggaggtgatgatggtattctcttgcatgttgatttggcaaagggaaagaggagattgggtggatctgcactggctcaggtttttggtcagataggaaatgactgtcctgatcttgatgatgttccatatctgaaaaacgttttcgatggcgttcaagctctcattgcagaaaacttggtatctgctggacacgacatcagtgatggtggactggtagtaacagctttggaaatggcttttgctggaaacaaaggtataaatctcgacttggcttcaaatggaattagcctttttgagactttgttttctgaagaacttggtctcgtgcttgagattagtaagacaaacctggacgctgtgatggaaaaactccgtgctttcgatgttactgctgagatcattggaaatgtcactgattcgcctctgatagaggtaaaagtggatgggattactcatttgagtgagaaaacttcattcctcagagacatgtgggaagacaccagtttccagttggaaaagctgcaacgattggcatcttgtgtagagatggagaaagaaggtttgaagtttaggcatgagcctaattggaaactctcatttattccatcctcgaccaacaataattatatgtctcagggtatgatcgctctctatgaggtttttttttatctttaattatttatatagcgtatattttctaatgaaaatgtttgtttattgtatatgctctcagatgttaagccaaaagtagcagtgatccgagaagaaggcagcaatggagacagagaaatgtcagctgcattttacgctgccggttttgaaccttgggacgtgacagtgtctgatcttctagctggagacatcacccttgatcagttccgcggtattgtgtttgtgggagggttcagttatgcggatgttctcgactcagccaaaggatgggctgcttcaataaggttcaacgagcctgtgttgagtcaatttcaggagttctacaaaagaccagacacgttcagtcttggaatctgcaatggatgtcagttaatggctctgttaggatgggttccaggtcctcaagttggcgggtcacttgacacctcgcagccgaggtttgttcacaacgaatcaggaaggtttgagtgcaggttcacaagcgtgaccataaaggactcgccatcgataatgctgaaaggaatggagggaagtactttaggggtttgggcggcgcacggagaaggacgggcttatttcccggacgaaggagtcttggaccatatgcttcactcagatttggcaccattgagatactgtgatgatgatgggaacgtgactgaagcgtacccttttaacctcaatggttcaccgttgggaatagcggctatatgttcacctgatgggagacatttggcgatgatgcctcatcctgaacgttgtttcttgatgtggcagtttccatggtacccaacaagctgggacgttgagaaagctggcccgagcccgtggttgaagatgttccagaatgcaagggactggttagagtcgtgttaagcgtgtttttttagtataatttttatctgcatcattttgttgtgcatttggtgttttgcagagtctttgaaagttgtcgacaaatcatgtgctttttagtgagacttgatgtgtgctttttgtccttcacgttgtattcaaactctggaaattaagcatgagttactctcttcgatcaatcaagcaatcttgtgccattgggtactaagttgggtttatctaactctgatatcttgtatcctacttagctaatcaatggaaagtcttctcccgtaagtgaatctcttgagaacaatgaggcgcacatgggaggttttgagatgccaaacatggatttgacaaagagaaaaggaacaagtaatagatttcttctctgcaaaatcattgcttcaaacatacaaggagtggtatacaaactttggtcatcaattggtttgcaatacaataatgtcaaaaacgcagcttatttgccctctatcccacttgttcattgtgtccatgtataaatttaatcaaagaatgcaaatctccagccaacctttggttcttctctgcataatccttagatgcactttaaaatgagcaatggatcatcgggatttcactgtcgcatgaccactatcagccaagtgcttgtgtagttttgttctgcccagcatgaaaagtcacaatattaagaaactacaggtgaatgatacaaagcacactgctggagcataagagaaatgacgaaagaacaaatatctaatgaaccaacctcgactcaaactcctctccacatctatcacattcattgctactgtttttcttcgttgtgccctgcattttgacataatatatgatttcaagaattatcacaccaaatatgtgatttagttatgctacaaggggagaaagattttaccttggttttcattcctctggtggatttctttgatctgggagccttcttgtaatcctgggactccatgtctcgatttacatattgagtatcatccgcttcactgctcttttcatttaattctccctggttattcttatccttgccctttttgcttctgcgcctcctgcctgtgctcttcctattatcatactccattgaatttgcctcatccttctgagaatccgcaagtgctccggaagctgactccgttgcattcatgttttcatctggattaccgccctctccaggtatctgtactttgctggtgtcatctgccatgtcatttccagcattctgtttatttctctcttccttagcttctttattcctacctgtgcttttctggttatcaaattcgctaaactctgctgtgtcaccttcgatctcgacttcagtttcatcttcatcttcttcctttgatacgacattcttttgcttattcttctgtccagataccattttcttgagtagagtcatctcgtcatcctcatcctcactttcactagatccttgcatatcttcctctgccacaaaatactcatcatcagtttcatcagcttcacctacaacttccttcttaacatctctttcttcattgtcgatatttaactcctcctgaagcttctcatgcagctcctctacactttcaggtgagtccaagggcccatcaatctcttcctcttcattttcctcttcataatcagtgaatgactctctcagctccgccactttctctttatgcttcttcgactgttcgtggtttttccactgcttctcacttttgaacttcttgctacaaacaatacaatagagctgctcattcttcctcttcgcatcatcatcctcctcttccaattcactgagtcctgccccttcatcttctccctcatgagcctttgcccattcaggctcctcgtaattcatagctctctccaatctctccttctccatcttcttcttcctttccctctcctcttccttcttcttctccatctctgcattcttcttcaccaacatgtcaatcactctcttatccctcttcttcacaaactctgccaaacccctcacagtatcattatactctctcttcgccttctttctcgactttttattctcctcctccatcatccttctcgactttcgattcggtccacccatcacatcatactcatccacccagcagaaatccataacagtgcaaaaacctaaccagtaattataaaacgccgtcacctgagcataaggagactctagattccccataatcggagcttccctcacagaatccatcctcaaacctaacgttctcgcgaacttaatctcgttgaggtaaacactattaaacacatcgtaatacaccttgtaaaatcctttcccggtatctgagtatccagaatatacagtgggagagaagaaagcgaatagatccggaacagagccaccagacttcgagccaccggctgaactatggtcagcaaataaaatctgagatcgatgagaatcataccaggctcgctccttgggatcggatagaacctcgtaagcgtgaacgagctcttggaactgggcggtggcttcagcctccgataatccagcggctttcattagcttgtcggggtgacgctgcagagctaaacgccgataagaggatcgaatctcgtccggcgaagattccttgctgataccgagaacctcgtagtgacatcgtttctccgaacgagacgaagacgccatctctggtttttagggtttaggctatttctcttttgtcgattttaaacgcatacccagttcgagctgtccaagatttgaccttggagatgtatatataggaacaaaacaataaataaacttataattcaatttttctttctcttaatactttagttttagggatcaccaggcttatatcaacgaaaattaaagattaagtacagtatcttattaataaggaatcagattgttgttcacagtatcttagaagagaaaacaaaacactgagccatttatagacaagtttgtgaatgctcctctcactctttatacttggagacaagaatctcgctagtcctcactaaccttcatgcactgaagtagaagatgttttcctctctatgctcaaatttgagacgacattgttattattattacttttctctctgaagttatctctaaggaactcaacggccatgaaggtgagtgccgaggccggaagataccacatgacccttgggacgcttcctcggaaaaacccttgtggaccttccttcctccatatctgtccaactgcatccaaccatcccttgtacctaaaactcaacgaggttaccaaagcttaatcgaaacaagttcttgaatctaattgcggatgatatttagttgatcatattaatctgttaacacacgaggcatacttgatcgttgatccttgcacttgcagtcttgtttttacaacatccagtggagttgtgagataagcacttagtcctgaggagacatacatgggtcaatatgttggataagctatttgaaacggatttcttttataactgatctaattctaacgtaccaccagctaatcctcccaatacgagaccctctatcgaactgttgactccatactgtggaaactttttctttccttgatctgttagatcctttaatccttcataaaacactacctgaatggaaaaacagaccgaacatgaggagacaaagaccctaagttgaacggaggtaatagtttcactgaagtgccatattacatagtcataccataagaccagcaaaaggcacatccctcgctagtgtagaccaatatctgccacaggaaaaaggaaaataataacatgggtctcttgacacgagtcaacaattagaatgatgtatccaattcacatcataatagcctgaaaataagttacatacccagcatatagtccttttggcccttgctctttccatattgagcatccagcctggaacattccagtgtaataaccatacatgtcacctcttggttgcaccggaacgctgttcctcgaaatataagagctccaggagctactagtgccttgaatttgcattcgctgctttatgacttcacaaggaacatatatgaaagaaccaagtgtatcgcctgaaacaaggaaagaagcagcaaaacacaaacgaatcagaaactttctaacttcaaataactctacgtttactttcattttccaactatttggggaaccccctcatgacgtgtatgtatacacacagccacaatccttcacgatgatattcacaacaaggacagtccatgacgtatcatgaaagagtaataaaaattggaacatatcttaagtaagcaatcagcaatccttgctcttgtgtggtttgataataacttggatcttatcttttaaagacccaccatttccgtaagttagaatcatcatataacattgacatgtttgataacatttcgtttcttcaggcaggttatatctagtctcatttctgctgcatgcttggcattctaaatcaatttccacttgagcgaccatatatttccctcctatctttaccattatattaatgatgatatgactgagagaggagacacttagataacataccaactgctcctgctataaaatgcgcccagtgccctgctaagctgggatgagactcttcaatccatttctttgttgactcaataaaaccaaagtaagttgctccagtggcaagagatccagtgactccaggagcaatgcccctataaaagcctaaaacaaggtcagtagcaaaaaaaaaaaaaaaagaaatacagagcatagatagttttctattccaggttctcagcacaaacatgtaccagcataggcagtctgttgcttataaagatgataagtaggacagtgaaccacacatatgccatatgcatgcctcaagaagagaaaagagaatggataaagtaccttttaagccatcaccaacccagacagttcggagcatttgtagaatactcttttgtctctgaaatcaacaactaaacacgattagagatgatatactccaaaaatgaaggtaagtacacacaatcaggtctaatctgtatttcctaagccaaaggcccctgaaagtgaagtctggttaatcatacctgagttgcattcatgataatttgactttgaagtctagttttgagagtatcaacgggatgcatcattccttctccaaaagctccagcaatacctccccataagaactctctccaaactacatcaatgtgttgaacgttagactaattgaccccacttgcaactattcgattccgatgaaagtgaaaaatcaatgccactaaaacatgatccaggtgttctcatcataatcaccagacgaaatctcaacatttcgctaagaagaactcatcttctaagcgaaatcatgatcatcaatcaaatccacaacgattttcgccgcaataaacccaaagagaaaccgaaacgatgagtcgggagaagagagactcgtcgcttaccgaaaaattgatcatgcgtggctttgatttcgacgctcttacgaaaactcggaggagattgcttatggctcgaatccgagctcttcgtcgccatttccgttgcagagagaaggaaaataatcttctcgaagcttccaagagttgttagggtttatgaggttttaatgaaagcaatgtgccaatgttgcgcttctcgccaattcgccgtgaccggcgacgaataccaaatttgttaaccgcaacgatttactgaaaacaattaaaatattagtgttttttttttacattttcagaaaatctttctgaggtaaatttgtaatttcgtcagttcattagtcctccttatcagtaactctaggtggcacagacttgttcatatgctaaccggagattcagctttgggatgccgttgcagccaaactcattgaattagtagcctctctagtagaaaatattcgatataaaaaacgactctgttagaactcagaagttattacagtttttattaattggccaacattttaagaaaaacagaccaactaaagaggtctctctacatgataaacaacctcaaacgttaaatagagagattaagaaagttcgtaagttttagactgaaactgcaaaacaaaagttccatgacgtaaacatacacggcacaacatcgtggagactaggctctcttggcaacatcgccatcgtcagtttgatcaaacccaactggaccattctctgtgttaccgttctctgcatctccaaattgattgtcactgccaccaaattgttcatcgcctcccaaaccgctttcagtctgatgatccgtatcattgcctaatggttggttgctctcaaacttgtcatcaaagccagcattagtggagctgccttgggcaaagttttcacttccaccaacaccacctgcaacaccatatccaccgccgccgccaaaattgcttccatagccaccgccaccaccaacagcattgccactataaggagggttacctccataaccaccagcatttccaccataggaagagttaccaccataaccaccaccacccccagcatttccactataagaagagttgcctccgtaaccaccggcaccacctccataaccaccagctggagcaccataaccaccatctgaagcaccataaccaccaccaggaccaccgaatccccttcctccaaacccacttcctctttcagttgcataattcaccctaattcttcgaccatgaaggtcctatatgcaaaaaaaaagaaacccaataaacaccaattgaaaatgccaagcaaagtgggttcatttccagcgttttctgaatcatctagacagagtctgaacgcaaagcttttactatgtaacaagatatacaatccacaaacagaaagattgctccaccattcgacccatcattaagagagagtaagtcgttgcttaacagattaatagtatttcaagctagatgataaacatctaccctacctatgttgccaacgtttgaaaggccacaaaacttaagtgttctaaataaatgaatcgtcaaggcacatcgatttgaaagaagtcaaacattcaaaacaaaacaatattggtcagaaaaggaaaagaaacgacaaaggaataaactaaagccacacaacatcttagtatcacaagaagctggaacatttatgtgatacctgtccatccaattgcatggcattactagcctcctcagtcgaagtaaatgttacgaaagcaaagcccctagatctgcctgtttcacggtccacaataatctttgctgcaattgataaaaattagtcagttgttaagagtaaaaccacaaaaatatagcaaaaggaatttaatacttcaaaggttagagttttgtgcaataacttaaagggagaaagctagttaccatcaacaacttctccatatttgctaaaagcttctcttaagccaaactcatcagtgctgtaggagatacctgaagaaacatagacaatttttgagacaaacaaaacaaaagagagtattctctcgcacagctgaattagagtcatagtcacctccaacaaagatttttgatgaagacatgcaacggatgctctgtagcatcgagctagaggcagtgacatggctgctggtctgactgaataaccttccaactttacttaagaaagccatttggagtatatccgtattctagattcaaatgaaagagcaaatgagcaatcacgtggtggttaggcaaattaaggacataccaaaacatagatagtgctttcagaaaaaggtagttacagaagatgaaactcatgaatacacacgcgtaagacccatcaattcaatcgtcaataaaagcaagaaaaaaacattctttcatcaagtaaatcatgcacaatacaaaaaaaaaaaaaaaaacttcatgatctgttctcaagttttgctacacgtcaaatttctagttccagcaacaaggtcatttcgattggagaatttaagaaaaattaaccaaagcttacaaggtcaactcactaaacacatatacgcatcactcagtagtcagaaccataaaatgaaagtccaaatgaaattcataggcttgcaaaagagaatcacaaacaaagattgagcagaaaatcatcatacagagaacaatctagttttcggatcgacgaatgaaacatcggattaaaagatcgaatcacaaaatcgaaagaaacaaacagcttaaaacataaagaaaaagaagaatcgacgaaagtatacccacccaatcgctagggtttaacggagatgatctatctctctcgaagcgtctttcaattctcgccagtagtgaaaaccctgaggcttatggtaagaatttcgcttatcctgtccgttgatttatttgagttaatctttaccgtcgatttgattcactcgctgacttttatttagacccggttaaagtaaaccaaccatattgagtagaaaccgaaaccggattaaaatgatcaatcttcttctttacttagcaatggcgaaaaatagttgattaaaattgggcactaattattattttcagtaagtaaaaacctccttgacgcgtgcatgtcctttaaactctcaactccaaattccaacaccaaaaaaaaacatcctctgaaattttctaaaattaatctcttcttgcttgtgttcatcgtcctcgtcctcgtcctcatcatcatcatcctctgaaacgtaaggctaattaaaatctcttcgtaaaatgccaatgatgttttttttcctttctttaatgaaatctataattctatatctttctcttgtacgttgcagattgaaaatattggcaagaagtagttaaaacttaaaacccaagaaacagattcttacgttttggaatcatggaatcatcacaagaacaaagtttctttagccccacgaaccaaagctcgagaaacttagcatctaaacctgaaacagaagatccaatcataagactttcttcttcgtcttcctcttcttgttcttccatagaagccgaaccaagacctgatcagaatcacaaccacaacaatgtagagcaatctcctccgacacaagtcatggaaagatcaacaaacaacacaacaacaacgacgacctctacccctaatacacctccttacagaatcccttcacatgttttcgcgagaacaacctctacagctccagaatggagtactatctccaatgaatctcttttcagcatccatatgggtaacaatagcttcaccggtggagattatttcaaatccggcgaactcacgtttcctcagcctccttcaccaataacttctcctttgccttctcctttaccatctacgccccacaacgtgaaccaaggaggagccgtaggagctgctgcggaggtaaaaactccggtggatataggcaagaaagcagctgaaacagataaagcttaccgcgcaagtaaagaagacgaacaaaaagctgcagcaagtataagagaggttatcatggctaatgaagctgctaacaacaacaacaaaaccaataaactagatcgttctgtttctcgtcgctcagaaaatttaagtgtcaagtctttcgcttttccagtgtaagaaataaaaccttttcttgatcacttacctccgtttcatgtgttttcttttctcactttattttgttgttgcatttcgtagaatggggaatgcagacaaaggcgggttacaaggttccacgcctgaaaagaagcagaggaatccttcgcagccagagacaccgaagatttccactgaagctgaaggagatgtaggattgaagaaagaggaagctcctaaaccagtagctcctaaaacagaagcggaccgtgcctctgatcgcaaccccaaatggctctcttgcttcccttgctgtacaacctcttgtgtctaatggaaacatcttttgagggggattgagtttgatttgttttaccatctttcagtatgatagagaaattgtttcctgcttcttggtattgtagaagtgtgttccaagatttacaaagtcctttttaacctttgtatttaatcttgtgaagtaaacaattacgatttaattaagttgtgtcttttttcttttgtttgatctttaagactcctctgcttcttaacaactgtgttcttcttcagaataatcattgtaactttattcaatacaattaattgcaaacaataggattactgataggtgtttatgtggaacttcaagcctttgcataagggaggaccaatgaggcaatttgactaagaagctgtcgtggagacttggaggtatcaggtaatggagatgtccattcttgaaagttatggaggctgcctgtgaaatcagtgaagagtccatcaactccaatctcattgatccagtagtcgtactccttatacgggtcttggctaaagttatagtgtaagaattcgtgttcattcctgtacgtatagggatgcacctgagtttgtaacagaagaacatggtcaggaagttagcatgtgttactgactctcagtcaccggatgaatcttaaataaatcctacctgcagattgtgtgcgtgagctcttttgaccaaatctgtgggggctagcacatagttgttgtttaccggaacaattgtatccttccatggtccgatacccacaacatattgcttgatgtattcgaaatacgcatctgatgtgatctctgcatatgtctgcttagatttgcaagaaagatcaatcagtcacttttaatagaagcaaaagaactttcaggaatcataaacaatacgacgagcagagcattgacctggttagtgtcttgcgttggcatggtaacatcgtctattagaaggactttcggcgagtctgtcaagtttgatatgtacacgagtgaagttggggcaaatgactgaataaatagtggttttttcaaccacttcttggacaaatacgagcctccatacccatacttcttaagtgtctccacaactttatcctcaaatttcttaccaccaggccatttgacctgcaaatatataacagtgatagaagcaaaggttaatgactcacctgcagtgggagtgaaagccaaaaagaaatcattttctgcaaattgaaccaaatggtatatgtggctttttaaaagtcactctaaaggatttcagtaagagtagaagtcaagcttttaggattgtgactcacatgctggttcattaaaactggatttttaatctcaggatatattccaacaactcttggagcatcccgagcaatggtaagaaattcctcaaatgtaatgatagggtacattcctgaaatacaagcaagatatgggcatggttaaagatttcctgtattatgcagttcttactttatatcttccaacagccaaaatacaggaaagaaaggcgagcaaaccgttgtattgctgatcccgaaaagcatatcgctgctttatacgtagttgctttagttctttaagtgtaaaatcaactacaagcaatgaaagaggaatcacttgttagcaaatcattcagactcaaacaaaccaacttgaagctttattagatgcttctctagctgttatgagattatgtgcgagagatattttgagcaaatgactctatcctgagaccgaatccagcagcatgcattgactcagacctagaaacagaagaagaattgatgtaacgtacaagtgaaaaagccagtaatgttgaatccttggacatcatatgtccttttacgatctgcaaactccttgtggctcgcaacattggttgtttcgtcgagaatacaatcatggaaacatatgagcacaccatctttggatgataagatatctgtttctatgaagtctgtgccttcttcaattgctttctatcataagaaaaaaaaaatgttttacttcttatcttcggaaatcatcaaagagaaggagattgatcaagaaagatcaacagtataccaagtatgcagctgtagtttcttctgggatctctccattggaacctctgtgtgcgatgttataaggacgtgaagtctgaagttgaagcttgacagttttgggtcctttaacagggagagggtgcaatgtcctcccagcagcacacacagtaagtagagatagccatatcaagggtaagcatcctgtaagatcaccaataaccactttgtattgacgttaacagaaacagagccaaaaacagaaccaagactcaaactttttttagcttaacaggaaacaaatccagatagaatgagaaataagctttggtctctcaagacccaaaaaattttctaagcttataatgaaacaagaaacagaaacagatccagattcaataaaagattaaatttttttgtttttagtgtatagtaaaaaaatgaaacaaatccagattcttactttgttctcaacctattcgcttcttttttttaatttactattcagttttacgaagaaaggtgaaattagacaaatttcaccaaaaaaacacaagctaatgcaatagaaagcaatcagaagcacagaaagatttcatgcatacaaaacccagaaaacaagaacaaaaagaaaaggttgaaattgagaagctttacttacttgtaagaatcatggcgatctggtagatcgatcggattgcttgtttgattctccttatttgtctcttatcccactctatcagttcttgtccatttataataaagtgtttctaatgatatacatatatgatatatcactcttactccattgacctgtttcttggcttaccgctcttgggcgaatattatatctttcttcttcaattcacgttttccgaatattccatttgtttttggttgacaaagactttttaaggttgcattttatatttctgaataaaaagtagtaatactaccaagcaacgcctctccatgctaaaattgcaaagaacatcctcccatcttttatattcccccaccaaaaaaaagcgatgcattaccaactttttttaatattgatcctcaccatcgaaacctcattatgcgtctcgccggagctcgccggaatatactttttgactcccagtcgaaggtccggtacgtcttgatcgctgttccagcttcatttctaaggtctgggtcgacccaattgctgtttataactccgattgatggacagcgacggtggtagccgccgtttcgtgaggatgtagggtttttatttgggcggagacaaaaataaaatgtttgctggaaacggtggcgtttttggtgttggcggtaacatccattgtttctgacgtggcatattatgccacataatcaatacagttaccgcagagagtttaaactttaaaggttagatttttttgttcatataatgctttagttattcacatgtttaacagaattcaaagtttataactttattcactgaatgtgtaagcaacacttgaatcattttgtggtatatatgattgtgagtagttgttttaaaaaatcaattcaaaaatttaattcttgggcctgtgttgcaataatctcattcgttaatttacttggctactgacaagcgaaatatcatatgctaaaccactcattttctagagagactttgacttgtatgcccaacgagtcttaccatactactctaagtgagttagttagacgctaaagatatgacttttcaaatttacagatatttcttgaagaacttggtgttttccgctggaaatttgaaattcttatagaggtggggagatgtttgcttgaactcatattcacatattgcgtttgagtttcttttgtttcactttttgtctcatattgatatttgctatggaagggaaggtgtttttgggccaatacttgatatggattatgttactgctgggacagatacatggatccaaaagctgtattcagaatgaaaagaacgctttgttggactaatgacacaaagagtgattactgtctgtggaaggtcattgagtgatcgcactagcgggcgggttatcaagctttcctttggtaaacctttcttcaaaatctaactcacttcaagtagagttgggaagttcttggaagccgaaatttcagttgagtgttatttcactaggagcttgcaatttggtgaaggttcctcattttcctataccagaaggatttgcgtcatgttgatctctctaacaataataagtttccatcgtggctgctggagaacaatacaaaactcgaggctttgcttctacagaataactcttttacaagcttgcagctaccgcaatctgatcataatctgctttacctggatgtttcagttaatggatttgatcaactctttcctcagaacattgggtgaatacttccttgcttacattatatgaatctaacgactaatggttttcaaagaaatctaccatcttctctgggtaacatggaaatgattgaatttctggatatatctcacaacagtttccatgggaagctaccaagaagttttttgaagggttgtgattccttgatagtcttgaaactatcacataagaaactaagtgaggaggtttttccagaagcatcaaactttttttcaatactagagctgtctatggataacaatctgtttacaggaaagattggaagaggtttgcagagcttgagatctttgattatgcttgacatttcgaacaacaatctctcaggtgttattccaagttggtttgaccaacttcaagacttacattcgctacagatttctaacaacttgttggaaggtgaagtacctatatcgttattcaacatgtccagtcttcaactactggccctctctgcaaacagtttatcaggggacttacctcaagccatttctggatatggggcattaaaagtgttactcctgcgagacaataatttatcaggggttattccagatacactgctagggaagaatatcattgtgcttgatctgagaaataacagattgtctgggaatattccggagttcatcaacacccaatacatcagaattcttcttctccgagggaataatttaacaggcagtattcctcgccggttgtgtgccgtaagaagcattcacctcctggatcttgctaacaacaaattaaatggatccataccttcatgtcttaggaatgcatcacttggtttggggagaggaggatacattagacgattatttataatcattacgttttttctttgggagcacctgtcagtacatttttcaaatctctgctcgtgcaagatgggtttgctatcgattatgagttaagcacccaaacgaaaattgagtttgcaacaaaacacagatatgatgcctacaggggtggaaatctcaaattattgtttggactggatctctcaaaaaatgagctgagcggtgagatcccaatagagtttggagatcttcggaaactacatgctctcaatctatctcacaacaacttatcaggagtataccagaaagcttttcaggactgaagaatgtggaaagccttgatctttctttcaacagattacaaggtcagatcccaccacaactaacggagttgagcaatcttgaggtctttaatgtctcatacaacaacttttcaggagtcattccacagggaaaacagtttaacagctttgacatgcgaagctacataggcaatcctcttctctgtgggcaaccaaccgacataagatgcattggtaatacctttcaagaagcagattatggagtggaagctgttgaaaacacgatcgacatggtttctttctactggagttttgttgcagcatacataacaatccttcttgggttactcgcatcactctcatttgattctccttggagcagagtttggttctacatcgtcgatgctttggttcacaaggttaggaaattgttatggtaaaatactgcaggtgacaaaatgtttcttacgtgctagtttcattgtcgtccccttctgttgttcttcttctcaaacctcctgctttgtttcacaaaaccagaacatagcttatgttttggttcctctgtactgtctttttgtctttgaataaaagtaatgcctcaaaacatatcttggactggtttggtggttggtttaattcataatatacagtaacacatgaatttcttcaggaaacaatttcatcgtagaaacagtacacattacgaaagacaaatgaatataaatacatttaatttccattttatcttatgttttaccgaaataattttattttatacaactaatttatttcatctatttggatgactagttgaaaattatttgtaaaaaaataaatttgttttcttcgaagctgcgagagttagtcacagttgactatagagattttcttcgaagacaaaatgacgccaacaaacgacgccgttacagatcaacctctgtttcagactttcaggagtaactgatccaagagagcctcctcatcaactccgtcagcgttgggcttcctcaagtctagtggttgttcaacagaattcaaaggccatgacatcaaagagaggcatttcaacaaatatcattgacatataacaaatatcattgaatgattcaaaggtactataacttataaggctaaaccagtcaaaataaacgaatgtgatcacttgaatcttaagtgtttaggtaatagagacttcaacattgtaaatataaccaatattattcgtcgttgaccttgacgttattctgttttcaccggatgtagaaattcttataaacgtggagacacttgtatatatttaactacattgccttgaagtgttttcattaatctttgagtttgagtttcatacattttcttctcttctttttttcttccatcacattttcaatggaagggaaggtgttcttgggtcacaacctgatatgggtgatgctactgatggggcagttacatggatacaaaagttgtattgatgaagaaaagatcgctttgtttgagctcaggaaacacatgatctcaagaactgaatccgagtctgttctccctacttggaccaatgatacaacgagcgattgctgtcgatggaagggcgttgcttgcaatcgtgtaagcggacgggtgaccgagatttcctttggtggactgagcctaaaagataattctctcctaaatctttctttgttgcatccctttgaagatgttcgaagtttgaacttatcaagctccagatgcagtggcttgtttgatgatgtggaaggtataccatactgattactttaaaacatttttctgttgcatgctcactttgatattttccatgtgtggactaattcttatttcattgttttaatacaagaaagtccatatcttctgataatacagtgcttagcttttctctgtctctgcatttacttgctgagaaatgttgcattttgcaatgacatcaaacgttcacttacattctagtcccatttgcatagagttcctctctcactatctccatttgcatgcatcattgctcagcatgtaagtgaactatgttattttcatatactttgttaacaagattcttgtttgcaggttataaaagcctcagaaaattaagaaagttggagattctggatttggcttcaaataaattcaacaacagtatatttcattttcttagtgccgctacatcactcacaactctgtttcttaggtccaacaacatggatggctcttttcctgctaaaggtatctctacattcttaactaaatcatactatctagcgtgacctttctatcgatcatggatcatttgttggcttgatattgctgtaaaatttgtatgtctttaattttagtatgtagcattcttttatttattggactccctttcacttcagaacttagagatttgacaaacttggaattactagacctgagtagaaacagatttaacggctccataccaatacaaggttagttattttaaaattaacgcttgcctttcttttctatattggaaacttaatactagatttaacatctaaaaacaacatttttggaatggtttaagtcatccttaaagttatttgaccttagatgtgtatttgcctttcggcagagttatctagcctaaggaagctgaaagctcttgatctaagtggcaatgaattttctggctcaatggaattacaaggaaagttctgcactgatcttttattttccatccagagtggtgcattcacgtttgttaagtgactaaacttctgcattcggtcattgcagggatttgtgaattgaataatatgcaagagcttgatctcagtcaaaacaaactcgtaggccatctcccctcatgtttaactagcttgactggccttcgagttcttgacctttcatcgaacaaattaactgggacggttccttcttctctcggtagcctacaatcccttgagtacttatcgttgtttgataacgactttgaaggttctttctcatttggttcactcgccaacctctcaaacctaatggtgttgaaactttgctcaaagtccagctctcttcaagtactgtccgaaagttcttggaagccaaaatttcagctgagtgttattgcgctacgatcatgcaacatggagaaggttcctcattttctcctacaccagaaggatttgcgtcatgttgatctctccgacaataatatctctggaaagcttccttcttggttattggcaaacaatacaaaactcaaagttctgcttctacagaataatctctttacaagctttcagatacctaaatctgctcataatctgcttttcctcgatgtgtcagctaatgacttcaaccatctttttcctgagaacattggatggatctttcctcatttacgatatctgaatacatccaagaataattttcaggagaacctgccatcttctcttggtaacatgaatggtatccaatatatggacctatctcgcaacagtttccacgggaatctaccaagaagttttgtgaatggttgttattccatggcgatcttgaagctgtcacataacaaactaagtggagagatttttccagaatcaaccaactttactaatatattggggttgtttatggataacaatctctttacaggaaagattggacaaggtttgcggagcttgataaacttggaactgcttgacatgtcaaacaacaatctcactggtgttattccaagttggattggcgagcttccatccttaactgcacttctgatttcagacaacttcttgaaaggtgacatacctatgtcgttgttcaacaaatcaagtctccagctgctagacctctcagcaaacagtttatctggggtcatacctccacagcatgattcaagaaacggggttgtcttactcctacaagacaataagttatcaggtactattccagacacattgcttgcaaatgtagaaattcttgatctgagaaacaacagattctctggaaagattccggagttcatcaacattcaaaatattagtattcttcttctacgggggaataactttacaggccagattcctcaccagttgtgtggtctaagtaacatccaacttcttgatctttccaacaacagattgaatggaaccataccttcatgtctcagtaatacatcatttggttttggtaaagaatgtacatcatatgattatgatttcggcatttctttcccttctgatgtcttcaatggtttttctctgcatcaagacttctcttccaacaaaaatggtggtatatatttcaaatctctgcttacgcttgatccgttaagtatggactacaaggcagccacacagacgaaaatcgaatttgcaacaaaacacagatatgatgcctacatgggtggaaatctcaagttattgtttggaatggatctctcagaaaatgagctgagtggtgagataccagtagagtttggaggtcttttggaactacgagctctaaatctatctcacaacaacttatcaggtgtgataccaaaaagcatttcaagtatggagaaaatggaaagctttgatctttctttcaacagattacaaggccggatcccatcacaactaacagagctgaccagcctctctgtattcaaagtctcacacaacaacttatcaggagtcattccacagggaagacagtttaacacctttgatgcagaaagctactttggtaatcgtctcctctgtggacaaccaaccaacagaagctgcaacaataatagctatgaagaagcagataatggagtggaagctgatgaatccataatcgacatggtatctttctacttgagttttgctgctgcttatgtgacaatacttattggaatattggcatctctatcttttgattctccttggagcagattttggttctacaaggttgatgctttcatcaaaaaggtgaggaatttattgttgtaaacgactcctgctttgtgtaaaaaaaccagaacataagttatgtatagttcctacgtactatctctgtctttgtctttgaagaaatgtacgatctcaagcatatacaacgaacacctaattacgaattgagagaaaagattaaggaacaactgaaaaaagccataagaaactgcaagtaacacatgacatttgtcacatttgtttgaaaatccatgacacagcagagagtaagtagagacatatgttaagggaaagcattctgtaagatgatgatacaaagccaaaaacagaagcaagacctaaattcagattcaatagaatgtgatgtctctctcaagaccaaaaaagataattctagcttgtaaagaacaaatttcaagaaaatgccgaagctaatgcaataaaataaactgatcaagcaatattcccactcagatggagtaaacccaggaattc

SEQ ID NO: 1250 - DNA, 134402 bp, Arabidopsis thaliana
gaattcatttatactcaaccagtttgcctatttcggcgaagaaaaatcgcaagtcttatttgtaaaagagaagaaccaagacacagtgtacgacggtttcttaatttacctttttgaaaccacggttttcgaattagcttgcggatgttgcgttcatggcgttccaacagttcatcaactccataagattgagacaacaaagggcccgagaattcgatcttgtccccatcaccctgtcatgtcaaggcttaagtcatcagtatcattgagcatgcttgtcactaaacacaaaaagtagacaaactaaatcatgcctattttttcctctctcctctgaactttaggtgaaagcgtggagagagagagagagaagattaaaaaaaaaattaaacagctgaggaaacatgatctgactaccaacggtaatctggtccaatatttctactttttgagctgtatatcacatttacaccgtatcttatatgtatgttgcatatataactactacaatcatatctttagaattactttcattttatttcacagaatcaaatttgacactcgcattacagcataagaaagaatgaaaccaaatcctaagtttcacatgtaagaacgtctggcacaaagcatacttggtctctactatgtctatcagtagcactaacaatgcaaataacaatctgctatatggaatttggatattaaataaactataaggctgcttttagagcttctataatctatggacgtaccaaattattacccatcttttttgccatttcatctctctgatagagtcccaatgacagttcctgcgagtgatactcgtcagatgcaccaaaagaatctggacgttcaagttgtctccactgctttagcatagaacgcttcaccatctcatatgactcctcgcctcgagaatctgtcttgtcctccttttcatccttatttatcttggattcaacatcacttttcccattgaatgcgggggaatgtcctgacaagctaggaatgtaacctcttgagagagatcgattatgcaccctaacacatacgtcatctttttctcgtttcgcccaagcaaaactgtttgatttagagacttgtaacggccctgagaaaggcacatctccttgtgatgcatgcttcacatgggaagcttcgtctttcttgtgatctaacgggttttgcagtttcccacataacctggcatcactttcaatcgaactatgaactaaatgaccaattcgtttctgaaatgtttcagtttggtgccgcacatcctgcaaacagaaaaagagggcacattcagtttcttgaacgagaaattatactcccaagatacagataacatgtagaaaagtgagtaagtaggaagtaactcaactggtgccaatctattgaatgaatgggccttccttgatggcttcctcggatctataccacgtctcccattcccgctaatttttttcctgaaagtcagacatgaaatatacggatgttacaaatgctttcaagacctgacatataaggccaaccaaaatggtacactatgtaatttcccagagctgtggaacagtagattctgtgtatcaagcttttttttattctgattaaagagatgatataagcataactagaaacttctctatcaggtaatgaaagaaattactgaccttgctgcttcgtcccgatgctttgtatctatctccttgctaggtgggtatattggcaagcttgagggatcacaagcaaaaggctttgtagtaaaatactgaaaacacaaaaggcaatgtcttcatttgtaaaagatgaacaaaatacagcaatatgctgtgtttccacagatatcaaattcttagctttttaaacttgatatattaaaccaaggataaaaaggttacctgagaaacaagggcactagaggcagtaccgcgtttgtggggatctatagaaagaagagtttctatcagattgatttcagtctcagacaaatctttcaaggtttcgcggagacaactatcataagtttgctgtggcttgaaaagcattgcatggggaagtttggactttttccagtaatcttctggtggagatccacacagtttgaatatcttgtgcaactgttcaacctgctccatacaattcaagtaatagcactgaattatacaccaagtaaaacataacatatccatgaccaaaaggtcctatatcatatatagttgaagacagtgttaactgtgaagaggtttacctcagttcttccccggagaataggttttccaagaagcagctcagcgaaaacacaaccaacactccacaaatcaacagatgctccatagtccgttgccccgagcaaaagttctggtggacgataccacagagtcacaactcgactggtaagaggtttcttcttgtgtccagaactattactgaagtttgctaacccaaaatcagccacctttaatatcccttcattactcaacaaaagattcgaaccctttatgtctcgatgcatcacgcctcgtgaatgacaatgatcaagcccagacaacaattgcttcatgtaacacttaatctgcaggagccaaaaacaaatgatcacgcaaccaaacacataacaaaacaccccaacattatgaacaatgatacttccactataaaatcaaacgaacctgtggcgtcgtaaatttgatgtcaggggaagaaagaagaccagtaagatcatgctccatatactcgaacacaagttgaatgttgcaggatagttttgaagtaatcaaaccttccagtttgataatgttgggatgattaagtcttctaagtatcaaaatctctcttgccataaacttaacactctccggctcaaaattatcaaacctcaccttcttcaatgccacaatcctcccagtttcagtctccaccgcacgaaacacattgctataagtaccttgtccaatctacagaaaccaaatctaaactaaatttcacaaattcttcttctaaacaacattcacataacacacaaagaattatcaaatttcgaaccttttcgagtttttcgaacgcatcggatcgaagtgggacccaaccatggatagcttcaccagcaacgttgctcaaccacgcaggccaaccagcagcgacttgctcagcttcaaggtatctactaacattaccgagtcgaaaactaagcgagtcactagcacgtcctgactcactccctaactcgctaccgctcttctgactcctcctcttcccgctcctactcctccacgacacgagcttcttcaacgtcggccgaggcggatcctccaccacaatccgacccgatccagaacactcattttcattatccttgaagacgcctgagtgatcgatcgcaggcgtcacagagaccgtctgcttcgagctaacgcaacccatttttaacagaattccgattagttcgtaacttcacaaccaccacaagtgactagctgatttcgtatccgtatattccggcgccgtcacgataagatccgtcgccgtaattcggatccggaaccaaagtgaatctcctgaaaacttgagaggtttcgtatatatttttataatgaaggttcagaagagaatgttttaggctcttcacttttttatcagaagaagacggtacattacttcaaaaagaaaacatgcatttattagtctggtccaaaaaaacgaatctacaccttccaaaattttgaaacctattttagcaaatagttaatgacagcttttttgttgaaataaagaattgactatacaaatgtggtagaacagaattcaaagcgtgttggaaaataaaataaaaaaggaaattgatttttggttgtatgtattaagttttggtctctagtacagtacaagtgaatgggctattgattttattaattgtacgaagatgacttgaaatgatttatccataagcactaagtagtgctaatgagattagaaaaagctaaaactatgattaaatttcataagataagtcaaaaccaaaattcattacagacatagaataattgcaaagagaaaactcacttgtgtctctaatgctttgccagctcttagcctatgatgactactactactgatatttttcataatatatctgtttctcaactttcaaaagcactaattatgatttaaggtgcttatattgctaacaaactgaattcctatcagtcaattttatttatttttctctctaaaaaagacgaaaccagaaaagaaaatagatcagtaactgccatatggagaatacacaaaagacaaaataagaaacaaatatatatattcgtgaaatgcatcattcatctaaatcattcgtatattctgtaaatagttttttagttgaattgtcagggagcctaaaatccatcatcattagtatatattctctcaagaatttatttgagcttaacatgtgtatgtatttagagtcaataagatatagtctcgtacggttcaacgacacccatttaaagtttccggactaaacctctgaaagaccaaaacaatgtagggacaacttaagaaacaaggacagaactttgtcttacggcaagagttgaatgaaattaagccttcttctttttggatttgagcatgaccatgccgatgaatacggaaatgagagagagaagagctatgccggcaaagacaggtacgagaatggcatagtcttggggtaagaagtacttgtggatgaagtgatcactatctacaaatggctgtacaaaacgaaaattctattatgtcagctttttcctagtaatatcctaaacattagatgacattggtacatcaaactgacaatgtctttttaaggaacttgggggagatgttgtcacttaccaggatgatgacccaaaaagtatagtacgtgaatatggacaagctgattgaagatagtagaagcccgactgctcgatccgctaattccattttgtcaagttcaaaacctgcagcaccgcaaatcaattgtgagaaaaaaatcagaaaaattcaagaagctaagcattggaagatacagtcaaaagtgaaggaagttatattgtgaatgtcaatgagaccatttcacctagacttttcccattagaccagctaatgccatggttttatgttctgagggtatgcaaactgtgctactgcacaaggcctctagaaattaaaacatttgaagaacgataatcaccggacatatgatttgctagacatcagatacacaaagctcaacaactgcctaaaacgaatcagagttgacctaggaagaatcaaacacttgcaagactcttgtcgtggagagtagtaatcatctccaggctccaaaatcaacagcttgaagtgatatttgacctatatacagatctttgaggtgttgcttacacagccctattctccttccatttaagctagaaggaatacaaacagaaaatccagttttccaacctggaaacttctgtctctccattgcatgtaaagtataaacagcaggtgcagccatcgaacaaccaattacgaagcaattgcaaggccttgattcgctcactaatcgagctaaagacaataaacacaaaccactattggaaaggccgtatgttagatgttcatccctgtcaaaagcaggagaatctagtttctcatgttgtatttcctgttctatatcttcagcagagggaatagtgctcagttccaaatcaaggcgtttctctatttcattttcatgtattcgatattttgctgccaaagtacggatgcatgacattctgatctgattatcaataagagcctttatctcatcaaaattactacagccttcataccaaatcacccatcgccgaacaagtcctgaataccaatcaattatttgggcagtatctagcaaaataagcatagaatttgaacgagcataacccttggctgttattaatccgtagcgataaagacgccttcctatagcattagtcggagcgacaacatcaccaaagaaaacaggtctatcatgagattgtggacatggcaaaagcgcttccagattagccgtctctgatgaaacatatgccgcagcagcgttttggaacttgtaaaacgcatctcttagttcttgaggaacagtaggttctacaacatgcttggacaagacaaactcctcgcttctatctgcagaggttcttagcacgtcctccatccatattctaagcaagatcttataccaatgatctgtttccatgcctgcctttctgtggcaagatatttgactcaaggtagagttactatccgccaaacctttgatttctgactctttgactttcttcaatccatgtcctaaccatttctttccaattctaactgtacctaaggtccaagcctcttctttctgcaatgcaaagagcctaaccttctcctttaacttgtgaacagctttgacagtgggactctccctaacatttttcctaaccaaggtacccaaaacacgaagcccactggtcgcttcacatggtgacgggtctgtctcatctgtgatgtccaaatgcagtgagttccgtaagaaacctatagcttcagatctgatatcacttgcaactttcttgggaccagacacagagaaatatatctcatccataaatctgcagcaataaactctgagtgcaacgtcctgctctgtagtacttttcaaaccttgttctccggcttgcctcctaaaccaggaacgaagttttgagcctgggctatcttcatcagtctttgaatcaagaccaagggcttcatgcctcattgagattctataaaattcatgatcaaaccgatcaagatatatgttcattaatacacgggacaacaccccttcttgtggaagaccatggcccttgggaaatcctccgaactcgagattgagcacccgggcttcaaacatagaacggagtaagatgcttaaactgctgtcttctactttttcctccattacagagagcaagttctcgaaaacagaaacatcaagttttttgttcaggctcaaagtgaaacaccaatccgaacgagaaatattgttgttgatgtacttcaatgcagaggcacgtccccttccgcttcgacaactatgtgaaatcttagaaaaatgaggactgaaaacaacttcaagaactattctgatagcctcttggacaactttaagagctacactaggcaagacaaggacctcttttgttttatctctagccacaatcgaaaacgtatttgaagcaacatcaaacaccccactagagagctcttctgcaatagaatcaaacgcgacactaccatttctttctgttatagaaacattggagttaagcctaatacaatcataagcatcccggagagtttcaggccttgcaatcaccttcttcaacagatcactaaacttcccattgatgcactgctctttgactcttttcttcaaccggagttcaagagatcgttttagttccatacgacttctaggtttgctatcatcatcaacatgagaagaagattcttctacaagagaagctaattccccagctagtgaaaacattccagtttccttactagccatttctgcattatctgttgcaagcagagccgatttgggaaacgtggagattgtgcgactccataagccccgtgggattagggtttctatgtaacatcggcgcaacaaatctaaaactaggttccgtttcctaaacatcaagttaaaattccgattcctaattctaaaacctatgcgattatatcccgactaagccagtacaaagtttctacaatgaaacgggacgaatcaggtttttatcaatctctttgcttaaatcaacacagaaatggaaggaaacttacgttcagggatgcgaaaagcacgattggtctgagagatagaaatcgaagaagctcttgctttgcacagtgaattactcgagattgagaagaagaactcgtgacttgagaataggaaggaaggagggactatttatgaaataacataaactattgcttacttctataaattacattttgacacctttagttgtagaatatttatgttttaaacattttttttataacagacttacaggtaatttagtacgcaacaatgaggcagtttcatttaccatgaaagcgcaagaaaaaatatagacaaaaatatcattaaatgataaatgattaaattaataaattcgttaattcagtttgataattaagatagaaacatgagtgatcagctcttcctacgcggtggaccgacatcatctacttgttcaattgtttatcagtttcctatcaattgacactttcttatatgtaaaatgcgttgcttcatgctttgcttatattcattcccccacgaatacaataatatctaatattgagctacgttttaagtttacgtaccccctaaacctctaattgtttaaaaggtttcaaggttcaagaactcgggtttgggtcggattagagcgagtggatatattagtacctacaatatatactttctcttattggatccaaagctatttaatttggtgtcgtgcatgtgcaagttattttaggtgataatgttgaatttgaccaatggaaacatcaaaacaacaaatgggtacgcagagaaaaaccaaaacgcacaaacgacgtggctttcaagtggcatggacttttaaatttcatagcaaaattttcttttgtttggtcgccttagttgtttgccttagttgttttggcatgaacaatgttggctcaataccattcacacgtccttagtgttgttgaatggaccattgtttttttatcggaggtttcctttagttttttcttttcaactggtggaagttaataactttaaaattggtaccactttgatttttttagaattttgatcattatgcattctagtgtcagaagacacaacatggatgcttgaaacatatgtggcagaagagagtgattcaacttcctactatgattagttgaagcttgaagctactactgtatctttaaagtaataaaattgaagttatagaaatatgactgtagttgataaacatataagtagactatttttaagataaaaaatattagatgattatcctaaatcttgttgcatatcatctatcaacaactttgaaagtttgatttgtttctgagtaatactactttttgcagattttgtttctaatgacacaaaatatcattttagcaattaactataattccttttttatattgttctctttatggaagagaatagtagcctctgaattttctaattcaaaaaaatatcaatggtctatcacgaagtgttatactattcaattcaaaattaattgaatacttagactaatcaaggtaaaataatacacgcatttgactcttatcacgaagaaaaaaaaaaggtaagagaaaaatatttataacgggaaaataaataacaaacaaaagaaacgaataagatgagatttaatgattaacaatgatttaaaaaaaaaacattggtcaaagcacgaagtaagtcaactagtgccgtccatatgaatcacattggaccccaccatatacatgtatattttgttaacctctttttagtaaaatatctttaattttttgaacatttcaaaatgatgccaatttcttctctttagtcgtctaaaacttagttaaataacacttttaaatctctggagaagcaaatatatcttttaatgctacataagtcacattcaccatatattgtatgtaacgtaatttttagatttacattatgcaaaagttttatctattatcataaacttaccaactctgacacgaagtcaaactactctggaccggtcaacttagatgtcacaactgctcacctaattgttgccctcgcgagttaacttaaataaagtaatctaattttatggtttttttaaccaaatcacacgattaaaatttctaaactcacacatacttcaatatatataagttcaaactgtcaaaatttattaaatgttacccactaggataagttcttgagtgcgcaagtggtaccgtacaaattaaaagaaaagctaatggtgaatcaaaaacaatatttgtaattgtttactttttctaaggagaactaaaatgagttatggtttagttttagtcatatgagactcatctagtcgataaaacatcaattttgtttttgttctaaacgacttcaaagttcaatttttgaaatattcaacaaatgcggtatttttccttaagaaatttttgataaagactagtaacgtaatatatacgtttatacgggtcaaaattagcataatatgatgactcaatttcacctttttgtaattaatttttgtgtttgaggaaaagtctaataaataggaataaatctgtgtgatgttcaaagtttttcagttgcttggtctacgtgcgggctgctttgtgtttttttccaacttctctttttctcaaatctctttccacacatgaatttccatgaaattcatcttcttccccgataatttccacatcttctcgaggaacatcgcagaggacagtaaagaagcaaaccaagaagaccaagtggaggaggacgatgactatggtgacgcgtgtgatcatgacggatgatgattctcagtcactttgctttctttgtttcttactcttctttttcatcactggtaatttcttctcttcttctgttgtttgaatttgagtttcgttgagagtttttgggaattgtaatgtcttctcttcttgagtatgagttttgggtttctgtttctttcacgtttccttcaaatgggttcagggttttaaaatttgacgtgattttttgggggtttcattgctttcatcaattcaaggttttacattgtacgtaaatgaatcgcaaagttttaatttttactctgtttgatgtcgttgatgagtattttagctgagttttttgatgtttttcttctatggcagctatagcagtggctggagattctctggacagtgatagagaagtcttgttaagcctaaaatcgtaccttgaatcacggaacccacagaaccgaggactatacacggaatggaaaatggagaaccaagatgttgtgtgtcaatggcctggaatcatatgtacacctcagagaagtagagttacagggatcaatctaactgattccaccatttcaggtcctctattcaagaacttctccgctttaacggagctcacatatctcgatttatcaaggaatacgatcgaaggggagattccagatgacttgagccgttgtcacaacttaaagcatctgaatctttctcataatatccttgaaggagagctaagtttacccgggttgtcaaatcttgaggttcttgatctttcgttgaataggattacgggtgatattcagtctagcttcccattgttctgcaacagtttggttgttgcaaatctgtcgaccaacaactttactggaagaatcgatgacatcttcaacgggtgtaggaatctcaagtatgttgacttcagttccaatagattcagtggagaagtgtggactggttttgggaggctggtcgagttttcagttgctgataatcatctctccgggaatatctctgcttcaatgttcagggggaactgtactttgcaaatgttggatttgtctgggaacgcttttggtggggaatttccaggccaagtttcgaattgccagaatctaaatgtactgaatctttggggaaacaagttcacagggaacattccagctgagattggttccatatcctctctcaaaggtttgtacttggggaataatacattttctcgagacataccggaaactctcctgaacttgaccaacttggtgtttctggatttgagcagaaacaaatttggaggagacattcaagaaatctttgggagattcacgcaagtaaagtatctagtcttgcatgcaaactcatacgtaggaggcatcaattcttccaacatcctcaagttacccaatctttcaaggctagatttgggctacaacaatttctcgggacagttacctactgaaatttctcagatacagagtttgaagttcttgattcttgcttataataacttcagtggcgatataccacaggagtatgggaacatgccggggcttcaagcacttgatctctcctttaacaagctgaccggttcgataccagcttcatttgggaaattgacctctcttttgtggctaatgcttgcaaacaactctctatcaggagaaatccctcgagagattggcaactgcacaagccttttgtggtttaacgtggcaaacaaccagctctctggtagattccatcctgaattgactagaatggggagtaatccttctccaacatttgaagtgaataggcaaaacaaagacaagataattgctggttctggtgaatgcttggcgatgaagagatggattccagcggagttccctccgttcaactttgtatacgcaattctaaccaaaaagagttgcagaagcctatgggaccatgttctcaaagggtacggtctctttcctgtctgttctgctggttccacggtacgcacgcttaaaatttcagcctatcttcagctcagtggaaataagttttcaggtgagattcctgcaagcatctctcagatggacaggctgagcacactacatttgggtttcaatgagtttgaggggaaactgcctccagagataggacaattgcctcttgcattcctcaaccttactcgaaacaatttctcgggcgagattcctcaagaaatcggaaatctgaagtgcctgcagaatcttgatctgtctttcaacaatttctctggaaactttccaacgagtttgaatgacttgaatgagctgagtaagttcaacatctcatataaccctttcatttctggcgcgataccaacaacaggacaagtagcaacctttgacaaagactcctttcttggaaatccgctgctgcggtttcctagtttcttcaaccaatcagggaacaacacgaggaagatttccaaccaagtcctaggaaacaggccaagaactcttcttttgatttggatttccttggctcttgcattggcgtttattgcatgtttagtggtatcaggtattgtacttatggttgttaaggcttcaagggaagcagaaatcgatctcttagatgggtcgaaaaccagacatgacatgacttccagttcaggtggatcatcgccatggctatcaggaaaaatcaaggtcattcgcttagacaaatcaactttcacatacgctgacattctgaaagcaaccagtaacttctctgaggagagagtggtaggtaggggaggctatggaactgtttacagaggcgtattgcctgatggaagagaagttgcagtcaagaagcttcagagggaaggcacagaagcagagaaagagttcagagctgaaatggaagttctaagtgccaacgcatttggagattgggcacatccgaacctcgtgaggctatatggatggtgcctagatgggtcagagaaaatcttggtgcacgaatacatgggaggcgggagcttagaggagctcatcacagacaaaacaaaacttcaatggaagaaacgtattgatatagccacagatgtagcaaggggattagtgtttttacaccacgaatgctacccttccatcgttcacagagacgtcaaagccagtaacgttcttttggataaacacgggaatgcgagagtgacggattttggactagcaagactcttaaatgtaggagatagccatgtgagcacagtgattgcaggcacaatcgggtatgtagctcccgagtatggacaaacttggcaagccaccacaagaggagatgtttacagctacggagtattgaccatggaactcgcgacgggtagaagagctgttgatggaggagaagagtgtttggtcgaatgggcaagacgtgtaatgacaggtaacatgacagccaaaggttcaccaataaccctgtcagggaccaaaccagggaacggagctgagcaaatgactgagctactaaagattggtgtgaagtgtacagctgatcatcctcaggcaagaccaaacatgaaagaagttctagctatgttggttaagatatccggtaaagcagagctcttcaatggcttatcttcacaaggttacatagaaatgtaaaaatctttctttcttttcttctttcagatttattatacagaacaacagagttttcttcttcaccatttttcgtttcattgtttctgattcttcttgtacacagaacctcattgttatcagacagatagggatagagaaaggtagttttgttcgcaatgtacagagacacaatctgaaaataaagatcttctcttcttcttgtctatattgagtgtaaacaacgttggctctatctcgtgtttcttacaagtcaggaaacatacaggaagaaagaaacagtacaatgagtcaggttgcaatctctctgatcagccagtttaagctcgggaaggcaaaataaaggacgagaaacgacgggacagccaaagcaaacgtaacaaagaaataaaccccgagaactgcagcactcacagggattgcatataaagccatcaacaggaatatgactaccagaggaaacttagccaacaaatgagcaacaagagccattgacttacgtaccgagtcatggagcctcccagttctgaagaatcctctggtcacaccattccaccagctgcgattgtccagcaacccttcatcacccaaggcggtattactcactccatcacacctatttctcaagtctctctgccctgaagcaacccttttgttgtcgctgggtgcctccgatctggagccattcatgctttctaccatccacagaaggtaaaagttcttggaaggaaatctgatggttccattgcaaaccagccttaaagagagaatattgcaccaagggcaagcaacgaagaagggaagctggaatggtaaagcagaggatttgatgacaatggcacgttgaagccctaagagacagtacttgcagattgtatgaccacaccataagacataaggtacattctcaacaacgttgaatgattcccagcaaatgggacactccaatttttcttcctttgttgtctttcttccatctcctgatctatctaaagtagctcttcttggttttgtagcagcttcttctcccttcgatataaaaccttctctgatcgattttgaagctaaattccacatagcaatggagggatccacaaagataatcactttgaatctttctctctgcaacaagaaaatcacacacacatacactacataatcagatatgagatttacaatccaacccccaaagattggaccgagaacatacaaaaagtaacgaacttgatgaaacccaagaaatcattaacagaattacagaaaacgaaatacacttacaagagtttatccggtcatgaagatgaagatcattgcaaaaacaaaaaatgcaacagctacgtcgttgagttatataatatctccgaagctctgatgtaaccagcgagaagaaaaccggctgaaaaagagacacgcgtcgtaaaacatggtgactctgaaacgcctttcaatgtttccgccgcccccaccgatttcctcaccttatccgtttctgttttcaggtttaactaccaaaacgcatcgtttcactataccgccaaaattaaactaccggtttagttccgtaattttctattaccgaaatcggttaaagtaaaatagtagttgtcggtgagagtgagctgtacgcgtttcttcttctccttgtgcgctttctggatcgaacgaagcattttcctccgacaatatatttttaagtaatgacaatgtttccgcattattgggtttaattccatttttaaattagggttcttcagatcgacaaatctttctctttctctttccccgatcggaatcatgctaaagatctgaactttttctcagatccgtgaataagtaagtacggagagacagaaacatactcagactgatctgaggaaaacaaagttgatggtcgcaaacctgtaagtgaaatctatagagagagacgttgaagaagaaaatgggtcaagatggttcgccggcgcataaaagaccatccggaagcggcggaggacttccgacgacgacgttaaccaacggtggaggaagaggtggtcgtggtggtttgttacctcgaggtagacagatgcagaagacgtttaacaacatcaagatcacaattctctgtggtttcgtcacaattctcgtcttacgtggcactatcggtgttggtaacctaggaagctcaagcgccgatgcagttaaccagaacatcattgaggagactaaccggattctagctgagatccgatctgattcggatccaaccgacttggatgagcctcaggaaggtgatatgaatcccaatgcgacgtatgttctaggtcctaagatcacggattgggatagtcaacgtaaggtatggttgaatcagaatcctgagtttcctagtactgtcaatggcaaagctcgaatcttgcttttaacaggatctcctcctaagccttgtgataaccccattggtgatcattatcttttgaaatctgtgaagaacaagattgattattgtaggcttcatggaattgagattgtgtataacatggctcatttggataaggaactcgctggctattgggcaaaattaccaatgattaggaggttgatgttgtctcatccagaagttgagtggatctggtggatggatagtgatgctttgttcactgatatactgtttcagatccctttggctaggtatcagaagcataatctagtgattcatggttatccggacttgttgttcgatcagaagtcgtggattgctttgaacacaggtagttttctgctgaggaattgtcagtggtcgttggatttgttagatgcttgggcgcctatgggacctaaagggccaattcgtgatgaggccgggaaggtattgacggcttatctgaaaggtagaccagcttttgaggcagatgatcagtcagcattgatctatctcctgctttctcagaaagatacatggatggagaaagtgtttgtggagaatcaatactatttgcacgggttttgggaaggtttggttgataggtatgaggagatgatagagaagtatcacccgggattgggtgatgagagatggccatttgtgacccatttcgttgggtgtaaaccgtgtggtagctatgctgattatgcagtcgagaggtgcttgaagagtatggagagggcctttaattttgcagacaatcaagtgctcaagctgtatggttttagccataggggattgttgagccccaagattaagaggatcagaaatgagacagtctctcctttggagtttgtagacaagtttgatattcgcagaacgccagtggaaaccaaaccacagaactagaggaacacaaggagaggataggctcagctctcatgagattgtggacacgtataggtaaattatatgacactcacaaatgcaaagcaaatttgtttgcctgtacttgctactttactgtttcttctgcttctcttttttttgtttgttgttgttgcaagaatattttagatgcaaattctttttccatagatgtttttgtgttttcttcagtcaaatatatggagaaatttcatactttgttattgctcgtgactgctatattcaagtttcagacacttgaactcgttggcaaactaacgtcggaagaaatgtttagagaatccataatattagactgtggaataaggatgcctgttacattgaacgatacaagacagatcatttaacatactaatttccttcttcgtagctacaaatcgctcacgagttagtatagactaagttccttaatattacatgcatctacaagatgggaatgaccagaagtgctcaccgactgaccaggaatagacagattaatgattcatcctcagctagatcactttttcaggaggatcaccaactttttgactgctagacgtatccctgccatttgctgataactgtaaggctcgagtgagaagaatgcatcaaccagagtaccgggaagtaatgctgactcaagcttttccaagttatcgctactgacatcgagcttttgattggttcccaaaggttcttctttttgatatacctgcgttccacacagggtatcatctccgttggattctgagcttatactgtcaaccagataagaatgggatcagaggttagggactctcaatggattcattatcatatgtaaaagatttaagagagagttgaatacttactgcagtctggctgtgggatagttggcaaagccttctttccttataacagtgggtctccaatctgagtttgtgcttgagtcagttggtaagttgtgcgcagcagcatcaactgcgtccaagatcttgcatagatcaagaggggcgtcaacaataatattcaactttggacgacctgcatgatccacaaacttccggcttattccgaaccgaactttcaagctatgccaacacagatgcagaggggtgtcgttgtgaaatagcttcattctcaagctcccacgataaaacgggacaagacttgccctgatgctagaaacagatacttcattaacacccaaaaatgattcatctttggcatcggaatcgggtgatggaggtgattcatcctgctgtcttacagttttcgcttcttctgcagcatccgtctgaagagttccaatacgtagtttacctattaaagtggttatatcaattggatcttctatatcataacttgatgcatcactttctgagcattccgtaagaagagaaacgatgggatggtttttgacgattgtggcgtccacggaagaggaactcggatcagttttaggactcgaggaggaagaagtcgagctttctctgactccattagccactaacttcccattacttcgtgttctgggactttttcgtggggaaaaccagctcatgtctgtaagaatgtcaggaacactggactcctgtaaacaccaagtacttaagctcagtgattttctgttatcatgtcatatgacaaagtatactgcagtcttgcagatcatgttcagggcttggaaaagttctggtctgcgaagaaacatggacacaatttttgcaaactataatcctaaaagttacagtttatcacttattcaagaaatgagaagacatcattaccagaaacaagacggttgcacagtacttgacaacttcaagattcatccggacatcatctaagctcctggtgaatcatatccattgtttagtcccatattgaaacaactgttgaatcgctaaaaggctcagggcatcgtttagatttacctgtgagcttgatctcctagcccgaagtatgtagcaagtgatgccatctacattagttaaaaggagtaaactttagcaactctgatgtgaatctaacaagaaagctacaggcattgaggtttatcattgagaatcgggaaaaagagagaccttcatgtcaccagctctcttcccaaacttctgagacaacaatgaaagcgaatcaattgtagctttcggctctggcggagagagaccaatttctgcaaatgcttctcttattcttacacaatcgaatcgaattatgttatgtcccgcccaaattcgtcctacaaaaacaccaaaatcaacacttttagcttcgtgagaaagaaagcgaggaagagagagaatcccttaccgtgaagaatgtcatagaccttatcggcgatttcagagaatgtatgtgcagagagaactccgtcgcgcgtaatgccgctacgtcgctttgtgagcgtagagattaaggaaagatcagtaggtcgaaccaaagtggagtaactatagagctcctctagcctccttgggcaaactaagatggccccaaactccaaaatcgcgaaaggctcccctgatttggtcggaaccgccgtctcaaggtcgaaaaacgctatctcgcttctctcatcgccgcccagactcgaagccattgttgaaaagtgaaaactgatagaaagaaggagaagctaataggtgggttttaaagcgaatgagcttcacgcgccacgtcctctttttacggaaaaaatctaaactttgagagacgcaactgtagaatgaggtttatcttgcgtcatctgcattcacttggagtgatcaacaaatttgattcctttcttctacattttcacaccaaatcgcttaaatctaaccacactttgaagcaatatcttgaatctggggaaccaatcaaagctcttttagatttccggcaccgattcagacaaagtcctagttttgttgacagtttttctgttttgtttgccattaaagtttcgtcagctcagaaagcttcctcacttgatggtagacagatccacgctcttgtaagaaaactaggtttcaatgccgttattcaaattcaaacatctttagtgggattctactcttccgtgggtgatgtcgattatgcacgccaagtgttcgacgaaacgcctgagaaacagaacattgtcttgtggacagcgatgatttcagcttacactgagaatgagaactctgtggaagctattgagctgtttaaacgaatggaagcggaaaagatcgaacttgatggagtgattgtgactgtggctttatcagcttgtgctgatctcggggcggtgcagatgggagaagagatttattcgcgtagtatcaagagaaaacgaagattggctatggatttaactctgagaaattcacttcttaacatgtacgtgaaatctggggaaactgagaaagctaggaaactctttgatgaaagtatgagaaaagatgtgactacttacacatctatgatcttcgggtatgctttaaacggtcaagctcaagaatctttagaactcttcaagaaaatgaagacgattgatcagagccaagatactgtcattactccaaatgatgtgactttcatcggcgtcttgatggcttgtagtcacagtggcttagtagaagaaggaaaacgacatttcaagagcatgattatggattacaatctgaaacctagagaagctcatttcggatgtatggtggatttgttttgtcggtcaggtcatttgaaagatgctcacgagttcatcaatcagatgccgataaagccaaacacagtgatatggagaacactgctaggcgcttgcagtcttcacgggaatgttgagctcggagaagaagttcagagacggatctttgagttagatcgtgatcatgtcggagattatgttgcgttgtcaaatatctacgcttcaaaaggaatgtgggatgagaaatcaaagatgagggatcgtgtgaggaagagaagaatgcctggtaaaagctggattgaactcggaagcattatcaatgagtttgtctcaggacctgataataacgatgagcagctgatgatgggagagattagtgaggttttgagatgtttagtttcttgtatgacaagttttgattgtgtaatagggaaaaaaatgtagaccaaaagagtctagtggaagttaatcaaagcccacttgtaggagcctgtggcccaacaaattaaatcaaaattgataacttaaataattttaagttttcacttttatcaaaaaggggcctgggaaaaaaacaaatatcaaagaaagcccaaaaaagacggagaaatcagatttttttgaatttaagaaattaaaaaaaaaaaaggagagctccgtcttcgttgctttttcgagcggtgcctagtctcaacttccatggctgacatcttaccttcaaattttctcaaaccaaccaaaaagcttcttctccttttctaaaatttcatcaaaccctatagggttttctcaatacaattgattttttttttcttcttcttctctatggatacgaccctttctcccgccgtggaggcggaacaaatcgccgactcaacgatcgacactgtttctcgtttgatcgccggcgttttctccggcgcacttactggaatcttcgctatgggtattaatatgttttgccgttttgatcatcttttgtttgtgcatttgagtagaggaaagttttcccttttgtgagaattgtgacgattttgttccctctaagttgttcgtttctatccttttggtcaactcttgatctcttgcaacaaatatttcttgtgggcctgcaaattttgtgaaaaaggttacatttttctgtcttgagagatttggttgaacatcgttcagatcattagtcagattatcatacgtgttcaacatcttacagctaatgattttgaacttaattctcactttttagaccaatcctgggtttaagattaggaaagtgtgatgttgttgtctctaggttatttgaataaatcatcgtctctgcatgatccctataaaccattttgttttttaatgttattgtagctggagcttttactggagctgtaactggtgcggtggcaggaagagctgcacagtatggagttctccgtggggctgcacttggcgctgttgctggagctatcctctctgttgaagtgttggaggcttctcgtgcgtattggtatttagagctgtcaggatcaaggggtccatcatctatggttagtctttaattctaacttctgtgcaatcttacacgtttgtcaattttggagatggtttttggagtttttcgactgactttatgatcgagatggtgaaatgattctgagagaaatgtagtttggtggaagaaataatgagatagttttgacatgttactggtgggccaactaaattatgggatgacaggatggcttggtttagtcccttggtaatggtaataggaatgattttgtgttgctaatgccacgaggcagtctaacaaaggatttttagctcgacaaagtctgagtctgttttttttaattgttttttttctgtgggaaggacttgaaccaattgcacggtgtttttgcaatgctggacaagtggacagctctgtctttttttccacctactgccaaatttggtagtgatgactgtttaagtatgagtaagctgagcccttggtatttttgttttggatacaggcagattttgtagagcaactgtttcgtgggagactggtagatgaacaacttatgtcaacaatgataaattcacaccattggcaggttttattcttactcatctgaatgtgtatggttaaaacagaacattgaaaagtactactgaaagttactatatgaacatgtaaatatagtttttgaagtgtttgaaggatgtctcttatgatcaacgctggcccaaacttctttcagtgtcctgagactatataagaagagctagagtccttagatttccaagatctgtaaattttgttttatatacttttgttcctgcatcttactgtttcgcttgatgtttggcaatcacctctagtttgaatcgatgcagaaagactgatgtaaccagctttgtctaccttttatagttaaggatttccgatgtaagttatgaagagcgggaggatgtttatggtgaactggaagctagaggcttatcgggtgactctttaaggaaactaccatgctatataatgtcaagtgaaatggtcaggaggcaggtcactcactgcacaatttgtctgcaggtttgtctgcttcttggtttttatatgaattgattgaactatcatggccctttcttcatcttataccttggcatttacaggacatcaaaacaggggaaatcacacgaagcttaccgaaatgtgatcatacgtttcatctggtatgtgttgataaatggctcatcagacacgggtcatgccccatttgcagacaggcagttaaagattaaaacacgactgttgccgagctgtgtacatagcaaaaacacattatccttatatgttgttgtaacttgtaagtctaaaacccctttcttctgtatttttcctcatttcatttagagcaatctcagcttgagccataggtttcgacttttgaatgtatattgttgtagacatgaataagaatacctacagatgtattgaaaagaatatagaactcgatcaagtcatgaactgatacatagttaattctaatattccttacgtgtctattgggcaactctgaaattcttgaccgtacaacatctattaaaggcaaaaaaagccctcgagactctattcatgtttcaatctttacagccatggaacaatgtcgcttgggaacagggctctattgatcttgctttcacacagtaaggctcatgggcagtcccattctcagctttgttcaacacccatggcttcaaccctccaaggccatgagcaacctccacgagtgaggaccataaacctgtgaccaccagcgcatcagaacaactcagaaggtatatctcagcccatgctctcttactttccatgttcctcggggttttttggtagtccttgtagctcggcttgtgaacgctgattatctctcccatcactgttgggttttcccaatatacgtccctgatactcttaaaataccctggagaagaagatgagataaacactgcctttgattttcggttcagaacttggcttgaagggagatttctttgtttgtcaacttcaggaagcagcttatgtctagttccacaagctaaaatctgatctatcaaatgctggaactgttcatttccagactcagagaccccaatatagattcctattctttgatcagccttagcaagatatgcgttatagtatcgtgtaatgagaccccagacaacattagttgggtgaaagagatactgacttaagaagtgaaaagcagtatctttttccgggaagagcatttgaagttcctgcttgaatgacgagactgagaagagagatgggagaaagaaactatccgcttttaagatcaaccagggggtttcctccaacaaaacttgactatcctcacaaaagaaaagcttttgttggtcactggaatcacgaactacatgtcgatatgcaaccatcgggttgccagaattgcgtagaagagactgctcgttgaagtggctgttgagcggaaactctgggggaagaaaccaagtagtgtttggaaatggctcgcagaaaagatcagccatgtcaactcctagttcgacaagtaaaaacctatttgttaagagagcataaagaaaagctgaagctagactcagcatcctattcccaagatcaccattggaattcaaccatattacatatctacaaccagaaacttcaccgtcagaccgatctcccgacttgagtttgtcaagtgttaagttataggatctagtgaatggtccacaacgtctatgaagatcctcgtatctttgtaatctgtaatccaggtaagaggattgcttaaaaggcgattcctttcgatataaactcgcctcgtacctgctcaagcatgattctttatcaaaactaggcacaagattaatgttgccaagctgtgccttcttctcgctaagtccaccatctgattcgattgctgaaaaaccagttagccaccaaagagtgtaactaatgcaacataggaaaaagggaaacacatgcaagattcatgtgtttaacaaaaccaaccattttggagaacgattcatgcgtaaataaagtaacttttatgatgggacatttgagataatccactaaatgtagtctcaaacaaagagagtaaaaatcaaatatttaccttggtgcaatctgctctgaagaactctagaggctgcttcagtctcaataacatcatcggaaggtgggtctctgagcaccacggacagagagaacataaccgaagcaaccataagaaccgccagaagtagacccatcgttttcatcgaactcaaacttggtttcatcatcgcattcaattcgctagacccggttcgagtatccgagttggtgagtcggtcacccgcatccgagttcttcttgccccgcttcataaggttacaaaaaccgggtcggatcctaaaatgagaattcgggtatggaagaagagaggttggtgactggtgagtagggtgattaagcacagtggagggagatgaagtcatcatgtgatatgtttgagagaaacagagtgtgtgagtacgtggcagagacaacgacagctttttgctacggtttttaagaacattttaccattcaactttctactaaaattttgataaactgtttattatagaattttaatgcagattattttttgtcaaaatcttaatcattcatattactgtagtttatttaatcgaaagaaaaacttacaagttatattagtatattagttaagacttaaggagtataatttttttttttaaatgattttaacacagtatgtgtaggtagtattatatatataactgacactctaaaaaaactttattggtgatgttaatggctttgaatttttttgtataagattgtgttttacggagaaacatttgtttaaaaaaaaacacaattacatagtaacagtggactccgctataaattattcaacgaaattcaaaaggacaattctatatattatgattttttaatgtactggatgattagctttcgaataattcatgcacaggtgtgattgtatttagaatgtcaattgtttcttaatttgtcaggttatgtaattgtgatttttcttaatgtcatatcttgacccaaaatatcagagtgcatggtcatatctagttgcttcgacatttttggatgaaaaattaaagaaataaacttcgatttgtatttcaattactaattaaagagtgaatgaatatgtacctcgatcataaatattaactattagcccatcatgccgctcgacatggaacaaggtcgaggaaagtccgtgaaaggccttacaagccaccacagcttcaaacttatcggtattcttctctctaagattattcaattttaacacatgtaattctacattttgagttttcttcgaatgattcaagatgaatatatctattgttcattaatatttgtaagaaatccattttgttttggtatgatgacatttacatgcgtggtttactatacactttgataccatataggtggtcatgaacttttaacttaaaatcaattatcaaaatatttgatatatatcataatatatattgcagaaaatgaggaagaattatagttttgtttaattcttgtagatttctaattttttatgtagtaatattgaattatatatctccatttctggtttaaaatattcttacagttgagtgtttaatttgagcccctccactttactatatcatttaaatctcactgacataggtaataatagtgaaacgtagtaagttatcgctgatgatcgtacgcgtttagacatcactgctcgtgactcctttcagatttctaacgtggcttaaatgaaaatatcatacgatgtaaatgttatggccctatgtgaaaaatttcaacttactaacatcattatttaaagaaacctttttttgttttttttcccacacgcgtgtcttggaaaaacgtattctaagcacgtggaaattgagaaaaacattggagacaaacttgacatttaattattatttgtttttttaattatttaaattattttttattgtcaccaatttttagtatcgatagattacgcggccttgaatgcgaatacgtcaagaaaagcttctgtttttctttttaactcaaacgcaggagacaggagtcaaaggctacctcattcatgtcggatccgagtttaagtatgtgattacgttgtggtaaatatgagcattcaaatatttcagattggtggggataataatttaggaatttcggttagaaagattttctatcgattaaaaccaaatataacttcgatgcagttcgttttggcaacttcgtgtaggaaataatgcctagatggctagaccatttatgtcgttgtagacgccaatacaaaattttgtataaagacatatagttgcatgactcgcaaatacaagtagaatcattttatgtatactttatgttaaggaattggtatccctaaaaattatatctgggagtagaaattacagatttctttatgtaaaatcacaagatgagataattatatatttgacacacacacaaagaaaaaaaaaaaaaaacgatgggatgcgcgcgattgagttagaaactgaaaatgtgaaatctctttgaaaatagaaataagcgttttctttttctttttttccacagaaataagcgtttttttaaacgcggattctcgagagatacactagagtaagggtctgactggtttaaacgcagtgggtgcggttgcggaagtttgcggaaacgggcggttgcagtttcaagcgttatcaagcgttctgaacgactggttgagcgtttgataatgagtgcgtttgcgagagttttatgactggtaaaccagcggatgcgataataattaaataaaaaaataaccaaaataaatataatatattattattaaaaaaataaaaatacaatatattatataaattgataatattagaaaaattgattttctgaccaaataaaaatacaatatatcatctcgtccgaccaaatgattttctaatcgagaaaacaaatcgaaacatgtattcaatcaaaaaatttaaaagaatacaaaataaaataaaaacaacaatgccatgaaatagtcgaaaaattacactagctaatgaataaataaaaggatagatgatatttatgtttgattattgattttgattttcatcggatgccataattgagagaatatggttacaatatattgattagtttttttaataaaaataagatatataaaagattagattaatttaattatagtgattatggtttgggtggaagccataattattttaattaattaaaaaagattattttttttaacctaactgctaccgcccgcgaccgcaaacgcttgcgggaaagagctttcaaaaattggcgatttcgaacggtccaaagcgatatctagcggtttctatgattggtgtcaatcgctaacaaccgttaccaactgcaaacgctgggtttgcgggtggtagagggagaaccaatcaaaccctaaatgtgtgtgaccactgaccacaccagccaaagaggtccccgtgaagtgaaaccgtagcacggccatcatgataagatatcaatataaaatagtaagaacatcgattttttatatcattttgtttaaagaccccatgaaatatatagatagcttttacgaaaataatacttaacacgtcttttggacaaactatcttttcatttatttactaataaatacctaaatcaatttaaaatgtgcattgtggtccgacacaacaacaatccaggatacaatgaaagaaagtctacacataaaaacaaaaacgcgcgagccatgtatatacacacatggtcttgactcttataacctaataataaatttatatatatataaaaaataaatacattgttatataaaaaaatcaaaataaattccgaacataacaaaattgatattgcgtccgatcaacattagctccacaggccacaacatatggatgtcatacaaatatacacataagtactctgagtaattgggtagcaacaattacttcttggatgattcagttctctctctaacaattgtatttttgggtctaattacaatctcacaattgataacattttcattttacctatgtgcaaacaaatttgtgaactattccatgatatattttggtataatcatttctttcaaagtgggattacaaaataaataaataaataagttctccgaaaagacatattcacattaaattagtcaaaagatactgcatactaggcataaagacattatgctaactcaaataaaatcagctgcttaagtaatgtattgaggaggacatatatagcaaaacagttagaatccatcaaaacgaacgtacttgcggataacaattctgaaggttccaattttcttatgtctaaaatggattagggggggtttgggatcgagatgggaaatcaaatacggtatcaccaaaccaccacggccataatatgttttgtagctttcgtaaaagagcaattcatcactttcagtaacattattaatttttgtcttaatagaaatagaggaacaatgttgatcacacaataaaaataatagatgatcatgtaaaaaatctaaacgagtgtaaactactaaccacgtcaatatcaaaaccaaagcaaaaagatgttcacaaatgaagactcaaccgagcgacagtgtcttttgaatgagccattttcccttcttttttttaataaacatattatgaattataaataacagaaagaaaatatcaattcttgagaaaaattcgtaaatgtgtaatcaataaatgttggaaataagttattaaaattatagactggggcatatatagtcccagtgccgcgtaaccccacaaagaaactgtagtatactaatgctgtctttcaatcatttattacaattaagggtcctactatttttgcgtatacagataattgcatatttcacacttaccaaagtacatactttcttcgctattcaccaacgtgtatcatatatcaccttttgaaccggcgttgcctctacaatattgtgcttaagcaatgctacaaaaagaaaagggactattgaaatcgaaatgtaataaagattatttgtttagggctgtttctaaattttcaggaactctcgaggtgaaaatttcatacaacaaaacaaacaaacaaaagtagtacgtagaatttaaaaaccacatgtgttcttgttcgagtaattctgtaaattaaatggtgtgaaacgatttctgtaaattaaattaaatggtttatccaagcataaaataacaattttagctaaacagtatttgtactagtctttgtgctattcctaaacaagtcagaaagttgaagaagcaggaaacaaacatagctttactcaaataaattaaacaataaaattatatattgctctacataacaataaaatttgttaatatgtttaattcttgttcaaatactaagcttgaaaatgagcatttgtatcatgtgatgtgaaattgtgaatacgctattatatgtgtgacttaaccccttggaataagcatgtttgcatattctgaatatatataaaaaaaacgtacaaaataagaatcaagatatgaaaaggaaatatcagcatcaagaatccaacggttgaaataaatcaccaaaaaaaaaaagaaaaaaaaggaagggactatatatacacataaacatcccccattccccactttataaaagaccattctacttctatatatatatatagtgtgagtgagacagagcctcacataaataaaaagtctcctaatctgaatacaactattactaacaataattcacttatctaaagaccatcatctgactgactctacgctgaatcatcacgaggaagacttgaatcgaccggagaagagatacgtgtagagatctgattggctcaccggagagaacaaaacaagaaatggggaggacgacgtggttcgacgttgacgggttgaggaaaggagagtggacggcggaggaagaccggaagctcgtggtttacatcaacgaacacggtctaggcgagtggggttcactgcctaagagagccggtacaaatctttacttacacctatgctacatacattgtgtacggtctatactatgttttgtgtctctttggaagctaggggctttgaagaagcttaggatctttagattccagtttctgtcggaccatagattttgttttgagaatgtgcacaatagtctctttatgcacaagaaatccatcttctgaagagatttattacagaaaaatccatacgtttgttaacttctttaaaaaaaattttaatttttttttttcgattttggggagtaaattaaggagtacatgagttttacggataacagatttgtaaaccaaataatcaagggatttataattagtcaaagataaatcttaataaggagcctcttgttgataaatctgtgtatgcattattatatgcattacaaagttatgtggtagatgagatttatcgtattattatattcataaccatgcagaaccttctatcagattttatctatattatgatataatatcttaatgcaatctatgaaagccaagtgtttccctggttcctatttcttttgattattgtatatatcttatcaagtagaaagctatagaaattagattatgatactttttgacccattttcagaacgtttatttcattgtgttatctcttattcagtttgatggaaaaagaagttcaatattttttttttttgtaacttctctgtttgccactatgttaaagtaaacttttatttgataaaaactttttatttctatgcaaaaaataggtctacaaagatgtggaaagagttgtagattaagatggctgaattatttgaggcctgggattaaaagaggcaagttcactcctcaggaagaagaagaaatcatcaaataccatgctcttcttggaaacaggtatataattaatttatttgtgattaaatgcaaccctaaacccatctttgatcaataattattcaatcaataatgtcgtcttatatcattttagtaatatggtccttaaaaaattacatgattacaaggtgggcagcaatagctaagcaaatgccaaacagaacagataatgacataaagaaccattggaactcatgccttaagaaaagacttgctaaaaaaggaatcgatccaatgacccatgagccaacaacaacaacaagcctcaccgtcgatgtcacctcctcatcaactacgtcgtctcctacaccgagccctacttcttcttctttttcctcctgttcctctactggctctgcacgtttccttaacaagctcgctgctggaatctcgtcaagaaaacacggactagagagtatcaagacagtgatattggcagaacaaccaagagaagccgttgatgaagagaagatgatgacaattaacatgaaagagaaggaattgattagttgttacatggagattgatgagacgatgagtattgatgaactaccttgtgatgactcgacgtctggcttcgtggcttttgacgactactcattaatcgacccatacagagacggtgtgtacgtatctgatttctacgatgagactgaacaccttgacctgttccttctttgaatcacatttcctttgtctaaataaatccgtttctttagtgtgacgagagagagacagtggagagagagacagtggagagagatgtctgaaaaaaacaagtgcggattagtactttgaatgacatgcatggtcaatgttgttttacagctttgagcctttgactgttactttttattttattttaggtacctgttctctcacacatgcctatgagcctacatatatttgagggtttcataccattttggtgaaacaagcctatcggttactatattccttataggttttgtcataatggcgtggttaaaactttatcatatgtgtgtaagggttttatagtacttttttttttattaagatcatttaaattctaatgaaatttcaaatataaaaccaagataggtgaaactacaaaatcaatagtatatatcaactactaaactaaatgttctagtcaagtagatatgtacatgtttattggatttaatttgtatactaaattatactagtatctaataagtaatctaaaatattggacgacgcaaaattctcactgtgacattgtaaaaaaagaaaactatgaatatttatttactaatattgggtgccaaaataataaattcatcactaaaaagtggataatggactaaaaataatgcggaaagttagtaccgaattattaaaaaggaggggtccaatagattcctaactaatatataatcaaaatatattatgatgtcacaaaagcaatcataacagaagtgttaattgacagctattttggcataaacaaaaaacgtggacatacagaggtcacgtattgatcgtaaatcaatgtttttgctactatttgtggcaattagtttgtcacggtttgtgccatttagtatagattcttagtaataattttaaatacttctagttttgtcaagccaatttcggaaatcttcagaaggcatgtgcaaaatttatcatcgtgtggctgcattccgcgtcgctggtccatacttattttggacttttcattattaaatttacaaattttcgtacaatcatattcttacacagaaaaaaaaaaagattaagaaaagaaaagaaaaatgacttaggttcgagttaaaaaaataaatatatttttttacgtcaccgaccacactagtttccgcatccaatgagaaaataaatttttattttttaccagcaaatcacgacttaatggtagatagagtacaatagaacacagtagtaaaaggttgtaaaacaaatttctatttagacaaagtagaacacagttgtaaaaagaaaccaaatttcgaaaatacaataatgtaattcgtaatgatcccagaaaagtgggaaaaaaaagtatagcggaataactcatgtggatgtgacatataatgtgaagaagaaagaaagcacagttcaatcttttcaccattgtagctctctattatacatagacatgacaaataccaatgaattttttatttatttttccatgaaattatttgctcataacaaatgaatcttaatcatttttcctatagagccatagaaggattcttgctttcgtggggtcaaaatggattacacgacgataaatgattcacatctttttcaaaaaatggtttcctaattttgttcctttgattgatatattgcgcatttcagacaaaaaaaagttctaaaacgttttctctattattcagaaaataaaacttttcgtgtttgctttaactttagcttttgtttttttgtggttcagttcaaaagagttcagtgagtcatacaaaaatcaaatcaaaacgttttttttcgtaccattctgacaaatctcgattcttgtttatttctacatatctttctatcatgatgaaaatttggaaaattccttatctatgcagtgacttgcataagttaatgggctgggcctgggcttcaataacaaaactaactagtcatagagtttttttttttttttttggtcaactagtcatagagcttatgcttcattgctttgtgcttaattcagagtatataatgaagggaacaaatttcgaatcacaatgactgaccacattggagcttaagtgaccttcttcatctgctgctgtttcttcttttctctccattccttgattccactctctatcttggaatcgacgcgtgctttaaatccagggtatggctcgtacccgaaaacagactgcaacacctggttttatcaatccattgttactatcactttggtggaaagagtaacataaaagaagaaatctgaaaaacattcaaacctcgagcaacacaaagaaaggacccataagaaaagcttggagtagattgtctaaaagtgcaggagctcgtttcttggagtagaattaagatctgttagttaggtttatacagaggagaatcataagcaatgatttctaaacaacaaagaaagtttattacctcaaacaagccatgtccgaggaactgaccagtccaacataagagctgagaagctactccaacctgaaaaagcgagtcagatttcaaaagatataattttttgctatgcaagagaagaaaaacgcaactttgttttaaacaggtgatatcgacactgaatttgaacatgaaaggaccacattatatctagacgggtgatcattacagttcggagacaagacattgaccttccaacatcatcagcagcatatatacatcaaggaacatcaaaaaaacaagagctccacagaaacattaggaacaagaacacaatgagcagaggacacaacatggctatcaagtcaaaagcatgaagaaactgagcttcaaaattcaaatgcatggagaagcataaagacgaaatcttttccagtaattagaacaaagggcttacctttaaagtcaaggaatgtcctaatcgagctgcgaggaagctagagccaatccaacaagagaaacataacagagctgctaaaacaccagatttcttatccaaacagatgtaaaagacagcataagtcacagtgagggtaaaaccaatgtccaaacgcaaaacaccatcaaatgtcagcgacttgaggaaccctaattgagagtgatctaaaatcggtggcgtagagtagaggaaaaggagagtagcgaagacgtttggccatacgaagagagtgtggattataatgttaatgggattgctgtgataagctccatagaaagcaaaatgcttctctagatcgagcaatccgatgcgattgctcatggtttaaagttttctctaaacactttagtgggagactttcttggaaagacgaaaggaagagacttttgggattattggcgtttacttagaagatgcgtcacctagagtatgctaacatgcgcatatttgacaaactaatgtacgcttttttgtggtgatcgttgaccaagtcataagtattgcgattgcgttttgattttggaataatcaagggaatttcagtagcttaaagcggttgaagcaataagaaattgtgattcatttcgtaattttattagaattgtcaatagtaaaacaataggatataattcatgatttttttcacgtgggttaaaaaaactcggtaaaatcacaaagatatcatgttatgttaccaacatatttctaccgtagtttagtcatcatcaaaagaaaaactctaaccaaataaatgacgaaagtaggcacaagtgccaccatattcacataccatcagctaataatattcattatacgttaacgtataagataatctcataatataagagcaaaaaccgtttaatctagtgatggctgcagctatatacttcagatattgtgacggttgccttccaaatcctggaccacgtcctttaatctcggtctaaatgttgtattttaaattggttcatatctcaaaacaaatctttctgtgaccaaatatacgatcttcttatgtttgtataacagccatcatgatgtagttccgatttctaagaaattaagatgcagtttttttttttttttgcaatagttatgattcatgtataattaagaaactatgatgtaacccatttttgtatctctgttttatgatatttgttcgacataaaatgatgaaactgaaccattttgtttttattaagccttttacataattttttgttttggaccatgttagtttttcaccagtttaaaaacttaataggaaatgatgtaagaaatattctttttttttaataaataactaaattgtagaacttagtcgggggagaaagagattaagcaccaaattgcaaggattttaaattggtttcttttaacaacttccaaatttcaagaaatagtcaaaactcaaaggagagtttgtctgtcatattcttctttgtttataaatttccttcatgacttccaacgttctatgtctcttggaacctgtaatccacacgtgctctctacttcagatttcttagtatacaattcactctttttaatactatcatatactcttttgatatcataaatttattcaaattaggtacggtttccagatattggggattttacgtaatacagaatatacataagagtatttgattacaaaatatactctcattagtctagtgtgcaacttacgcctagtattaattaaaatatatataaaaaggctagcgttcaaaacttaaagaatggttcaaacatgattttcaactcttaaacacacaatttctattatgacaagttgaaaacatcatattcaattattaatgtatccaactatccataatccatttgtaatttagtactatagtctagttatatgacaaagcaatcggtctccatactttatattatacacacaatatatcaaccaggtaatagtgcctacaattaatttgacttgctccttgaatttttggtgtagtagtagtatttatttagcaagtaaagccacaagaaataaataagcaaattgtcattggcttgattaaagtttctagaaaaagttgcaaaaaacgaatcacagggaacaagtctctatgacacgccaactaagactgagctgtgttatattgacaccttctccgtcactcctccccatctcacgtctcgccacgtggcctccgttcttacatcttccacgtgctgtcatgtctcttctcacagccatatatgtctgcgcgaatcacttcttaatccaacggctgagatttattcatcttcctattttattttatttctcctacttggtatattattaatttacgtgtaagctgcgtgtttcggacgagtaacaacgcatgaaattaaaaataaacaaaatcaaaatagacaaaagagatctttttcgttggaatgaaaaaaataaaactttagtccaaatcctttttccatatttatcacaaattacatactaaaaaaaaatagacgcggtcaaaattctctctcaattctatcaatataaagacaatctctttctcattagggtttttaattttcatcatcatcatcactctctctgctcccaaattcagaaaaaaaggaacgatttttatttccggtgaatgagaattttctctcgaatttgatcgatcacatatttcatctgtgtgttttcattttgaggatgccagcaacggaatatcaaagatcattcgggaggtcttttctgaatttacggcgagacacggcggtgaactcggttgagtcaacgacggttacccccgagttgactcagatggaagcagagcttgtttcgtttcagagaaaagttgctgagaggtttatcgatctcaatgcgtctagttgtgaagatctactgtctctcgaatgggttgggaagcttcttgattcgtttctatcttgtcaagaagagtttcgttccatagtcatcaatcatcgttcgatgattactaaaccaccgatggatcgattggtttcagattacttcgagagaagtgttaaagctcttgatgtttgtaacgcgattcgtgatggtgttgaacagatccgtcaatggcagaaacttatcgagattgtaatttgtgctttcaacaacaatggaggaggaagtagtggcaagagacctcttggagaaggtcagtttcgtcgtgcgaggaagactttgattgagttagctattggtatgcttgatgagaaggattcatcttctagctcagtgtcgtctcagcatcgtaaccggtcttttggaaggaacaaggagcagcttcatcaccgaacaatcgggcatttcaggtcgctttcttggagtgtttcgagatcatggtctgcttctaagcaactacaagctattggaaacaacttagctacgcctcgagctagtgacattactgcaactaatggtcttattgttccggtttatacaatgactacggtattgttgtttgtgatgtgggcacttgtagctgcgattccttgtcaagacagaggtttgcaagtacatttcaatgttcctaggaattaccaatggggaggttcgttgatgtcgttgcacgataggatcattgaggaatcgaagaagagagagaggaagaatacatgtgggttgttgaaagagattcatcagtttgagaagacttcaagattgatgaatgagttggttgattctgttcagtttcctttgtctgaagagaaagagatggaagtgagagagagagttgaggaattggggaagcttcaagaggctttgaagaatggtttggatccgtttgagaggaaagtgagggaagtgtttcatcggattgtaagaagcagaacagaaggtcttgatactgttggaaagcatcatggttctgaatgatgtttatcgaaaattcaatggaacatcatcatctgtttaatattctggagagttgaagtatgtttatcaaattgtgggtttgtttgtctggtgaacgtgaagatcatggagacaaattgctagagaacgagagaacattttggttaaaggttgttaatataaaagacaggagatacaaaccactccatttttccaatctttgttgtttatgtataattttctcatcaaagattgttaattatgaataaggttccattttatacggatcggaacttgcattacaatttaaagatatttctttctgatcgattagataaattgtctgtttttgattatagtcgacgtttcttaaagaagaaacacaattagaatagaaaaggcatcatgaattaaaaaagatatacaatcagttacatgttatgaacgctatattatgaagttacaattgtcacaaaaacttggagcaatcttgagagcttgtaacccttctatggacacgccctcctgcaaaaaaaagaattgagaacgaaagtccagatgtgatacaagatcatgatatcgaggccttcatatatagtcaagcaagatgattacattgggtaagctttggagcccaaaacaaaatataggctacaacaaaacaacccttcatatctccgttcttagatgcaatcatcaggctcctaaagaagtaaggtgatagaaaccaaaatctaaaaaaaaaaaacgaatcaagaatatgcctcagaggtagtgacaattgtgatataattcatcactatgaaaatctgatgaaaacacatcaatagatatacatcaccggcacaaaacaaacatcattaacaatttaaaaggtgcatcagagagattcccatctagacttaatcatcattatacttctcccaaaggagaatctgatgtccctgtctttttatcatcacttgcacacacactaaacttgtaataaaaactagaaaaaataaacctattcacatccaaacttcaaactggatttcataaccaaagaaaaaaagaagattctaaatgcctcagatttgttttgttttcctagagacaaagctctcaaagtatatttaataccatcacaggcatcaaaacaaacatacaattaaacagaaataaccacgacacagacaaaagactgaatctttggaaagccctcgaatcgatgagacaatttacagagatacaagactagggtttcaagagaagtggctcccattggagctttaatgaaacgcgatggctttatataagataagcagaggcggcgaaaattagggcaaaaataaggaactgaaaagatatgactgggctcgtaggtaaatatgaatagcccattagataaatcaaaaaggcccaataaaataaaaaagaccattcgtttggataattaattaaacgaaactgcctagttgattaaaggcccaataaaagaacattctctgttttcttcctttacagtggtttctctcttgtctaagagactctgtcattcttgaatcttgagaagtttatttttaagctgttgtatcgtttgagcatacatttttcctcaaatctcaagtacatatgaagtcatgtacttatgttataaaacttatatctttttgttttgaacttagccgaaaacttgagagccttgaggtaactctcttcctttctcataatattattggttttgggaaacatattgagctgaaacatttacttattgtatagggccataggccctcaagaagacttttatgaaaatggatcgtgatgttaatataaatgagttcttcttaggtgcaaggtacttgatacatgagttctatctatgtaaccttaaattcagtaaactatttgtcccgtttggaaaacacttgaactgtggtccttaatttgttatcctgaaggaatcaaactattgaggtaaggatgatggatcatcatgattcttttggatactactaagctcttgacttttgatagctaaaagtatgtattgacatttcatgaacagggtctgactaaccaagtagcattttctcttgttcaggttatggagtgtcataggagactgaggtggaacttttcggttttaattatcattttttttctatacatttgcgtttcaaccgtcttaacttactatggatacctattgcgtcttcttctgttgtgtacttttcagtttttaggcatttggagcatttggaagaatcattgagaaaatcttttgaaagagttaagattcacaaggtatgtcatgacttgatcacacacacacactgacacatatatgaacatgttaagagttaccaatggaggcagcatttgtcttgcgggaacatttcagaaaaaatcaactcacgtcattagaatgtacaacaacacaggttatgtataagttataacagttgcccttcttttctctctcacattcttaaaccagaccaaacattctcatgcagtttcagagcgggctatcatcacctttggtaataaacggtgttcaagaaaaccatttaatctcatggcttcctattaacaataaccagcaaatgatcatacctgctgactcaagttttcatcctcatccgtgagtgaaaactgttaatgcacttaataattaatatgctttggacttatatgctatattcaattgaaagttttatgatcagcagaaagatgaaaccggtttttgagttctggttaaacattagttttgagtaactgtagcaatgtgcacgctagttttcttgtatatacagtgtacctgtctacgtatgtgtgaacctacatgatattcagcagatttgtatatatctttgtgtcagtgtgtgtattgtataatacaacactagtgaataaaaaagaagagttttaattgtgatgagcatcatctgatgtctccaactcaaaaggcttatttccacaatcaacggtagagatctaaagataatgagaaaatttgcacaatcttctttaatatcgatatcttcttccacgataatcttacagatccagaagaagatcacacatggtttttgtataaattagacaaagctttacttgcagaacagagcagaaacagaacatatattctctgtctttttttgtggcaaaagtaaatggcgagaagacaactcttttaccatcgaatgttcttggttttagctcttctctatctcatgatctcatggaagcctctcctaatcactgcaagtctgtaatacctctctctttcttctaacctcctcaagtttctttgttctgtttctttcttgtattaatttcttattattgcaggacctgagaaatcaacagactttgaaaccaagggacaggaattgaatcgtcagattagccatctggtaagaatctactccacacacacacacacaatgtgagcaaagatcaagtatcttctgtattttgactcttgctcttgctttttatttgtatggatgcttcatgttttcatagggacgtattgaaaatgatcctgagagaagaaaagggacaaggaggatgatgaccgttgaggatattaacgattatccaggatccggtgctaacaaccgccacactcctcactgttctgattgctaattccattttcctgtaatctagcttctataaaatggtaataatcaaatcacttttatatgatatgtatcaagatttaaaaatcatggggaagtcttaataattgaatcttattctaaaaggctatgtgaaagatatcaaatatttgataagactcaaactttatgaaacccatgtctaaaaaggtgagactttttttgtaagttaatttataaaagtcccaccattaacttagctcaggttaggtcatccactgaaacactaaaaggttttgctctgctttttccccttattacactgttttaaatatgccatttttgttaatttatctttttccacattaataattgttatttttcgttttatttggtggagagacactgagacagtggaggacacaacaacctcaatcaaacatgataatatctttactattataagacaaattctcgaattaacagatacaacaaaagaagaacaattacagaaaatcaaacattatttgacatgatcaaaatgaaagacaaacgaaactctccacaacatgatcacaatttacagaaaccggaagtattatatataattaagactgtaattccgatcagttattgtcggaagaaggagaaatatccggcgcgggagatggagcatgggagataccgtcatcggcacgcatgaagtcaaatcttttgatgagtatattagcgacgagttcgttagccttatcggtgggatgatactcatcccaaaacacatacttacttctgtctttacacaatgtcgacgctggaatacacgttagcgcaggccggattctgtagaacgagcaacacggcgaatccgagttatcaaaccctataatcacacaaacatttaaacaagttaatccaatgatcaaagcgatataattaaaaatgcctttattaacaaaaactatccagcttaatttatgtgaggaaaatgaaacttctgattgtttaaaaaaaaaaaaaagatgccgtttgtgaatgcttcttttgattttatcaaagttttatattaccgtatttttttgggttagtgatgacgtcgttgacgaggtcataggcttcaccaaacctgtagcttgcgttagggagcttggtctcgagatctaggagcattgtggtggcagctttgttgaatctcttagcaagattactcgctttgttttgacaatttccatccaggcttagagctctttgcagtgggatacaacccattggtcctaaaccaaacaccattagcttcctcgctcctaaactatgtaacacctaaaacattacatgcatcacaaatttgtatcagttagatcattatatatatgaaagataaataggtacttgaagtgttgaattagtttagaaaataaaccttgagttgagattcaagtgtttccattaagtagtcgacgaaggtttgatcattgtatttccaagagtcgctatagacaggcatcaaatagttgttaatgaagtcattgctgcctaaagcgacgacgtatcgagcatcttgaaagaacttgtctgcttcttttttccctatctttgccacaactacatcttgtgtcccttggaataattctatttgcttccacagcgaaaatctttggatcttcacaaatacaatccccatgaaaaagaaataaacatttttagaaaatcattatcatttctttgatgaatcttattcatttatttttatgcaaataataatgaaaacttattatttcatgagacttacgaaataaccaccagtttcgttcaagattccaccacctcctgaagcatagttcactccattttcaagtattacatcttcattcattgatggatccaagaaggctactggtcttggcaatccaattttatcacctttaaatttcaacaaacccattataagcttgtactaaaacgtaattcacatgatatatatatcattgactaataattaattccatactcatgacttacctataatgtctgaaacagtgcggccattagtgaaccttccattaggcaaaccattgccaaaatcaataccgtaaaagggcagattcgccgtcgctaaactcctaggtagattcttattgttgcctacatcagacaatgaatctccaaatataaattggactatcttgcaatcgtagccgttgattgcaagaacgatgaataacacgaatatcgcgcagaacttcatgtcgccaaatttgaatgtgtgttgattgaaaaagatttgtttgggtggtttttaaaagggttttggaggtgaaaaaataaggactaagtaagaaaggtggaggagtagtgtgagaataaagtggtgaaggtagattttgagttgatgaaccaactgattttgtttttttctttttaattattgtttttggtttatgtttgattcaaacctacttcaactactctttcctcgtgttggtatcgtaagttgtaaccgtttcttgtccgtaaacttgaaattttggtaatattaaaccttgccgtttatgagctcatattatagcgtaaaaccaaaaaaataaactttacctcaatacggaatatttccttgtagtgaattaaataaatttagacctctatcaaacacttgtagtgattttcctcctgcatgtattcttcacttgctatttcgttactttggcttctcttactaaaaatatctaaaatcatatgtaaattgaaaaatactattcatgccgaaacaaaataaattaaaggaaatatttttgttttcttctaaaatttgcatgctcgtttgtaatttgttttttctcatgagctcagattgggtcaaatatgtttaattatgggccaatttcaagcccaatgcaccaaaggtggaattgctcggactggaagaaattcaggcagatgatcgagtggtatactggtaaatgaccaccaaaagtactgtttaagccgttggacactgaagagcagtttttgtaggtcagaggctttttctgactgaaacagagtaacgtgtctaaaacagaggtagttaatattttgatcaaaatgtgatttgaaatccacactaaatcggccggttatactggtaaacccacaatttgaagactaattcggtctgattataagccagtgtttttttttttacctgcttaaacccgatttagcggtttagcggatcaaattaattttggttgaaaacttcttctactttttattttattttttatacagtaaaaaagtaatagagtaaaataaactgaaatatcctttcttcaatcctttttttttttttttttgagcaaaaaaaaaaaatactgaactatccattgaaccatttttgtgtgaaccagaaattctacggatgttttgagcccataaaaaataatcaaaagacaacaaaatagttacataactaacctacgtggtcaaaaatcagccgattgctccaccaaatgggcgccacagataaataaatacccaaacccgtaactttatcctcatctcatcatcaccgtccatttctcaatccaacggtgtacatccctcggaaatctccaacaatatctaatccactaaatcaaaaacagatttaaacaaaagaagatttcacaaactcaaaacacagagaacagagagagagagagagactccattgttgaagtgtgttcactgaactcctcctcaaacaacaatggcgacgacggttacactcaaatccttcaccggacttcgtcaatcatcaacggagcaaacaaacttcgtctctcatgtaccgtcatcactttctctccctcaacgacggacctctctccgagtaaccgcagccagagccactcccaaactctccaaccgtaaactccgtgtcgccgtcatcggtggtggaccagcaggcggggcagctgcagagactctagcacaaggaggaatcgagacgattctcatcgagcgtaagatggacaattgcaagccttgcggtggcgcgattcctctctgtatggtcggagaattcaacttgccgttggatattattgatcggagagtgacgaagatgaagatgatttcgccgtcgaacattgctgttgatattggtcgtacgcttaaggagcatgagtatataggtatggtgagaagagaagttcttgatgcttatctgagagagagagctgagaagagtggagccactgtgattaacggtctcttccttaagatggatcatccggagaattgggactcgccgtacactttgcattacactgagtacgatggtaaaactggagctacagggacgaagaaaacaatggaggttgatgctgtcattggagctgatggagctaactctagggttgctaaatctattgatgctggtgattacgactacgcaattgcatttcaggtcaaagttctttcttctttctcaagttttagttttgttctagttgttttagggttgtgagaatggtgttattatggagttgagtggtgtaatttggaatttttcaggagaggattaggattcctgatgagaaaatgacttactatgaggatttagctgagatgtatgttggagatgatgtgtcgccggatttctatggttgggtgttccctaagtgcgaccatgtagctgttggaacaggtactgtgactcacaaaggtgacatcaagaagttccagctcgcgaccagaaacagagctaaggacaagattcttggagggaagatcatccgtgtggaggctcatccgattcctgaacatccgagaccacgtaggctctcgaaacgtgtggctcttgtaggtgatgctgcagggtatgtgactaaatgctctggtgaagggatctactttgctgctaagagtggaagaatgtgtgctgaagccattgtcgaaggttcacagaatggtgagttcaaaaaaattttgcttttataagattcttgtgtttaagttttagtgaagactaaagtcttgagtgtatttgttgctataggtaagaagatgattgacgaaggggacttgaggaagtacttggagaaatgggataagacatacttgcctacctacagggtacttgatgtgttgcagaaagtgttttacagatcaaatccggctagagaagcgtttgtggagatgtgtaatgatgagtatgttcagaagatgacattcgatagctatctgtacaagcgggttgcgccgggtagtcctttggaggatatcaagttggctgtgaacaccattggaagtttggttagggctaatgctctaaggagagagattgagaagcttagtgtttaagaaacaaataatgaggtctatctcctttcttcatctctatctctctttttttgtctgttagtaatctatctacactaatgttgttactcttcaatgtattcagtatcatatttatgttttctgttcattgaattagtcaaaaagcatttggctttacaatccccaatttctcactaaaaacagatttcacaaaccactagtaaattcacttgagaaaccacacaagagatacttcatttcttcatcactctccattcctgcttcatcaaccgactcatcactaggaactgatccgctgcttgaacacgagggtacttgagactgatcggacttgagacttctcttcttcttcctcttgtggttagccttgaaacaagcttgtcttagcctctttgtcttgtccttaaactccaaatccggcaaatcctcaattgtcctcttctccttctcaagcatctccaacgcgtcctgcagtttttctgcattctcttcgccttccatcttctgcagctcctattcatatgataaaacatttgagttcaattatctgaaaacaataatattaagtgtagtgccttgttctacataccttgacgttactgatcaaagtgtttaagctcataagtttacgatgaggccatcggcgaatacccaattcgcgacatctcctttttagtagagttaaaccaacgttaagtgctattgcagcctgagttatgggcatgtagaagtagcgagagacagtttcctttgacaatgtcgttggagctgaactagttgtgtaggtagtaatatcgctgatgattctcacgctatgttctctgtgtctctcattgattttcctcttcttagttgtctctttcactgttccattttccctcttcttctccgatgaagcgccatctcctctgttttgctctgtttcgttccatgacgcagagctgtatgaattgagtacatctacagaacaaacaagaccatgagacctctatgtatatagctctatatgaatataaaaactatgtaataatatgttataccttcagacaagggttcaagatcaggtaaaggcagagaagttgtagtaaaaggaaatgcttgagagccagagttttcttggagagcaagaagatcttcttcccagtcgaataaaggataacttaaggagctgcattgcgtttggaaaaatacagagaaaataaattataagaaaacaaaaactaataacaaaatgaaactatacaaaagcttctgaaattaacctgtgatcaaaggatggagaatgagctaggaatgagaatgacttctgttctttggttgtgtgatcagccattgtaaagaaagtgagagagatagaagttgtgttgtgaaactcgatgatgcgagaaaagatttatatactacattcagagaagagactagtggtagtaagatatggagagagaataaagaatggaagtgatgatgaatctattaggagaagtggggtattgagtattgacggctaattgattgtcgtgttaaatttggagttacgagaagatatgattaatgttaattagtgggtaatttataggggcgtttagatttggattagactcctcttttcgtctctccatgcatatatgacatgcaatcatttcgagtaaatagtgtagtactactcaatgtacatgttcttatatatacgcatacatacacatcacaatgatcatgattatgtattgtttaataaccactaactgaatgattaagataacaaaatgaaacgtatggttaaaacattattgtagatcatggccatatatctttaatttccatttctcataattaatcataagttattaatgaagtaacaaaaaagttttatattccatttccacaaaagaacgatccaaaaagccaaagatttttttagtccttaggatgtctgagaaaccgttttgaaggcatagaagcagagttagtacaagcaaaacctttgcttctactctttctatgtcttggaattggaactttctcaagaagagatacgacctcaagcatcgatggtctaaccttaacatctccgatacattgtaaagccaagaaagacatcataaacgctgctttctgagggtattgacccacaagctttgtgtccattatcctaaacacttttcgcttgtctcgcaagtaaggtgttgcccaatccactaggttttcttcttcccgtgatttggatttgtctatgactcgacgcccagagagaatctctagcaacactacaccgaagctgtagacatcacatttcgttgttagatgacctgacagagaacaaaaaaaggcaatgcttttagaaattttcatgttatgttctttattgaaatggaatcaaatgagcaaataaataaataaagagaaacctgttgctagatactctggagctgcgtaaccttctgtacccatgacttctgttgtcacatgtgaacggttatcttttggaccttctttggccaatccaaagtctgagagtttggcgttgaatcctgaatcgagaaggatatttgctgctttgaagtctctgtaaatgacttggtcattagcttcatgcaaaaaacatagccctcgagcagcaccaatcgcgactttcatacgcagtgaccaagaaagcacactggaactccctagaataagcagaatccagatcattgaaggaaaaaactcaaaaagttttagatttaagaaagagtttctttacttactttcaaacaaatgattctcaagactaccattaggcaaatgctcgtaaaccaaaaggcggtgttcgttttccaaggagtaaccaatcagtttcactagattcggatgatgcaatcttccaagataattcacttccctctttggagaaaaccatatacaagtagtagagatttcaatagagtacagtctcaaggtgaaatcataataaaatgatttgaaaagaagcttaccagccactccttatgtccctgaagcccttcggttttaagcttctttacagcaaccgcgagttcgattccaggtccaccattaatacagcctttgtgaacaaacccgaaccctccttctccaattagactctctggacagaagtttcctgtagcattctttagctcatctaaggtaaaggacttcaaatattgagaatgcattatgtctccttctttgtgcggtggaggtagagcactgatagcttcacattttcttgtaatgagaggttttaaactccatggatatgacagattcgagcttcttccagtatcactattagctcctggataagaaacagagccacacattcttacatcaaaatgagaattaaatggataaacagaactatcaacaacaaagtcactaaagttaagaacagggcaatcgaataaccagactacataaaagattcatccatcaatgcattaacattcagagggtccaggaaaatgtgcaaaaggacaagttatgttcaacaattccagtaagaatttagttagactcttccagaaacagagagatatgaatatcaaagaatgagaagagcttacgtgaaaagggtttcgagttcactgaggagtcaagattatcgtcctcattatcatttctcttcgaacaagattcaaagcaattccccatttaatcctatacaaagatgtaatcatccaaaaaccaaaaccctagatacaattaatggaagaaataaaacagagtattaaaatggctatggattgatcttccacaccggctctgtcatcgacattcttcctctggtgaaaaggaagaacgtggaaacgagagtggtgaaaagagtcaaaatgtatttggatttgaaagcgatgcagaggtttggaagagagattagagagaaaggggttggaattgtaaaaatttggaaaaactataattagagagaacttggagaaaagagtttccgtgttgtattaacttcctgtcagagagagtcaccctattaattaccaattgacttatttacgtcacgtgaaactctcgtgtcccccacactcttcccattaattttcttttttattttttggttataaatttactagctgacttttttatagaataatttttattacattttattttgttatttcttattgatttcttaataattttaaatgatcatattgtttatgataaatgaataaatgattatagctaagatgaatctaaatcaatagagaacaatcggttaccatttaacatacacgattatagtggacatgatctttaatatatgagagttatcttggaactctgagaaaatgactatgaatttgtagtgaaaattagatttttttatgttaacgtcaaagtcccatatagatattattatctcatatgtagttatttgtttcatttcttgaatatgacaagaaatccattgtggataaagatatgaagagatagtagtttgtcctaatatcgttattgtattcctatccggatttaaatcataatgcgtgttgttacaaaaaatattcattgaagattcacatataaaaatgtaagtgtttaggctcggtgctctatttcaatcatcattgacgaacccattagttctggttgggtttggcggcacaagatctcgtttttatataaggaagcaaaaaaatctcaaataagtatgtttggtgggaagaaaataaaaatttcaaataaaaaattaaaagtggcaaaaatcgaaattaggttatggcataaaatttgcagctttttgtgcttcttttgagtgcatagcgtcaagttcaccccatactttattgcccataaacataatcttccaataattccttcaatgttaatatgcggaaatgacagtttcatagattgctcggtatccaacttaaataattaattattttataatattttcatgatatatttagtaatcaactacgactttgtattcttcttttgacatttagaagaaagcccataaattcataatatgtgttcttggacgatttagggaaccattacgctttgtaaggtttttcatatctcaagatcgataaaaaaaaataagatgaaatttttgaatggcatgttttaaattacaaattcgttgttcttcatataagctcttgttatgacatgttttatattactcaaaaacacgaaaccaataaaaagcttagaaatgaacatagccaagtctttggtgaacaaaaccctaaccaaattaaatgcatattagaaagaaaaaaaggagagacaaacaagataaccgaaaatgggcaaaggttttatattggaaacaagcgaatatttatgacccaagcagaagtgacgaactcgtatcattaaacgtttataaggtcatcaacatctatagaaaaaaaaacccgcaaactattattattattatagtaaacaaaaaaaagaagaagaagaaaaagatagataggaattattgggtaagtaagcttctgattaaagcagcttgtgcagtgtctgagtttgctagtaactcagatagcctctcacttagatcatcaacctctctatgcagattccgtatgtagttgcacgtatcttgtaacaccctcgctgctgaaacctgtcaatatgtatcatgtatcattattttcatgccatatatacgcatatatattacataactagttgacttagttagattcagcataccttgtcggaacgacgactgtccctgagctcaggaagaagctgttgcaacttgataatcagatcattgatttgatcttctgagatccttgaagttcctgatgattgcctcgaacgtgatcttcttcccgacatttttttgtagaatattgttcaacaagtagtaagagtgacagagatagaagcaaaggcactttatcggtgaaacaggttatggagtttagggtaacacagaagttatgccggaaaaagaagagagagagatagatagagaaaagttgatagtatgaaggaaacaagtgaagtgacggttgtatttatgtaggtctttttattatttgtttatgaaaaatatataaaattgctttcttattttagttagaaaaaaatatattgcgaatcttatttttcaaatattgaattatatgccccctctcctgacaacttttgttataatagaacgatttcagagaatctcgtattttaaatgtacatagatctaaatttgctaggtataataatatatatcgttgaatctagccaaaacatatatgaaaaattaccctataccgtaaaatttattaatatgtttcgagctttgaatttgacactcggaccttgcagttcatatattagagttctaacttctaaggtctatttttaacattcttcattaccttaataatttatatatcttcaacttagtttttttattacgaaaaaaataggaagtgaaaagaaacattttaatattttttattttatacgaacagacatggacgtcatgtaacagaaataaacatttgtatatattgaaaggttataaagatggtagagtattgttacttctgtggtgagtaatgttaaactaaagaagatattgaactgaattttgtgcgtttatcaaggaagaaagtattatacttttttttttatatatactttataagtaaaataagcctatccattcctcgaaacacaacttctattaagatacaaattcacattatcgatgtttgggatttcgctctaccacgtccacacatgtaccttatattttttttaatactaccaacttataatttatggcattgttatttaaaccggcattttatacaatacaaaatcagattatttctgaagcatttttagtgtgtttttatcaaaaatgaccgaacagccaattagttatataaaaaaaaaaaaagaaatttaattaacaatgtaattcaatttgttttgttttttttttgtttttttactccctctactctaatataagaattgttttggtatttttaatgcagaatataaaaaaacatacatgaccaaatttaaaaaaaaatacatgacgacgtataagaaaaaatctacacacagtaattcttttaattaatatacgtatacattttgtgtgtatgaggaaagagccaaagtatgagtgatttgactggtcaaagagatcacacacacgcccatgttctttgatcaacaaaacaacacacacgtggcatttcgggaggcgcgttcacttgcaccgaccgacgttgaacacttcatcggtcatctcattgtttagttatttatttagctatatgcactaatcagctgcaccacaaaaacacgtagctagggccgtatttagaaactcataggcctaaagatatagaaaatgtatctaagttaattatgaattaatattattattgaaaagagaaaacaggaaaatataaaaattatgatgaataagaataaaaaagagaatagaaacatacttaaagtattgaactaccgtatccacttaacgtttctttaacaacaacaagtattcactaaatgtttctaactaaaagcatttttaatttaaccactatgctaaaatgattttaacagcaaatattaaaaccaacatttgcctatcgtttggaaacttgaggaaaatttattttcatcaatattttatctttatttgttattttttgtatcaatacacagaagtcgtttagatatatattggttaaaatttagatatttttgttacgtcaacaatccaaaattttagacccatatctacctctgcattttcttattcgttgtttttctttgtaacgaatgttaggacaatagtttacagagaaaaatattcgccaactttgtatttcttacgccttttttataataattctgagatccttgtagtttcgagcctgaaaagtgaaaactacaaattcttgtatagtaaaaattacgtactttcttatatagttaaaataagccaagaaaataaggagatatgtttcaaaaagagaaagtataagacgacaaagaaaaaatgtaaactcgaagagtgagctgtggaggacgaaacacaaaatctcagattttaatacattggagaaatatatggtaatgcaatttacttttgattcattaaatgcaaattccttgtatgttgaaaagtagcgaccatttcagtaaaatcttctagaagaacttaattgtactgctgtaggctgttgtacaaattttcaactccatttctcactagctcattgaaacggtagaaaattggcgataacaaaatataatgttaatgatacaaaattttgtactcctactattgtatatataccttcacaatttttgaaatggtaaatgagcgataaattattaaaagtcaaaattattgtataatattaatttataagatcatatcaaatgtggttttatataatatatatcatatataattagatggtagtctagtgataggtatggggacctagctccaaccgaatttcactatttatcttcttcgtgtgttccatttaaatgacatgaatggtcttctcaccaagttttcgtcggagagtcaatatcaggcatagttattttttctttccctttttcctttatttgataaacatatcagacatagctttaaaacgtttccaagataacaggaattacaaaagataatgaaaaaaattagagacatctcgatagttctatatcgaatcatcaacaaatatgatatatctgtgtggataggattgaacatgatcatgagagaactaataatatctagagataaaaagttcgaataggggacttaaataataattgcgggtgaacataaatagatagtatatacacacaaggtcaaccaaaacaatcaatcataacttttcttcgctataaaaaaacaaagttaaataagtctaaaagtgattacattagagagaaaagatctaattgtaagttttttttattttaggtaagatttgatatgagttttatttctaaagaaaggaacataaacaaagagctcagatgtgttaaattgtggtcagcgtgtctctcgcggcacatgatcactaatcaatcgacagcgaagattaagctttatttcacgagcattctattcttattacagtcttattttttttgttaaaacctccaaatccgttttgtttattcgttttgctacttgtttcggtttgtctagttttcttctgtttttatttatttatgttacacagaaaataaaataatgtttatattgagtttaagtattataaagtttagtaaaagaaattaaattggattatatgatttcatgatgataacaatgaatttgatgaatatttttctactgagtagttaaagtggggtttaatcagaagttttgctttctgaaagatcttcaatagtttttactattcatttttgataatagtaaagaatgatggtgatttgatttcaatcctaaatgttggaattaattaacatatgcagcttccgaagctgaaaatttgattaggattatgcaagccttttttagagaattcgataaaagagatccgaaatagggaagacaaattcaggctcgcgtatgtatgcaaaaataaatttagtctctcacaggtttagaagccgaagattgattaggattatgcaaagatatagacaattgggaagataactctagtcccgtggaattctgtttttgatgagtgaaaatagattatttttttttaattagtaaggcttatatcttcgaaacatattatagaaattggcgataaatgcttgtagaaaatatttatacataatgcttgtagaaaatgtttatatatatatatatataaacatatattatttgtaccatattttattacgcgcacacacacatatatatatatatatatatatatatatatatataataaattatattagaaattgaaaaacacatattttacatacaaagatgcttagatcaaattacgatctacgtttagtccttaatttagctcaggtgttctctctctccactatgacaccgaccaaacaagcttaatcgtatagtattgctcaaaaaacgtgatccagctatatatatgtttgctcgtactcgtaccatattattatattaaaatgtttggaaacataacaataatcacctatatatatcagcataatttttgaagctctgtactaatttttttagctttatactattttaccgattaataatataaactgtaatgtggcgaatagtttgaagcttgaaagggcacacttcatttatagaatgcgattatcatttttatgacttaggatgagtcccaaaagcctataaactgtggacttgcacgtgaaattaatcaaatccacaaaagtatcgtctcttcttccaatgcgttgacgatgaggaagacaaaacaaaatagggtaatttcacagttacggtaatccttctacctattctataatctcggattacatcttgtattattcctatagtttcagtggatatccatttactgcagtactatctaatccttatattttgagattctaagcaaagagtgacagtcaaatattccagtactggtattcaatttgatgagatgtgtggttgtatctaatccttataagatgtactttgccaaaatattcatgatctttgcaagttaatttgtatgtagagaatttttttaaaccactctgattttaaaaatagatttttaagttttttgctgcatacaataatttttgctaactccatgcatcagtcaaataattttacaggtttttggttgcatgctaagcaaaatatcatctaaacgattttaatattttatagcatgcagactcaaatatgctatacaaacatagtgttctttcatgtttgtgtttggagtttacgttctgaattctagcaaaggtctaccaaaagaaagaggcaaacgctagataacttacgattgtgagtttacactgtatagagatagatattaggcaatatactataaatattctgattcgaaatatttaactttccctaaaaggatatactcttgctctttctaatcggtcaccatttgattttttctcaataaacaaccaaaactaagacagtaggttgctggttttaacgtgtctgatctaatcaacacaaatcaaaacttggtcgagcgcgctacgtcattcagattcgtttctatgttacaacttggtacttaaacctaagtttgtcagcacttaaatattaagatgaagacaaggtccaccatcgtctaaggttcttttcttttacacaatttgcaaatttttaagattaccttaatccaataattaatctccacgattatgtttaatgattgtaattagcgtcagaaactttattatatgtggtcccgtgagacgaaagaaaactagttgcattaggttccatgtactatataactcgtgggggtaatattttttgtcgcgaatccatattctcgttctagtaaaaaaagaaaaggttttgtcgcgcattgattttctttttatatatactacaattaagtgtggtcctatcctactagctcaagtaatcagaattaaaatcaagtggtgggtcaaataatatagcataataatccatttttgatacatagagataaagatactatacgtacgtttacagaatattctcagttaactagaccaacgtaataatccatctatcaacgctattgcaacctactacatacagtttatagacttaaaaataaacgctattagtaagagaaaatcaataaggtgacaaaaaaaaccagagatgagataacaataaatagggcttttttccttcttaagaaaacaatcaataaggctaaaagcctggtaacagatccggcccactaccagaagttagtgaggttagggtcaaaaaatgggcctgaaaaacattagttggttctgatctactcaaactccgagttggtctacgcccaaaatactgaaattccaataaacatgaaccaccacattccgtttaattgatctttaatttttatatatcaagttttttcagtaatttttgtacatgaatgacatcatataaatcacattatcaataatgtagtgaagatgcgattttttcttgagaagtgaaaaaatctataagaaattattgtatttatcgaaaaaaaattaatcagtttaaaaactgtacaactactaaaagaaaagatgttaaccaaagaaaagaaaagaaaaaagagaaagaagaaaagcaaaactgaacaaacatgaactggattaggataatctaatcaaaaacaaagacattaattaacgtgagaagcaaaaaaagaaaaagctgtagttgtccgaagcagaaacacgtgcaagagcatagaaccagccgttaactttcttttgccataatggctaagctaactaacggcgtcgtcgactaaaacaacagaaaataccctttaacatctctcctcgtcatcgagtatataaaaaaagagtaaagaataaacattcatcagctttattcttcaattttttatatgtgtaaatcccaccactggttcattcgtgcatctttttttaatcgatccctcaaaaataaaaacaatgcaattcataggctaccaattcatcttaaatgtggccgcaatgctaagattgagataatactcagttgagttttgctttttttttttttttgatcctgcctgaaaaatttcttcattctttttgtctgatttgtttgaaatcatcggtatctaaagtgggttttgtctggatttttattgttttcttaaattacagatctttaatcgattctgcttgacgaaattatcgaggaatctagaaggtgttattcttcgttaatagctggtaagattgatttagtgaattactcttttagtttgggatctgattgtgattctattggctgctgaatttacccatcgatctattcttgtggcttgcatgtttttatattgtgatttgtttttctgatcttgatcttatttgagagatttcgaccaacgaatgtctatttttgtggattctaatgattggttttgctgaatcagaaaagtggttgaaatataattaccttctaaactgatgtcaaaacttaatcttcactggtcaagaattgttactttaccttactcttgcggcgatgattagtttgatggattggtttgttttttaattagcatccatcatgttggaggctccgagttatctggtgtcaagggacttaccatcttcatgtgaggaagagagcaagtggatatacaatgcacactgtgtgcttcagctctccctaaggaagcgtttgttggatgatactgatgtagaaggaagttccgctaagaaaatgttacgggttgatcatggaagcagaggtgaatctgacaagattacagatagtcttcagcttgctaaaacctatcagagctctaaccagagtcaacaaggtggtggtggtgatcaacagagttcaccagttactcggcttgaccaaaacgcgcttctcaactgcttggctcactgttcgttatctgatttcgggtctatagcgtcgacgaatagaaccttccgctcgttgattaaggacagcgagttgtataggttgagacgggcaaagggtattgtggagcattggatttacttctcttgcaggctcttagaatgggaggcttatgatcctaatggagatcgctggttacgtgtaccgaaaatgacattcaacgagtgtttcatgtgttcggataaagagtctctggcggttggcaccgagcttcttgttttcggaaaagagatcatgtctcatgtgatttaccgatatagcatcttaaccaatacatggacatcgggtatgcaaatgaatgtcccgaggtgcttgtttggatcagcgagtctaggcgagatcgcggttatagctggaggatgtgatccgcgtgggaggatactgagttctgcagagctttataactctgaaactggggaatggacggtcatcccgagcatgaacaaagcgaggaaaatgtgctcgagcgtgttcatggatgggaatttctattgcattggaggtatcggagagggaaactcgaagatgctattgtgcggtgaagtctatgatctgaagaagaagacatggacattgatacctaacatgttacctgaaagaagcagtggaggtggaggagatcaagcaaaagagattgctgctgcaacagcggcttcagaggctccaccgcttgtagcagttgtaaaagacgagctttatgctgcgaattacgcgcagcaagaggtgaagaaatacgataaaaggcttaatgtatggaataaggtagggaatttgccagagagggcttcttcgatgaacggttggggaatggcgtttagggcttgtggggatcagttagtggtggttggaggacctagggcaataggaggagggtttatagagatcaatgcttgtgtcccaagtgaaggaacacaactgcattggagagttcttgcttctaagccatcgggaaactttgtgtataattgtgcggtgatgggatgttgatgaagaagacttgagagagccatttcaaagttattgacttctttgttagacttattttcttttcttttctgttttgttttttttaacagtttgggtcttcgtttcatgattggggtcaagagagtctctctctgttttcttctttgtctttgtgggattattgttgttgttcaggtataatctggaactgaaaaagtttcaataaatttgaagaaggttaagaacaagcatcatgttgtcttgtctctctcaacattgttattttgtaatttgtttccattgttacattccttcaaaataaattttgaaagttaaatcctttattcttctaaagaaaagaatatagattacataaatgaattcattatgctatattttttatctaatgatgttagattttgaaataagtagctttggtcatttcttaaaactgcttagatcttcattcctaattataagattataacataacttgattagtacatagttgaaatatgcatagataaaagaaaacattagaatataaaaaaagacagattctaagctttaaattggagcagaaagcatctttattttaattagcaacttttttacacgagagagatccacaaaaaggaagcataaacaaacaacaaagacatgaagttgcttcacacattctaaaattaaaagctttttcaaatttctcttagtactgataaccctcaccatacatcgtttcatagctttcatattcatgcttattatatctttttgatttatcagcctgcaagatacaagaaaagagaagtaaagaagaatcacatttttttgtcaatgagaagttaagagatcttatagaacaaaacacatgacatacccggcttaagatcttctcaaaagcatcaggtccattctctgcaatgtacttctcagcagctgttaacacatcgtctggttttctgaagatatccatcttctttggcacataccaaatgttaatgctccgagggttaacaaacaccggtctcacaaaatgttcatagacataagcagcgccactaaagtagggaataacaagccagcaagtcaagatcagcttcatgtatgaccatatcggtaacctgatcacacaaaaacattgtcagcaaccaaagaaaaacttgcttctgctaatgtgactaatgggggtttcactcatcttaccattcgatgagtttggcgaatgtgagctcgatgagtgtaagtaatgaataaaggacccaataagttagccattgtttgtcatcagcatgagattgagtttcaatcgcttgaactgaagcatatctagccattgaaacattcaaaagaagataaaaccattagaaccttacttagatgaagtaaaaagcttttgatctacagattaggagttcacttacagaggataaacgagactaaccacaggcctgcaaatattcaacaacagagattgtgattaatttacacataacattccaaaaagatgaataatttataggaatcaaatcaactttgagagaattctcgcaacttaaactagggttatgtccaaaaatagaaactagagcctaggctgtgatgaattgagtatataacatatgagaagctattagccaaaaaaggaaggaactttaaggcagaaggagagaaaagaaatttgatgagcattacccagcaagaacatcgaagttcctgagaagaaccttgaggaaattgccagctccagatcccatcaccaagctttgattttggcttttgaatctgattcttcctccactaaaaacacactactctctggagatggattgagactttgagagagagaacgaatgattgtgtggtagacctgttgaaagtttttaactttttaattgatgtcgtgaaaacgatatgaattggaaaaagctacccattaatttctttcctttcggaataatcaaaagctttttggaaattgttaccaaaacgaaaatggaaattagcttaaagtaaacgttgacacaagaaaataaagtagtaatctttttctaaaattctctatatggaaggaagttttaactatagaaggaaaacaaaatatttgtattggggaggttaattacaatgtactgtatctctcgaaatactgtaagtagtttttcagttgccgacataagaaaataccgttttgatgtatgcaacaagttaaaaagaacttttgtcttgacttgaataagatatttttcttgactatgaagttgaagaaaatatacatgaagatgacattagggttttgatgatcttaaagatgaaataagtattagctctttgcacagccgagtgggaatgatcgaacattcattcttcctcccaaggcgagcgccagcagatcgaactcttctacataccacagttctgatactattgcctgtatcaacaacagagagatttctcagttcttggtcaagaaaactttgcttttgttggaagttttaccttgaatcctcggatttggttgtttagtcttgtgaccaactcatggagaagctggagatggtcgtcagaaccagcctgatacataaagaaacaaccactaagtcatggagattctgcaactttggattctgagtttgttgacaataagtgaaacacttgcctcagttggagatattggtggaccaagcagtcttgccaatgatgtatgaagaattgcagcatcatactgaaacaaatatcaacacaagtatcagacaagtggttcatgttcattgagagatatatacattttaggaaatagatattacaagttgcttctccggtgcacgtggaagaacagatctcagtttcaagcggattgttatggggtcatctccagaattaacctggtgaaacatgaaacaggatattagtcccacatatctgatttagccatttctaaagaacttggtagcatagtttttgttatggaggatgaaattcccaaagtggtataatcaaaacaaaatggacatctgactcgcatttattgaaacaaagagaaagcaacaaaaataccttccagcatccaagaagaacaccagtcgaggttaatagaactctatccaagataatctccaaagggcaaagctctttagcaactgctttaacagcagctgcttctgcttcaacctgataatgaaaaagagattcagagactagaatcttcacaagataaaagtggactgatgataagataaatgataaagtaaaaacaacagacctcaacttcagtagctggaacagagaaaatgtgattcgatgcatgaaacatgctgaagtggtacatcttagagtcctgaaaccaaattgctaaaaaaaaacaaagtatgagagaagaaaatacaattaacggcattatatataattcacatatatggtaatagcggcaggcttactattttcgaagtaaggactgaacacattttttacgacttccctgcaataaaacatagaaggacaccttttagcagtagaacattttgaaaagagggtaaatttgcattgagattgagaaggggcaagttacacactcacaagactgggacagagtattctgtgctgagatgtaatacattagctcgcacagggggattcgcaacctgaatattttatacaatcatacatgatatttagctatcgttatacaaaccattattccattctaacaatagtaaaagtaaggatataacattctaccttaaggacaggtgctatctttccatctttcagtgtgaagagatctgaaagtgacaatgactgagacgtttcaccttgtttaagaaacacgggtccgttttcttgtaaatcctgttccatcttattgtacaacctagtactttgctccgcataggagacaaaggaatctgaaacataccaatccgactaattattgctatgaataaccatttacctcagatacaatcttgatacagataaagaaaacccttaaacaaaggcactagatccccaaatcaagcatttccctttgcatcagatattcaatctagaatgttctgcatttgaaccactaatcttgttggcttaagaagcttctagaagcataccaagttttgcttttatcaataagaaacatgttgatgaacaaataaagaacggtgatgtaagtacccatttgatccctaaaaactaagttcggcttaaagaaccaatagcaaactcaaaatcttaagtacaaaaaacatagaaaattaaaaactagttctttacgcaaccataactagacagtgctgatgaacccttcagttagcaagtcaacatcgatcttccatttacgaaacccatattcattaaaaaaaccacagacacacaatttagttaattaatcagatcggggttagaaaaattaaaacatcaaaaggtactcaatttcgagacaaggaaaggaaaagtcagtgattgataaataaacaaccctcaagagcttaaaaaaatgatttttacctgatgaaggagatgaagtggatggcgaatttcgaatacccatttggaaaagagagtagaagatagtgagagagatggtccagaacaacacagcggttctccaattcggtgccctaatcgcagacgttgtcgatgtcgccatttctccttttgttttgtttcctgggaaactccattagtcttttctccattaacgtcaagctctgttttaatttcctttttttttgtgtggctattttacatctagttttgccactcgatttcatcatatttttctgtcaatatttatttattatgttgaattaaaaaaaaaaattatgtaacaataaactgcataacactttccgttaaccttattcaccaaaatttcgaatccgtttaaatccgtataataataacacaccattctacattcgtggtcatattgggcttagtgagtgttgttgtggcaacataccttacttccttatgtccaagaactactactaattgtagcattgcaaaacattaagaaaggaagaaaaacttacttgaactcatctttataagaagatgattggtgatggtcttctaccaaataattcttctactacgaggtgggagtttgtgtagagaatacagacaagtatgtttcagaaaacttacataggcaaaaacagaaaatgaccaacctccttgtcgctatcctttatatactcacatttttatgatatcacaaggagtaaatcggatgataaacatagtgggatttaaggaggatttcaaccagatgtgattctctatttatataaaatctccatttcttcctatttttttggattcttattttatctcattagattcgagttaatttttcttttctttttgtcatgtgggacggtgtagaactcgtcgagttttggctcatgggctgccggagaacccgagaggtgctaaaaatccctctcctacattataatactaaaccaaatatatacgtgagctagaaaccacaaccaacattaaatcatactaaaccgattatgtattattgtcatttactgtaattcaatccatgatagaatacaaaatgacttctagatttgctatgtatgcatataacctcatgctcataaaatttatcaaaaccaaagtccagtcacaccttatatgcaaatgacaattcttaatccataaattctacatttggttcacaaatgtccaacatgagaactaaagcacaagaaatagttttggtaagtaaacagaaaatgcaaaaagtgtgagagtattaaggggccaaaccatggtattttcatgcgcataccaaagttgtgtttctctacacttacgtaagtaaatatcaaaaactttcttctatgttttacagtttgcgtataaaaacttcagtgtaaggtagatgttacaatgtacatcaaacttacatcaataactgttgtttcacatcgtcgaagcaaaaatgattatatatctaatttcattactccctatcatcgtcgccaccctcatgctttatcaacgatggtggagatccaacataccgccgggaccaaaaccaaagtttctgcttggaaaccttcatcaaatgaaaccactttggacgcattctttctcggagtggtcagagacttatggtcctatcatatcggtgtggatagggtcacagctcactgtcgtggtctcgagctctgatctagccagacaagtgttgagagacaaagaccatcagttgtctaaccgacacaggatcgcaaggatgactcagaccggtactgatcttgtttggtccgattacagtccacattatgtgaaactgaggaaactctgtacactcgagctcttctctctgaaaagcatcgaaaatttcaggtccttgagagagatggaagcaagatcgatggttgtgtcgattctgaaggacttaatgagcaattcaggggatgatcaggagcgaaaaccggtgattgtgaggaagtacctagctgcggttgttttgaataccatctcaaggttaatgatagggaaagagttcgggtctgaggaaggaaaagagtttaaagccatcgttgagaaagaacatcttctcagtggctcagggacgattcttgatcacgtctggtggctcaaatgggtttcttcttggttctttagtgataaggaattcttagcgcacaaggatcggagaacaaagtggtttagaggagctattatggtggaagaagatatagaaatagaggatcacaggggatttgttcggaaattgttggtgttaaaagagcagaaagagctgagcgaagagacggttgggggactagtctggaacatgttaaccgcgggtgctgacacaactgcagttgttatcgaatgggctatggcagagatgatcaaatgcccgaccgtgcaagaaaaggcgcaacaggagcttgattctgtggttggatccgaaaggttaatgactgaatcagatatccccatactgccatatctgcaatgtgtggttaaagaagctctccggcttcacccgtcaacaccattaatgcttccacacaaagcaagtgaaactgtttgggtaggtgggtacaaggttcctaagggagccacagtttatgtcaatgtgcaggcgattgggcgggaccctgcaaactggataaacccatatgagttcagaccagagcggttccttcaggaagaaaccgatgttaaaggtcgagactttagggttcttccatttggatcaggaagacggatgtgtccagcggcacagctcagcatgaacttgatgacattggtgatgggaaatttgttgcattgcttctcatggagttcccctgttcctggagagaggattgacatgagcgagaatcctggattgctttgtaacatgaggactccattgcaggctctagctttgccgagagctgccgcaagagcaatacctttacctttagattaaaatagataaacaatcagacacataagataagataatcaaaatccatataccatgaagactctcataatggacacgaagatgtagctatgtaaaacccaagaggcattgcaagatttgagacatggttgagtatagtttcatacaataacatgtagctattatatatggaaataaaagagtcaatatttacatggtgaaagctcaatatcatgacaagcatcgcatagactaaaacttcataatacaaattttaggagcttttggtttttatttatagtgttgatgggaggagatgaagtgtatataatgcaccaagatcaattactctcttgtctaccaaagtcaagaccacacaaaaaaaaattgggcagagattgtgtttaacttacaacaagtttcaaagtatgggagcatgtaagtcttcatactaataagtcgcacaagtagtaggtgcccgtagaaacatgaaactgctcacttggctattttatcgaacgcttggtgtgcacctgcaatgttaacaacgaacgaattcaacaaaaaaattccccgagacggcgagaccccaattctttcttacacccaaaatcatcgcagctctgtcgtttacgtagtctccgactaacagacatgaaaaaaaaaggaaaagcctccgacaaaacatcatcgtccttggcaacaaatgaagatgttagtatacttctaaatctaaaccaagcttggtttattggtttattaattaataacggatcaagtttaatcaaaccgagcttgtgcgtcaccacaatttctaaaccgggctaaacgcctaaaccaaactagaaattgaactcaaagccaatcagcctactaataaatctcttgtttaccatatgaattttgttaacagatgtcaaactctgaactttggatacatttgcaagatacacaaattgatacctcaaaaagttaaaagaatgtagtacatgaaagtgtctttcttacaacaaagaaagttcaactaaaattttcaatcaaattagaaaatgcaaatagtgtgagaaaagcaaaaagtgaaccaattcatgacaatttcatgcaaaattacgtgttatctaaacagcttattccataaccgtgactaaaaataataattcataaatcatttaatatttggtgtataaaaaagtatacttcatgaagaagcatcaaacctgtattttatcaattaccacactttgtctaagcaaaatggatttattactcatatccttaaccactatcataatcgccgcctacatgcaaaatctacgacgtcggggatccaacataccgccgggaccaccaacgcgatttctggtcggaaaccttcatcaactgaaaccattatggacgcagtctttctccgagtggtcacagacttatggccccatcatatcggtgtggttaggatcacagctagctgttgtggtctcgagctctgacttagccaaacaagtgttgagagacaaagactaccaactctgtaaccgacacagaaccgcaaggatgactcagaacggcagcgatcttatttggtctgactacggagcacattatgtgaaaatgagaaaactctgtacactcgagctcttttctttgaaaagcatagagtgtttcaggtcgatgagagagatggaagtaagttccatggttaagtcgattttcaatgacttcatgagcgatgatcagaaaccagtggtgttgaggaactatctagattctgttgctttgaacattgtttcaagattagttatcgggaaaacattcgaacccaaagatggaagagagtttagatcaattgtagaaagggagactcgcttgcccggcgcaaccaagatgcttgattacaccgtttggcttaaacgtctttcgtcatggttcactagcgacaaggcgttcatgaagcacatggctcggaaaagaaattggtttaaacgagctgtaatggatgaagtatatggaggaagagatcaaaagtgttttgttcagagtctgttagagttgaaagagaaggatgagctgaccgaggagactgtgatgggactggtctggaacatgttaactgcaggagctgacacaaccgccataactattgaatgggcaatggcagagatgatcagatgcccgaccgtgaaagaaaaggtgcaggatgagcttgattccgtggttggatccggacggttaatgtctgatgcagatatcccaaaactgccgtttctgcaatgcgtactcaaagaagctctccggcttcaccctccaacaccattgatgcttccacacaaggccagcgaatcagttcaggtaggtgggtacaaagttcctaagggagccacggtttatgtcaacgtgcaggcgattgctcgagatcctgcaaactggagtaacccagatgagtttagaccagagaggtttcttgtggaggaaacggacgttaaaggtcaagactttcgggttcttccgtttgggtcgggaagacgggtgtgtccagccgctcaactcagcctcaatatgatgacattagcactaggtagtttgttgcattgtttctcatggacatcctctacacctcgagaacacattgacatgaccgagaagcctggattagtttgttacatgaaggctccattgcaggctctagcttcgtccaggctgccacaagagttatacctttaacttttaactgagatagattatattaatcaacataagataaagagagattctcaattgcgaaaaacagatgtagttatggcaagatttaggacatggatgatgacatggttcgtacaaacagaatgtagctattgatagtaaataaactaaatattccaaaagagaaagcttagtctcatcattgctaaaattgagaacctcataacacaaactttacacatctgttatagaagcaagccagcaatgtgttatctttgggctcccatcattcctcaccatcttcctcctcttcatcgtcatcgtcttcttctccctgaagagattatggtttcaaagattttcaaggttaagagatggtgcacagtaacaaaacatgtgactcataataacaatgtccagactgatactcaattaatcaatgtattttgaggagcaatgagacaattgttttacctcttcgtcaccatcatcatctccatcaaaatcctcttcatcagcatcctacatacatcaacaaaatctttaagcaacttattacctctacagaaagaggattcaagattgaaagtgaaatgataaatagtttacattgttgaagtaggtgagagggttggaccagagatcttccttgataatatcagcaacctgctccgagagaagatttcggagttcaaattgggcagataataaaaacggtctataacgtataacaagtcagaaagtagatgagtatgtacctcatcatgaatctcatccccagcatcttccttatgttgagcatcagtaaaccaagtaaagaaactgaagagaaagttaaatggaaagaatttaactttttgtatcatattcatcatatattcatgaccacaagaatttcactaagaatatgatcacttaatggggtctagaacaatacctctcctctggcaatgcacgtttatttcctttcttatcatcatggttcactccatttggcaagccctacattattgagaaacatcattaaaaataacgccgaagagagacaaataaagtaagaaacttattatctgtttatatttaccttgccctccttccatttgataggagttgcagtgatttttgttgttccttcttcaaggaaagtaaatgtcttggtaagcttggcatcctcaaagaacgggtttgaagtgaagtgctgcgattgatacccccaatttaacaagttaaataacaacaaaacccagtaatcttctcagatcaatatgagaagacaataacaacagattagaaaaatgagctggataaagaaacatacaaaagttatagagtatccagatttcacatctttggcatcctccacttccagagagttcaagtacttaaaaatctgtaaaaacagggaaatcaaatgaattggtaaaaagtaatgtaactgtacagaaaaaatgaatgccaatcggatagttatcgccttatcggcattataatctggaaaacatgccgaaagataactcaaaccttttggtcttcttcagtcaagaggtcgcctaaggcaggatgactcaaaaactgcaaagaatgtgtaatggtcattggtcaataagtagtagatgtttaaaaacagtaactgaaaacaacctataaacacttacagcagtcatccaaaagccaggaatcgattggataacttcattgcgcttgtcatagacaggtttccgtatcacgttatatttctgctctacttccaagacctcgtcactggccttttcgttaatctataaccaacaaaccagagttaggagaaagaagaagaaaaaaacactcattagagttcatgtcaattctaactgtacttatgagttaatgatatgcaattgtttgagctttaacttctcaaacagtactctttccactaacttctctatagctattggaggagtaattacagagagcagtcacatgaattaaattataaataagcagaaatcacacaacatgttctcaaattgcattgtacgaatacacaactatcactactgtagcaacaatacaaaaagacgatccttcattcaaatccagctacatatgaacattaaagtaaaatctgtaccataaaaatcaaaattggaatccattcaactttaccaggatacagagcacatgacaccggttaagaaaaaggggaaaaatctggagaatcagagcaaattaacgaaaagtgaaagaggagattttttaaccttctcgaggtcgtcttgaatctcctgaagcttctcaattgagagaacaagctctgcgtcgatttgctccaagttttcttcttcgcctttctcttcaattttcgacttcttgctcttgtccgcgaccattttcagttcacttcctttgaggaaaccctaattccaaagaaagagaggattttggctcctccttttggtctcttctcttcttgtggttccgtcacaagagaatcagctaaaaccctagctcccgatgagagtttatgcttgtgaagtgtgagagtgggcaaaagggaacttagggttttgaggggtttatgtggaccaatcaggttgcgccagctgaagcaaataagggtatattagtcaatttaaaaatcaatattagggtactttagaattttctcttcacttgcttttttaagttatcctattaaaatagttgatttaataaaagcggattaagtcatttaatttttccctttttgtgtcgtatgattttacttcaggaccactaaaacattattgctctaaaatattataacttgacaaaatatatccactttaaaataaaacaatttgagaagaaaaaaacaaaaaaaaaaaggaaatgttgacagtgggatttgaacccacgccctttcggaccagaaccttaatctggcgccttagaccaactcggccatatcaacttttgtgttctagaaagaaaacataattatttattcaaattattcctacgcgcttcttcgccgagtgcgatgggtttactactcccagcgttgtagccgttgaagctcatcagtgaactttactttcatccattgtaattgatttctccagttgttttctgagtctcctcattgagaaaggatctacctttttctcgattttattctctccgctgagaattgtctagggttcttctgtcttctttgctatttctctcgtatctggattttagggattcaaagtattttcattaggttacgattattctcctttatgggtcctcctctgcttccgaaacatgtaactgcagttataaaatgtcagaaggatcctatgaaagctctagaaatgttcaattcgatgagaaaagaggttggtttcaagcatactttatctacttaccgcagtgtcatcgaaaagcttggatattatggaaaattcgaagccatggaagaggttttagtggatatgcgggagaatgttggtaaccatatgcttgaaggggtttatgttggggcaatgaagaattatggtaggaaagggaaagttcaagaagctgttaatgtgtttgaaaggatggatttttatgattgtgagcctacggttttctcttataatgctattatgagtgtattggttgatagtggttactttgatcaagctcacaaggtgtatatgaggatgcgggatagaggtattacgcctgatgtttactcgtttacgattaggatgaagtcgttttgtaagaccagtcggcctcacgctgctttgaggcttcttaataatatgtcttctcaaggctgtgagatgaatgtggttgcttattgtactgtggttggtgggttttatgaggagaattttaaggctgagggatatgagttgtttgggaagatgcttgcatcgggtgtttcgctttgtcttagtacgttcaacaagcttctacgtgttctttgcaagaaaggagatgttaaggagtgtgaaaaactacttgataaggttatcaaaagaggtgttttaccgaatctgtttacttataatttattcattcaagggctttgtcagagaggtgagcttgatggtgcggttcgtatggtaggttgtctcatagaacagggacccaaacctgatgtcatcacgtataacaatcttatatatggcttatgtaagaattccaagtttcaggaggcagaggtttacttggggaaaatggtgaatgaagggcttgagcctgatagttatacctataacacactaatagctggatattgcaaaggtgggatggtacaacttgcagaaaggattgtaggtgatgctgttttcaatggatttgtgcctgatcagttcacatatcgctccttaattgacgggttgtgtcatgaaggtgaaacaaaccgtgctttagctttatttaatgaggccttagggaaagggataaagcctaacgttattctttacaacacactgatcaagggattgtctaaccagggtatgattctagaggctgctcagttggcgaatgaaatgtctgaaaagggtttgattcctgaggtacagacttttaacatactcgtaaatggactatgcaagatgggatgtgtttctgatgctgatggtcttgttaaagtcatgatctccaaagggtactttcctgacatatttactttcaacattttgattcatggttattctacacagttgaaaatggaaaacgcacttgagatattagatgttatgttggacaacggtgttgatcctgacgtgtacacttacaactctttgttaaatggtctctgcaaaacttcaaagtttgaagatgtgatggaaacatataaaactatggtggagaaaggttgtgcccctaacttattcacgtttaatatacttctggagagtctatgtagataccgcaaactagatgaagccttggggttattggaggaaatgaaaaacaagagtgtgaatccagatgcggttacatttggaacgttgattgacgggttctgcaaaaacggagacttggatggagcatacacgctgttccggaaaatggaagaggcttataaggtttcaagttcaacgccaacatataatatcatcattcatgctttcactgagaagctaaatgttactatggcggaaaagcttttccaagagatggttgatcgttgtcttggtcctgatggatacacataccggcttatggttgatggtttttgcaaaacgggaaatgtcaatttggggtacaagtttctactggagatgatggaaaatgggtttattccatctctcacaacgcttggacgtgtaataaactgtctttgtgtggaggatagagtttatgaggctgccggtattatccatcggatggtccagaaaggactggtccctgaagctgtgaacaccatttgtgatgttgacaaaaaggaggtggctgctcctaagcttgtcttggaggatttgttgaagaagagctgtatcacgtattatgcttacgaacttctttttgatggccttagagataagaggctacgcaagaaaaagggtttcacagtggtagccatatgaatctgatgcagtggcgttgcttaaagaactgattgagtttgtttgatttgagaagatagaactcagccaatgctctgagccccatggattgaacttagatttaaattgtgggtgacaagtctatgttcagtgaaatttcatccaagacacaaaaaggttggagttgctctgatctttaaccatgatctattgaaccttatatccggaactatagtcaataacgtctcctggatagttagagaaagaagttttgctgatttgatcccatttcctcttttatttatggtactgctacatgatagagttaaatgttaaccacaggtccacaggcaagggtcatgctgcatatgcatgatctaagtccttctcaacttcgccttcgatgagaatttttcggcagcagtgcggaaagaagccatagttgaggaacacctgacaactgtggctgcataaggtacgtggagctttctgaacattgtggcctttttgttatatgtggttggttagttgcagtcactgagaagtatatagatcttacaatgatcgagtcactttttttattagaactgtttatcattgcaagttcccataatttttctgacaaaatataacaacaaagcgtatcaactatagagcatggagataccgcaaacggttttctttagttcattatcatacagtaatagctacgataagttcatacacaactctcagggaattatttcttactttaaatagttatctaactcttattctattatcctctgagacaatattaaatccagatgattcatcactagaccagcatcttgatctaattatgcatttgcagcctgctggagacacttttgtctatacttctggataaatgtcaccaacgtatcatgaggcacttcgacttcttttatcacacttagatcttgcaggcgctctatccagttgtataaagtcggagtgttcactggaccaattatgtctacaccgattgcttcacgatgagctttgtagcctccgagagtagcaatgatggtgatttccaaaagcccaacatcatcattccttctgatgtttttattcgggaaatgcttcttgagtccctcatcaagaactttgaatctttttcttgcctcttctacagactttgcttgagcttcaccctcctgggacatgacttgacccatgacctcaaacacctgcaacaagaaacagtcaatagtctgctaatcatatcaatgtatggggttgatttcagatgagaggttgggggaacacacctgttggttgatgtagctgacccagaaccggacctgggccctttcataaggatcctctgggaagaaacgaggagagtttgtccacgtctcatcgatatattcaagaatcacaagtgattcagccactggtttcccatcatggacaagaacaggaatcttcttgtgcaccgggttgagttgaatcagcgattcacttttgttctgaagatcttcttcgaggtactcgtagagtacacccttgagtttaagagcgatttcgaccctctttgagtatgtgcttatccacgtcccatgtaatatcactttgctcttcttctcctccatatctcaaaactcggttgtttatttcttacacctttttcttaaaatctctttggggattatgatttttgtgcttcattgttcaaattgttttatagagactaaggggcattgtcttattattcggtcaaaagtcaaaactttgaatgttccaattaatattacattaacgatttgtttatttcatgatcaagattgatggaacagagccaagagataaaaactgaattatctttgactttactgccgcccaagaaaatggaaattagtaactattttacgacgaattttctctggaatgatcttacgaaatatctactattgaaaaaagaccattcaagagggataattttttgttcttagagctgtctcctacagtgaaagcaattccaactttaatctctaatcagtttcaagttgcaactgttccttcatcattaactcgaagcaagacctctgcacctcacggcttttcacaaatatataacatcagacagaactccaccctggttctttctgtacacctgttcctttcatcagcttacgagtttcctccacttcgtcccactcaccaacctctgcaaggatgttcgagagtgaaatatatgctccagcgtctgatggctctaattctatagccttttttgcagctaccttcccgagttcaacttccccgtgaattttgcaagcagcaagcaatgttccccagaccaaggcgtctggtttaatatgcatattgttgataaaactctcagcttctctaagtcttcctgacctccctaaagcatcgaccatgcagacataatgtcggttctctggttcgataccatagtcttttaccatcgagttgagatggaaatagctttcttcgaccaaaccaccatgactacaagcagacaagactcccacaaaagtcactttatcaggcttgaatcctttttccttcataagattgtacacttgtaacgcttcattggcctttccatgttgagcataacttgcaatcagcgctgtccacgctattaaatctgggccattgatctggctgaatgctttacagcagtcgtcaatgcttccaaatttcgaatacattgtcagtagtgagcttcctacagaaggctctgtgcacaatccaatttttgtgatgtaggcgtgaacttgagctcccagcgatgattcgtcagagagagcagcggctttaagaatggatgaaattgcaaaggagtccatagtaaaaccagacatgaccatatcacgaaatagaaggaagccatcctggattaacccgtgttgtgaatatcccgaaattaaagatgaacatgacactggatccagttcagggagcctatcgtagacctgtctagccaactttagtgagccacactttgaatacatgtttactagtgcagaaccaagatccattcccttgtcaattcccgctcttagcgtatacccatgtatttctttacctcttggcagagaaggatgagaagaacacacagttagaacagcagctagagtactctcatcagggctagtcccatcatccagcatctcgctgaatagtccaatagcttctcttagataaccgtactcattgaaaccagaaatcatggaagcccagcaagcattgtctttaaaaggtatcccctggaataatttatatgattcttccaaactaccacatttagagtacaatgtaaaaagagaacttccaacagtgagatcaagaaccaacccacttttaagggtgtaaccgtgaacctgcttacctaaattcaaacaatccaatacacttaacaaactgcatacactaaactcatcggttctcaaaccctcctgaagcattctagtaaacagtcttattgctttaccaggcttcttactttgcgaaaacgaagtgatcatcacattaactatattttgtctctgaatatcgtccagatcctcaaaaacctgttcagaaagatcaatatctccactctttgagtacatactaatcaaagcggcagccactgaggaatcaagatagaaaccactcttaaagacccaagcatggacctggcttgcttcacagaccatagaaggtctaccacaagcagagattacactagttacggtacagttgttgatctcaacacctgagtgtctcatttccttgaaaatttcaagagcagagaaagcatcattactctttgtgtaaccagacagcattactgtccaagatacaacactagggttagggatacgggagaatacttccatagcttcagccatatgcccacatttggcgtataagtcaacaattgcagtacaaacaaatacatcttctgctccgcatttgatcacccgagcttgaaccacttttccaaacctaagcttctcaagggaagcacaagcagccaaaacactggaatatgtataactatcaggtttctgaaacccaacacacatttcatggaaaagatcaaaaacagcaccataattttggtttctaagtgcccctgctatgatagtgttccaacaatacacattagcagataaagagtcacggaacactttataagcatcctcaaatcttagattcttagagaatacgtctatcaaagccgattcaacaacttcatagaagaaataacccatctttatagtatgacaacacaccagctcactaaacagaggagcttgtaaagcactacaagccgaaatcacagacccataacttatctcattagcctcaaaacccaagaaatgcatcttagaaaaaaatctcaacgattcttcaaacaaccgatgttgtttataaccagagatcataatgttacaagaaacaacatctggttgaggaattgtatcgaacaacttagctgcatcagccatggaacccgagtttgagtaccagctaagcaatgatttagtaaggaaaacatcaaatggcagaagatatcgtctaagcaaatgggcttgtagaatttttgttgttctgagattacaaagccttgaatttgattgatcattgaagaatcgaaaagggttaaaaggagctgaagaagaactggaatctttgctggaaaatgataactggtttcggaaattggtaacggaagatagtagtctggaggtagagaaaggagagatcttcaaggagtttaagctctcgttcgctagacaattcatcgtcagtccatgagctcaaggaagcaaaatcaacataaagtatgaaacttttaaaaaacaaaatagagatatcatataaatatatgatatataattggtattgtttaagtcaacataaagtcaagatggccgagttggtctaaggcgccagtttcaggtactggtccgaaagggcgtgggttcaaatcccactcttgacatttctttttatgctttcaaaaaaaaatcttttacccattccaatagacaattggaccattctcagatactttcatagacgtaataacctaatttgagcatgaaaaggatattaaaaaatcagtataaaatcacacgcctcgtctcatgaactcaaaatcgcttccaaaaaaaaagaattaagtctgtttctaaaccaacaagagaaaagccatgggtgacgctaattttgactacagtgtctctttccgccaggacttaacttctccgcttaccgtcgagctaacgtgcaccaacgtcgtccacaaaaaaatccgtctcttcaccggcgaaacaaaaacactctctctacccgaacaaaccatcgaccaccacaccagctttattcccctgaacgtatccaccccctccacaaacactcaaaacgacctccttttcgacatctttcgtagtcccgaccaaaccactgttatctccagaccaagcaagactagtagtaattattcgctaagttgcgtgagaatctccaaaatcttgagcagcttcggcgtcaccgaaaacggctgctctactatcttgcgcgagatcgacatggccattacatcatcatcatcatcatcgagaggcagaggagtggttgaaatcaagatatggaagatcaagactgagttttacaaagccaacaaagctgcggagaacttgttgatcgacagctactgttataattacttgaacgttgcaacaacggaggagaatggatgcgctatttgcatggaagattacatagaaggatcatcaatagtggctaaattgccttgtgatcatgaattccatggagattgcatcaacaagtggttgcaactcaatcatatgtgtcccttgtgtcgatcatcaattcctaaggatgttaaatccgggtatcagtcctgtttagattcaatttttaggtgttttggattctgaaaaatagttactatattcatatttagtttggttttggttcagttacgcctttcaaaaatattcggttaatcaaataaactacagttatgttttgtttgattttgaattgttcatatctctgttacattcatatttaagcagaacaaaattattaaacaacaagatttttttatttttttaagttacaaatacatattggaaaaattaaaggtcgaaatacgctaaacttgggcagatgattaattcataaaattcgtcaaacgcaggatactctagctattgatccacaacgaatgttgtatatggtaatactcgatcagtgactgacattgatccacaagccgaatcctttacccagtcgaacatgctactaaaccacactctgtcactctcattctcatgtggttcataaatttaatacttatccatgcatgcagaaatatacatgaatgtttgcaagttttaaaaatggtttttggattttggtttttagtttttgattttcttggtttttgtttttggtgtagattttagtttcttaaaaacttgagtggtaatttctttagattttggtttttatgttaatggataatatttttttttacaaaaaaattataaaaataaaataaaaaaatgtgattgatggtttttgagagagaaactcccaaaacatagattttggttttctttgaaaaattgttaaaacactcaaaaactagattctctattttttaggaaaacttgttttttcaaaatcttgaatgagtataaaatagattttgggaaaaactaaaaccaaaaactagattttgtatatagaaaaagatttaaaataaaaagaaaatcccatgaaacatagattttagttttttttaaaaagttgacaaaactatcaaaatctatagattccctattttgtttttagaaaaaaccattcttttcataattgattggttataaagtagatttttggaagaaaaaaaaaaagtaaaaaggttaaaaaccaaaaacaacttcaattcaaggcctaaattaaaatcctaattcgagtgggaaaaggatataactaattaacccttctcggtacaattcgagagctactgctccaattcatcggctattaagttgcttcgatataattcgaacgtatggacgatggaggaggaggagaatgaatgtgtgatttgcatggatggttacacacaaggatcaatagtggctaaattgccttgtgaatatacagttaaacattctgttattttgataacggaaattatacaaaattactaaattgccatccaaattgaaacacaaaactataaaacatgagtgtcccttgtgccgatttcgaatgtctcattcatcatcttgttcactttttctttggattttcgatttgtaaaacaacaaaaagaaagatgagttctttcttttttcagggtttaattagggtttatgagctttcatctggattatgataaataaaaattccagcttatattttttttggtttgtgacgatgactatagcaattcaccattgtctctctctccttaatagctgcaagaacttaagagctttaacacaaatacatggcttgtttattaaatacggcgtcgacactgattcttacttcactggaaaacttatcctacattgtgcgatttctatatccgacgctttaccttacgctcgtcgtctcttgctctgttttcctgaacctgatgcgtttatgttcaacactctcgtccgaggctactctgaatccgatgagccgcacaattccgttgcggtgtttgttgaaatgatgaggaaaggtttcgtctttccggatagtttctccttcgcgtttgtcatcaaggcggtggagaatttccggtctttaagaactgggtttcagatgcattgtcaagctttaaagcatgggcttgagtcgcatttgtttgttggcactaccttgattggtatgtatgggggatgtgggtgtgttgagtttgctcgcaaggtgttcgatgaaatgcatcaaccgaatttggttgcttggaatgctgtgatcaccgcctgttttagggggaatgatgttgcgggagcgagggaaatcttcgataagatgctggtaaggaatcacacgtcgtggaacgtgatgcttgctgggtacattaaagctggggagcttgagagtgctaaacggatcttctcggaaatgcctcacagagatgatgtctcctggagtactatgattgttggtattgctcataatggaagtttcaatgagtctttcttgtacttcagggagttacaacgagcgggaatgagtccaaatgaggtaagtctgaccggagttctctctgcctgttcacaatctgggtcatttgagtttgggaagatattacacgggtttgtagagaaagcagggtatagttggatagtttcggtgaacaatgcgcttattgatatgtattctaggtgtggtaatgtcccaatggctaggttagtctttgaaggtatgcaagagaagaggtgtattgtatcttggacatcaatgatagcaggcttagctatgcatggtcaaggagaagaagctgttagactattcaatgaaatgaccgcgtatggtgttacaccagacgggatatctttcatttcacttttgcatgcttgcagtcatgctggactgattgaagaaggtgaagattacttttctgagatgaagagagtttaccacatcgaaccagaaattgaacactatggttgcatggttgatttatatggccgatctggaaaactgcaaaaggcttatgatttcatatgccaaatgccaattccgccaactgccatagtatggcggactcttctcggggcttgcagtagtcatgggaatatcgaattggcagagcaagtgaaacaaaggcttaatgagcttgacccaaataactcaggggatcttgtacttctgtcgaatgcttatgcaactgcaggtaaatggaaggatgttgcttctatcagaaagtcaatgattgtccagagaatcaagaagacaactgcttggagcttggttgaagttggcaaaaccatgtacaagttcactgcaggcgagaaaaagaagggaatcgatatagaggctcacgagaagctaaaagaaataatcttgaggcttaaagatgaagctggatataccccagaagtagcaagtgctttatatgatgtagaagaggaagaaaaggaggatcaagtgagtaaacacagtgagaagcttgcacttgcatttgctctagctagattgtccaaaggagcaaatatcaggatagtaaagaatctgagaatttgcagagattgtcacgctgttatgaagctaacgtcgaaggtttatggggtagaaatattggtccgagacagaaatcgctttcattcatttaaggacggttcttgctcatgccgtgactactggtaaaaggttgtgaatagatgtacaccacacatatatcattttgtggactaatgcatccactagtgacctcaccaatggaagcttcactcccaacacaaactttcagatgtctctactctctataacttgaggtcttcatttgcgaggtttgtggtttacattgccttgggactgcgggtaactttgatactttgcattcttcttggcctagaacgtaatatacgaaattgttttggactgttattgtaaatttctaacagattctaccaaactttgacgagaaatatcaagcacgtcttcgtggttctggttcaaaagtctcaacctttgaatcgtcgtttccttctttctcgcttcagatcttcgaaaaaccctaattttttgtataatttcgcttccatggctgcttcagctgcattctccatttcatcaccaccttttgtaccctttaccaccaaaattcgcagaccatttctcttgcttactccaaaatatcccaaacctgtttcggtgcgagcttctgtgtcctcgatctccatcgatgaaaaattgccagtccaaacaaaggttagtttactagtatcttgttttgtattaatggtttgatcctttgacttggagaatgaattagacaaaattgtattagtcatgttgagattctattgagttttgtttcacaatcttactatattagctgtattctttttatgtagaatttgatcaaagtgagatttgttttcttacttctgaaaccagaaatgaaaagtaaggctcttctgggataatcctttcgtttctgggcttcttttaatgtaatgatgctgttctgttttagacaagcaactggcagtggaagttcaagggcaattcgattggtatatactatgaagagcatgagagggagaagtgtgaatcggctaagaatattctaatgataccaacaatttccgatgttagcaccgttgaggagtggagatctgtagctaaagacattgtgcagcgcgatggagacgtcaactggcgagcaactattgtagattggcccggtcttggttactctgctaggccgaagatggattatgacacagatgtcatggagaagtttgtggtcgacttcatgaactcacctgaaagcccaatgagccagtcaggttagtgtgaaccactgctttttctatttgtgttggcaaaattatggtaacaaaaagctacacatactctccatggctttagttcccggttccttatagttcgatatgaaaactgattcgtagttggtaatatctatatttactttggcgaataattttagctatacatgatatgatcccttgcaatgcttagagtcccttacacttagctcattctgaatgtatgtcttctctatggctctgactgcttatacgcttgaatcgggtttccattgatcctccttatttgctttctcaactaactaaagaaacaagcaatatcttgacatagtccatgtaactccgaaacaggtaatgatgatttagtgatcattggaggagggcatgcggcaacactagcactccgtgctacccaacgtgggctactaaaaccatcagctattgctgctgtcgcacctacatgggctggacctctccctattgtatttggccgtgattcttccatggtgtcgaggtccgttgacatcttttcattgagaaaagaagaagataaaaactttcctctcttgatcgctctgtttttttctcaacaggtatggtatgctaagaggaactctaagagcacctggagttggttggatgatgtacaacatgttggtgagcaacgagaagtcaatcgagtctcagtacaaatcccatgtttatgcagaccaaaccaacgtgaccgatgccataatccaaagcagatacgagttaacaaaacagaagggatcacgctacgtccctgcagcttttctgactggtttactcgacccggtatcatcccgggaagaatttctccaactgtttgctgatttggaagggaaattaccggttatggttatgtcaacaaaaggagctccaaaaagatcgaaagcagaaatggaagcattaagaggagcgaaaggagtaagcaaattcgtggaagttgaaggtgcactcttacctcaagaagagtatccttctcttgttgctcaagagctctacaacttcttgcaagagacttttgctaaatgttagatagattaaagctcacgtatacagccaggcccagaaaatgtgaccgcaggcccatagagtgttcattgtttgctgaactctacagtaagaagtctttttttatatttgctttcctaagtttcaattccaaaacatattttcctttttaattccacacaacttttttgagaatactgactcaaaaacagtgataaccagttccatatagaatcaaaaaacagaaaatatttcttaaattgtcaactatttggccaccaccacaccacttgaattgtttattttaatattccataattcttcgttttaaaaatgaaaatgcgattgaataaaaacgacaaaatataagtgtccatctctttaaggctactcatatatccccaaaagttggataagttcatcccccaaatgtcacgtagattcatcccatgccatgtatttagccgacggggacttcttgggcctcaaagttattatttaatgggccagattctctatttaatatttccaaaagttacctaatatatatcattatcaactatcttcttttttctccaactccttatctcatattacaaagttttttatataaaatttataaattggatacaaatatatatatatatatataaaatatgtataaaattaagaatttctaacactaaagtttgtatattttttatttaacttagagaataaatcaagcacgaaaaatattattagataaactttggtgcatgacatttttctaaaaacattttgtcagcattttcttgtaagtagtatatattatgtaatattgcggattagaatctggaatgtaactaaccggatttgaaatcggattgtaaagtaacggatgattatactagtacaaatcatgaaaatacaaattggggcccattataaagagttttaatcatgtgattgattgtgactatgattttgaataaattttcgggcctagtttaattgctttaatgggccaatttcgaattaatgtgtccataacttaccagacccaaatatatgcttgtatgtataatggaagctttcggtcacattcttcaaagtggggctaattgtcctcaaggacctcaactacgaaaacgatttgagtgtttttttttgttttccaaacgattcgagtgtttggagtttggactattttataacgtcatacaaaacaaaacaaaaaaagtttgcgaaattatttttatttatctcaccatttagacaaatccacacaccatatatttcattacactttgtaattcatattaaaaaatgtcttatttttccattttatataaagtttggtagacagcgagctatggccaatgggtatcaaatattttgttagacatgttgttatgggtatcaaatcatcatatcaaatcattatttaatttgcattagattcttgcgtactctacaactgctcataatttttttattttattttactttctttctgctcatacattttgcacaccaataataaaaagttacccatccatatatatatgtcactgattagattatcccatattatcaccaaaaatattttgttaatcaaattgttttttttttctttttctttttgtcaacaatcaaaatttgactacaaaatctcgattgacgctgtgtgaaatagataatatattatatatgaatatgcgcgttgactacgtcttcgttcgctggttgcgtaagtcccgcacgtccgtatatggatgcatctagacgatgcaactaaattttagtatagaaaaatacgttttcgaaaattgatcgatattggtgtttgggttttgaatatggaatatgtaaagtgtaaacacttattgatcgggaaaatgcatgaaatacataaattcaaatacagtatatatgtctattacgtatcaaaactaagttgtcatgcggataccaaccagctagccgacaagtgatgaaagaagctagagcaatcaaacaaccaatagggaaatgtagcaattaataaccagctttgttattgcttgttatcacagaaaggtcaattactgtcgcttatttattttttgcattaacataaataagttgtactgttacttacaaaaatgattttgacagtgactaggaaaagagtttgcgttacttcaaagtttaaacactatttacaccgattattgtaaattgtaattgatctcataattcgacggttgtaatgttgctgacggcatgcactgttttgtctttgccgacaaacgtttttatcattgttgtaactgtttttagttgttattagaacaaagtggtgcatgcagttaaaataacacagaatcattagtgtgtctaattaaaaatttgtgtgtataattttcaattctatctttcgtcggtatatttcaatggctattattagcctattacacctctatctcctgcagttttgttaactaacaaacaagtaacagcttttgaaatagtagcaatcaatacaacgtggaatatctgcgataatgtatcaaaactgtgtattatattcatgtatttatagccctgagctattcttttttttctcctcgaagactcgagagcagtcgagctattatgtgaatagccgacaattgagggtgataatgtaattaaataaaatagggtaattacaattaaggacaataatccatcattttcatttcatattttcattgatcgcacatttaatctagaccttccacgtgtgcatactacatctcatgccatgatcactcattaactactccaaattactaatccgaatctgctgctaaaaagtttcaacattttcactcatgagttagctctaattgtaattacgactaattggtcttacatcttaattaatgttttgttggctcccattgctaacacccataatagtggaatagtattttttaatgcaattattatatagttttgtctttgaaaattattatgcaaataagtaaatatatattctctatgttttaaaatattttttaaactaaagtcacgtagattaggaagtatttagttttaagaaaatcaaccaaccatagaaaaataagattttagaatacttaaattaatatataatttacataaaaactcgaaaacattattataatatgaataaaaattatttttaaaacatcttatactatgaaatggatagagtaattgtttctttagttttaaaatttttgcgaaattctattatacgacttatattattatacaattatgcgtcgttagatataagtcttcatctttaccattcctaattagacaactaatatctgacgtgttttatcgatgtttcaactcctcgaaaaatgtaagaaaaaaatgataataaccggcttttttcaacagacaataagcagctatcgtggatataataatagtttataattttcgtggatataattttttgaataaaatttgtatatgatattagtccaagcttcaggtgtgaactaattaactattgatttctgttttgttgtgatggctgtaggattgatactccaactaggcaactaccaaatttgcaagaatattttagattaatgtacatttatttcgtcataaatcaaatgatgtgtatatgttaaaaaagcaaatcgtttttctcaaaagactgactatatggtgatgtaaagcaaaaagaattggaaaacaaaaagtttcttttttttttctttttctttttaacaaaaagtttctttccgtagctatttgtaacaatgataacaatatccattacaaacaaaaataatgtaaccagaaaaacaaaaagtatgaaaataatgtatgcgcgtaacagagtttttggtttagtaaatttaaaatttaactccgttttgatggtttcattaaagtggtcatgtccgttgaacgttaaggtgtattatgtcaatatacaaaaacacattagttactagttagtgtattaaaatgaaacaatatttgtcgtttcatgtattcggagagccctaaaactttagtatttttataatttattaaatttgtttgtgtattttacatctttaaaaaaaattatacacacatattcgttgtgttatatgtttgacgttatacgtcaatattattatttttgaggtgcttacattcgcatttatattttaccgttaaatcataaataacaaaatagtttaaaacaaattactgatgaagactacaaaacaagttcagctaataaccaatctttatatatatatatatatatatatatataggtccaatgttttgaattattatcactttaaaatttaaagaataaaagttttcagttactgtgattttagtcagtctctatgaatgtattatatagcaaatatctacatattttagatgttattctagattttggtctaaatttatttcgttactaaacaaaaaatacatgtaatcatttttttttaataatgtagcaatatctcgatttcagacagttcaaatgaaaacttactaaccttaaaacaactaaaatagaaatagtaactgattaaactataaagtgatgtaccatttaatttgatagattgactagacatttgaataatgcagttctaagaatgtcatttgaaaagtaaacgtggatcagatttttttctatgaacaaaagaacgtggacgttatcatgccaatctttagacaaacacctaacaaaaataaatcagattaaagtgaacaatacgtgaattagatgcgatagggccgggtttcttgtatagagctattttaaaataataaacaatttaaattagctatttgtttaacaaaacaaaaacaaaaagctagctatttcatcattgttataaagttttgatagtatactaatcgaaattgctctttacccccaaaagaaaaaggaaaaagaaaaatactaatcgtaattgttatgttatcaatatatgtaacaccgtcatctttgttacgacaaggatacagctgttctttgaagctattaataacactataggcctatcaggcatggccgccaattaaaataaagaagacgtaaaagctgtatttatattcggcttaattaataggagtatttcttaggtctcatatcacatcgtatttcacttttacttgtttaatttatataactggattatggaaaaataaggttcgatgacaaaaaaaaaaggttcgatgaatacatacaggccggttagaaaactaacgattgacaaatgatgatatattgttacggttgattaaagattaaaaatatgcaagacataaaatagtggtaaaattactaattttaattgataaataatagcagtgaaaataatttctagcctaaaactaaatatttaaataatttggaagtcgtcaatttttaattgataaataatagtatttcgtacataaccgtttccttttcaattcaaaatgataatgtggtacaaagcgtgaggagaatcgtttcttcgttgtaacagattgtgggcaataccgtttttttttttttgctaagacagtaaatatcattaaatgaaagttgtggtgttaaaaaaaaaaaaaaaaaaagttgtggtgttacaaaatgtaagacctaaagagatgaaccttgccaggaaataccgttcttttgctctgatttttgtacctcaatctttgtatttctataaaagattgatctgatcttcgtgagagactagtgatgaaacttgagagaaacgtttgacttaattataatcctcttcttctttttttctttttggataaaaacttgtaatctttatgtattatggtagttggatggaatctgcatgagggaaaacctttgccatgatgtctggattttgcaccgaacttaaactatggtgcattcttcttctttgctctttcgatttgttttatttttggtcagtgttaaaatcgaaaatcgaataaatttaccaacttagcgaatctttagatccaattttcaacactactaacgcatataaaatttaaagaggagaagagaagacaaggaaactttttggagaatagactgattgtgatttctcaacactaagcatataaaatctcacctatataatcggtaaaatactaaagactcgtaattgcagtgccaaccctttgattaagtatagccacgtaagtgaagagaagggctgactttttgaacaagcaacggaaaatgagttaatgctcttcgctgtctctattgactcgattcccttcaaaggcttttatttaggctcagcagccacgtagaagatttttttttttttctgtcaatatttacgtgttgcggttaacttcgtaggcaattaaaaccggttttaggggtcacaatttaaaaagaaattaaggttttcatatgttaatatataaagacaaaaaataaattaaattcttcaaaataaagataaaattgacattcatgcactagtgctcgttttggtttaaatatatgtacgtctttatttcaatgcatatagatccaaagaacaacaacccataagacttggacatttgtgtttctcctcaacattcaaagtctttagtgaaacctctcttgtaagaagccaaaaaaataaagagaaagattcaaagaaggaaagaaattgaggatgactatttcaagtccaaagagagattttgagtagaccctcttcacaaaaatccaatcttagagtcttactagttactatctagcttacatacacagagacactataccaaaaatccaatcttattagagtacttactatatagcttacacatacacacacacgaagtactatttcaacgatcaagagcgtgtgcgtgaggatatgggtagaccaccttgttgcgagaagattgaggtgaagaaaggaccatggactcccgaagaagacataatcttggtctcttatatccaacaacacggccctggaaattggagatctgtccctgcaaacaccggtctttatatatcttcattcactctccttctttcttcttcttatatatctttcttataagatttttccacatatataaatatttatatatgtttcaggtttgctaaggtgtagcaagagttgcagacttagatggactaattaccttcgtcccgggatcaaacgaggaaatttcactcaaccggaagagaagatgatcatccaccttcaagctcttttgggaaataggtatggaattactcctttaattctccctgttttatattaaattgattcacgttgatctccaatatctaagtttgtccatcttccgtaatctcctaattaacaatataaattatatagagtattagcatttcattttattagtgttttttttgttattatttatttgattggatgtccactttgaaaataagatgggcagctatagcatcatatctacctcagaggaccgacaatgatatcaagaactactggaacactcatcttaaaaagaaactagtgatgatgaagtttcaaaatggtatcatcaacgaaaacaaaaccaatctggcaacagatatttcgtcttgtaataataacaacaatggatgtaatcacaacaaaaggaccaccaacaaaggccaatgggagaaaaaacttcaaacagacatcaacatggccaaacaagccttattccaagccttgtcacttgaccaaccatcttcattgatccctcccgatcctgactcaccaaaacctcatcatcattctaccaccacttatgcctcaagcacagataacatctctaaattactccagaactggacaagctcatcatcgtcaaagcctaacacttcatcagtctccaacaaccggagctcaagccccggtgaaggaggactttttgatcatcactctttgttctcatcgaattcagaatctggatcagttgatgagaagctgaatttgatgtccgagacaagcatgttcaaaggtgagagcaagccagacatagacatggaagctacacctactactactactactgatgatcaaggctcgttgtcattgatcgagaaatggttgtttgatgatcaaggcttggttcagtgtgatgatagtcaagaagatctcatcgacgtgtctttagaggagttaaaataatgataacaacagtcaagatttgttctataagaaaataaaacgtatagaacaacgataaagctagctaggtttattaatttttctttcttttgtcttttctctatgatctttagttacattttattttactgtgtggcttgcttgtggtcaagtcgatgaagatcaaactgtgatatactatttatatgtaaagtactataaagttaagagtagttgaataaactaaagtttttcggttgggtcaaaaacaaagaggacaaaaacaactaattttttgtgttttgttgaatttatatctttcagaattaaatttgtaacgtagcaaattttattaatgatgacatggcgatatcactggtcaaattcatccgatgattaattattttacatgaactgtcgaagattttttttttctgtcattgacaaatatatatgatatatggatttattatatttagtttctattagcactgccatttagtcttgtgaatactcgattgcaatgttttttttctactcgctagattttacgatatcaatagctaaacaaatatgtcaagtcagacttacgatcttgattattattttcaagtgtgaacggtgttatttagcggaaagaatgctgttaattcagtgttcgatcgttaaatctttaaagactacgagcattaatgacgattaggttgggggaaatcattaaaagtctacgactatagtatgattttcttgtaattggttttttgaaatcatgtaacctacaaaattggctaatcatcattaaatataagcagccaccactcgttatataacagtgaaaagaaatcatagtaatagaataggactatacttttggcatttcttgaataggagttagtgataacaaacaacaaaagaatatgacttaatagtataaccttttttttttaagtataacttaattgtctttagttatctagtatacttgtataactaaccttgtcaatatcacagtttaaatcagttatcgtacttttgttctaatataaaaaagggatgttgattggccaaatgaaaataattttacataaattggtagtaattatgtggcaacaaacaaattttagacgattttacttctcagttctcattagttatgacgtatgcatggtttttctcataaagttgcgctgttttcctgaaactattgatgaaaatatccaatttaatagaccggcaaactcatgatcatagaaataaatcattatagcttgtgtctaacgtgtttgttacgattttgtagataaaggcaacgtcattgacttagtcaataacggatcagagcctggtttcttaagcccatataaactaatgggcctatccattatccgattaaatttgacttctacatgcgcaagttcttcttccttttggtgttggtgtatgtagtctccaccatctcattcaaaattttgtttcttaaagaaactagtatctgctcttgcaggtcaaagaaaccagcatttttgtaactctaataataaaaggttggttaaaaagtagatatagtacccgtttagttaatttcttggtattgaattcaaggaaggagatgatcgactatagggtccaataagtattttgaacctgatgtagttgtgaaactcttagagagtcagagggtttacaacctgatgtattttagtaaaaatactgaagcttactcattaaacatacttagagtaatatactcattatattatcaggtttcagagttcacgtcaagggcacttaattagtgttgttattgtaggtttgtttattactaatcaagactacgttgtaatcggcttttgctctgtaactgaacacggtggtgatttatagtttagccgttatcattgaactcctcgattataagagtccttaataatgccttttgcaacataataaagaaaaacagtttagaagttacaaatatgatccaaatttcaaaaaaaaaaaaaaagttaaaaatatgatgcacaatcatccaatttccaaacacaatgtatcataaaaatttgtttaacattctgttttatatattctaaccatgtactttgaaagtcaggtgtgacctaagaagatatatgaaaaacgtagatctgtttattcgctactacttgattttgataagaaatgtcatcgcgcttaccataaaacatgaactagaagattaagtttgtcaagtaatatcaattgaatgtttgtataaacgccgactaacttaggtaagagtaaaccgagtatacacgatactgcattgaatttgatatatctatgatattatgtatacatatagtttgcgcatgctttgagaattttctaagaattgaatagtttttcgagagaggaaaaaggagagaaagagagtgtgaatagaggattaaaaggacagaagcatgtgagatttgaaggcgggcctttggaaatcacatcgatcccatgtatcaaaaggaaaggaactctcatcttcactttcaatcattttctcgaacccatctctccattgttagataagccaaaggtttcttttcgctgtcttggtccatgtgttttgttcatttttggtcccttgttttattctttaacaaggatattttgttttttcttaattctaaaaacaattgccttgtcattccactatatatatcatgacccccttttcatatttaattcttttacctttaagttgtttatagtaaagggttatttctctcttagttttaaaaatgtgtccatgaagttgaactacactagaactcccgatagaagcctcgaatttagtggagaattcagtgattgttttaaatttttgatgacaattaaataaagataagtcacataccacgggccttttactaagcttgtgcatggggcctagggctttccacgtcggtccattagtaagaaaaaaacaacaaacaaaaacaaaacaaaacaaatccttaataataatcatactaattagtgggtgggtcttctaaaggttgctcacttacgaaagagccaatcgtcaacaaaaaatgcaagattgatcacccaaataaaaccattttgacttgtttagaaaataaaatatcatcattggtttttaatgtcgattgatttgccaatgatgggccttcaccgatttcaacttcacgctctccacgacaattacatgccacctaattgaaaagatgccccgattttttagcgttgtacactttgaaaatttttaagatttaatttctctaattattgttaatgctttacacatttcacgcttcaccgtcgagaagaaagagcttgaagtgtataaaaatcttattatttactttacattgcaaatgattggaaatttgggtaatgacgaaacgggaaaaaaatgatttgcaatactgcatgtttttatcggtcatgaaacttcgtagaaatgtaaatttttgcgacatttcgcaaagtggccactagccaaatgtgattgtggaaaatgattttgaaatattgcaaagtttaaacctagccgagttatttactagtctttttttacctttttcttcagaaatatcctctatatataaaactttcgtctttaaatatgcgtgccaaaatattaaaaacagaatacagttcagaatttctggagattcacaatatgctctagttttaaaattggaatataaatataaaaagctcttttcgtttcgaaacaatattaataaaaactacagtggtcttttccaacaaattcgagtggccacttagtccttagatgatggcaaaagcagccaatacatcattttttaatcacaaaaccaaatcttttcccatggccatagatatacacttatttaattgtagttgcttccgcctcttcttttgattctatagactattttttttttttttttgtcgaaattgattctatagactattagacttgaaaataagtagacaaaaccactaacctagacgataagaagacatgattcgatatgtgggccggttgtggtataaaagaagttgcgtacatatatagtttatacaaaaacatatcttgctttcatatatatacacgtaacatatatgattatatcataaatggaattagattcaagaagccaaaaaaaaatggaattagattcaactatctgcaagataattatctgatttatccggcgacgtactatcaacatgctcatattcacaactggtcgtgattgcagatataatatgattctagaatctatgttgaaaatacaatatattttttttggtttgaaaaaacataaatgtaaaacgattgttgaggtttactaacgtttggaaaagtactatataactatatacaaatttaagcttcgacttcagaggttcaatattcaaagaaaaaagaagagagagggcacatgtatgggaacttgtattcgtgttttagactgatataatacttagttgtatacttttaacaaagagacctcctatacaaagtatttcataaataagatcgagaaatagtcgatatataaaaaatacatatagtgtgacgtgatcctaaactcgactgatgcttctttcctgtaaatgtgatcctaaattcgacttatgaaacaaaaaaattccactttcattctccaaattaacaaaaaaaataaaaatctacactcgatcttaagattttataaattaaatcagcatagggtcacgtatgctatttcatgaagctggctcattgaaccaaaaagctaaacttaaaagtaaaatattgtttacatcataaacagaactatacaatatgtcaaaccaacaagcaattttatatatacctatagatatagatgggcggtatgctgtttttgatatacacatcaatattcatatacaaatatcctctaacaaattcatctttaaaaatcaatcgataaatccaaaccaaaagaagaaaaaagtaaaatcctctaaaaatcaagcgttaggtggagaatactcacaaacaacctcagtatcaacttccttccggtgaaaattccggtgacaaccacaagccgcgcatctcaaagcatcaacggttccttcaactccggcggccatgaactcacggcaaccgtcgacggcgtagcctccgatgttagcagcgtgattcttctgacactccacgtaacggacgttactgatctcggaggaagaagaagaagacgaagtagtagtccaagaggaagatgtgttggagtttcttgatctctgcttgattaccatctgtctcttcttcatcatgaactgtgaaaccctagttttagccctggaatcgaaaatggctctttggtcttacgaaagactctttatgaaaacgaagtgaagaagactagaaggtgtggacttgttctttggtaatgccctttgtgccccttttataaaatagctacattgttattgttaataatctaaccctagagatgattaatttatgtatttatctctacggtgtcgacaaagtggcttaaaatatgggctactttgtacataattgatcttttttgttcgtctccctataaatagtgatttaaaactatatttatgtacatgaccaaaactgattattgaaactggataaactatgaaataattaattgtacactactgtatattcagtgaagatattattattatgaaatagtgaaatgtacagtataataatttaaaaagatgggggattttgtctctctgtcgataaaacgatattcattctcttccattatttcacgtattgtcatgttcaaacgcgacataagggtatagaaatttattattctcttcctgtcttccattatggtcttcgatcgttctccgtcatagaatacgaatgacatagtgaaagaatcaaagaatgcgatagaaataacaactttgtgtttcttttactaaaaaataaacaaaattccttcttctttttttcctgcactagcatgatgcgttatcatgttaaagtccaataatcataggcagatgtatgtacattagagtctctagtattttgagacccaagaaaataatctctggactctaaagattaattatcagcagccagccttattttaccgtcgaggtcatgtgcattgcattatacggataattaataattaatttctatagaatataataaaataaaagttatttgagtaaataaattaaatgcgaatccgactcagtccaacggacctgctcccacaagcaagagacaatgacaggttaatattggaatgcaatcacatttctatttacttttttttttcttccaattcatataatacatttaatatagttgtgattgtttttatcgaacatgcgctatgtaagatttgaactcatactaacacaacccaaagaccaattaactagagccaatatgtgttagggatttagaatttgacatgacgtcctaacgataaataaaaaaaaatactttctaggtacaaaataatttctaaaggactttttatctactaaagtagtatatcataacagatagataacacactataatttaattattgtctattgattatgtttctttcactttgataactcttatgatctcatctctcgtgtgccagcttgaattttgcaaaatataaaaaaataaacgactattcaatcaaaaatgaacgaactagtagcttcgattttgtaagacaattagatgaagacaacaattgcaaagcagggatatggatttgatgacattttcaaaaggaaataaacaagacaggattatatgtttggtaattgaattttaatactgactaattaattagtcaaattgacttctttagacgtacgtgatcaaccaacaaaacatggatcccacttgacacacaaaagtccatgtgaacatcgacttttattattcttctcgcttaaagtaagtttctaactgtaatatgtaattttgtatgtaaccaaaaataatttaaaactaattgcatgcatatatagagtcggagtatgtactctatttaggtcaaaatatgcacagtatatcatttagcttgatattattattttttgtcatcttttctgtatgatacataattgcaacaaaaacaggtcaaagatttttctctgaccacgataagctttaaaatcaggaaacattattctataacttaattctgattatcaaaaatttagattctaattatagttatactgaagaatgtgttatgcgtttggtgttcactggacaaataatgcgatcaaaatattgaatactttataccatttagaattgtacacaaattaaatgctactggttagatgccaatgcaatgtatttttattttatttttagtccatagaagaaaccaagaaaataccgtttttgtgacgaaaaaaaattcttagcggaagcagaactatgaaatagggttctagttgaccatggaaaacacaacaaccattatattaaaaaaaatgtcataagtgccgatgttaataaaaacataattaaggtattaaagccgagaatcacgcaagaatgtcacgaagttgattgttaaatgaattataaaaaaaaagtaagtgagttcctaatcaaatctttgacgacgaccttggttttctttcttcgctatctcagtttttagtcaggatcgtactgtagagttaatttcatcattgtattataaaaattaacctaaaagacaaaagtgtaattaggtctgcttttatatatttttaaacggactaacaaatatgaaattacgaataaagagagagatagaaagatgagagactattgaaaggactctatgtttctcaccaaccgtgccctactcgtgtagtttagagtcatataaaccccttaaaaattgacttattatttgttgatttatatacatattagtcaaaatgttgtctttccaacataaattggtgatcaatatcagagtgagactagtaaattgtttataatctcatgtttgattgtagatacacagatatttatctaaactagcagcaatgaaaaatcagaagattaaacgtgaaagggcacacaatgattattaaacaattgactagaattaattaaaacactaactaatatatgggaaactaaacatcaaatctacttttttcagtgtccctctgtctgtcacttgtggaaataaaaatgaaaaatcgcaaaattaaccaaacattaaacctttttaatttgattatgttactctttgtctatgtttccatatgtccccttttcaccgtttgggtgatatggatatcttaaaaggtattgggctttactgtcctctctttcagttctttcggccttcttcctcagaattattatatcaataaaattcattggatcacacttcggcttgggcctttgttcattcatgaacatcttatcgagtggtatatttttggtaaagggtttatcaagtaagatttcttaaaactacataaatcttctatccttaaccaatagtaaacaaatattcggaaataactctaaaaatcataacgataaacaatcatatttgttggaacccatttaaatttcatgacaacaaggaataagaaaaaataattagtataagcttaaaagttatgaaatttcgccgtgaagtaaataacacaatgaacaaaactaacgtggttaaaccatctccatcaatggtttctcattgagaaactgtttaatataaaaataaaatataattaaaatgtatgagagagagtagaattagtctctcaaatgagaaactctgagaaacccataagaacacttgtatatttggtcaaatattattttattattaaaatttaattatataactaatatttattaaaatactaatatttcttttttttgagaaaccaagaaagtatctcactgatggagatgcacttagtataaaattcaacgttggaataatacaaaacgaaataaattaatacttatagatttcagcttcctttttaaaatgcttagattgataaattttctacttttttttcggtgtgccagtctttgtttcagtttcagtgaaagagaaaaaggttatctcttgagcggtgtaggaaggtgaagtaataaatgaagaggatacatcaatcgagtggacacgtacttgaagttgtctgatccacttcaactttgaattgtgagtgtcgtaacaagatgccgtatctattaaaacgttaaacacaaacaatttttaatcacaaatgctattttattggacgaccaaaataactaatgaaagaaaaaactagtatcctgttactagtttgacaaaagttattcagagatgaattgtctgcatgttggtttatactacgtcttaaaatttatataaagatattaaactttgtcatggatatagtaattgtgtatccacaaaatgcaaagatagaaaaaagtcgttatgtttgttgaaagcattagatagatatatgtctcccatgtgagtgcacatggagttatgcatgcacgaaaactgcctctacccttttgtctctctctcgattcttcaatcaattccccaccttaagtttgcatgatctctatatccacctctgagatctagacacgttgctcctcctcttcatcgaacggttctctttgatcatcttgctaagagataagaggaaaagtggcataaatccatgccgagattgctcttatcggtccctttatttgttggttggtcccaatcacttgcactggatatgtaactgtttctccatgttactccttctcttttaccaatatacccttcattttcttcaatttgggtgtagtcccaaatgtgactcttttggcctaattgtatcaacttgtttactttttcttatatatgttcatcaatgttacgacgaatgtaaaaaaaaaaatattatttggaatttgataccgaatctcgacactattagtatattattggacccgtcatatgtatttatcaccagagagatgtgagttttacgatacatagtttttttctttcatctgaaaagaaaattaaacacatgtaaaataatttctgcctgtagtcttttaatcactgaagtaactcgaatttgatgttagataattttttcacaaaaatattcaaattcaacagattaagttgttgatgacagatagctctctgggaggaaaaaaagaagaaaagataatggtccgtattaatatagttgaaaacttgaaactactttttagtttgtatataatacagtagactagggatccagttgagtttctttctttattttgagtttgtgtttatgtttgattttacgtttttatatgtaaataagatattttacgaattatggttttatttgggtagaagttgtagaatgacttaaacaatcaagtggcagaatgagatatataaagtaatataatatatgtaccgttattaacttattgtacatgtgaatgaggaagcttacacacacacaccttctataaatagctgacaaaactggttgttacacacaacacattcataaatctctcaaagtaagaactaagagctttactacagtcctactctctacacatcttctctctctctcaagagctagtcatggccaaactcataacttcttttctcttactcacaattttattcactttcgtttgtctcactatgtcaaaagaagctgagtaccatccagaaagtgtaagtttttattttttggtaaaatagaaagtgtaagttttataattcattcaattgtttttgcctttccctttctatttattgctataaatctaatacccgcgttaaaatttgttttgaaattaaacagtatggaccaggaagtctgaaatcataccgtaagtaaaaacttcttcttcttttatgaatcttgtttcttattatatatcaaataaaaactcgattatcatgattgcagaatgtggaggacaatgcacaaggagatgtagcaacacaaagtatcataagccatgcatgttcttctgccaaaagtgttgtgctaaatgcctttgtgtccctccaggcacgtacggcaacaaacaagtgtgtccttgttacaacaactggaagactcaacaaggtggaccaaaatgtccataaacaaaaacattgagagagaaaccccaatctgtttcctattttatttaattatttccagtatgcttttgttgtcgtgatggttaaattatagtgtttttgcaggtatcatttatcatcgataaacaatatcatataaaatcttctatgtttctttcacgttttgtttcttttgttgtagtcaatacacgaaatgtgtatggaccttctaattaggaatatataaaattttatttattaattagataatctttcgtatagttaaaattccaaggattacttttgattcgtttgggacaatctattttatattttactttctaagtttgtataactatatcttaaaagtgttagacagagtcctaatgattttagtataattgttactatttagttacgcttcgaaaatttggaacttttccaaagtggtctatatcaatttgattcactaatctgcgcttccttctagttttttacaattatggagatttttcgacgatgatacattaacattatatattgtctcaacgatttgtgcaagttttgaaaaccaccatcgtaattctgcgatggttcccggcgttgttctgtagcttcttcctggttcttcttgctcgcttaagctgagatttctccgtttgctctcacgactcgcaatgctgataaccccacagaaaacgactatatattgagggaaattttattggctacatttaattgttaattttaatgattaaaaataattatttcaatgctatttttgtctaaaaaaacttttgagtgatatttttgttccaaaaaattaaaatcatactatttatggaaatttctggaaaaaaacttaaaaacatggttcagttaaataacttttggtttagttttacattaaaatctacaagaaatacaaaccaaacagtccaaggattggtttaacaatctctaacatgaaactcaaaaacatatgaaaagagtctcaagacaattatccagcatggaaaaccaattataagaaataaccttccagaattgaagcttagcataaaaatggtgcaacctccccaaagatggctaagacttgcgactatgcaccctagcttcttgtcggatggactgacgattttagttgtcatttctcctatagttgtcaagagatagagtggagcgaaaagtaacccttcgttggtgtacccataatcaaatttccatgcaaccattaaaacaagagctgatattatccaagtgtgcatgacgggtgaaaataatctcgacgtcatccttccgtgaccaaaaaaataaattaaaacactattaaatatattattataacaagaaattaagaattgactaacaaaaacacttacaaacttggaactatatgatatccacgtctgtgtattgccatgatgtaattttccacgttaattcttgccacgttatggctaaccatatatataagaatcataatacttgtgattgaaggaaataataataggtatgttttcttcccataaaggaaaatgtggaagatttgatagataatctcataataacacaaaaaaaaaagttatatgaaattttgttatatccattgatgaaaatgctttaaatagcagatgaaagatttagtattcattatacattgacagctgttgatttaatttacatatcaaatcagaaaaattgatattttgtatttccttatattaatgaaataaaatgtataatagcaaaacatataattaggggatctagtatgcattcacacatgttgaatatacaagataaatcacaaaataaaatgacaagtggaagcaataaagtgaaaatttaataatattgaaaatgtctactttcatttttatttagtgatggaagagaagaacgcattgtcattttattttgtgatatatcatgtatattcaacgtgttgatgcgtactagatcttgatctacgaaatctatcatttgctattttacatattttcattcatggatagaagaaaatttcgtataacttcttctactttcaccttctgatttttttttcattttactttcactttattgtttaccttcttggaaaggtttagttgtatttgaaaagtggtcttggcccaaaatcgtacgaagaaatatgagtttataatgaaaactcagacttatgcaaagtttattcatcaggaccctaatttacaattttgtcgattaaatccaaattccaatggacagctggtctttagaaaacacgacatgtttatttgctctatgggtcggataaattttttttttattaaattaaccaaaacttgtccggtttgaaccgattgtttttttttcttttcggttcggtatatcgttaaaagtcaacaaattaatataatttacaacatgaattatctatttgtattccctatctatatcttgaacatattgatttctagatcaaaaggaaataaaattttgggttggttccatttgactaagtttatatgggttcgtccaagaaaatgtggaatacatcggttagtaggaagtggtggtttggttcatttccgttttgattcggttatttgttaaaacaggtgcaaatggatggaggtagaatgcttctacaagacatgtttccggtgcgctcacggtggctgtacgctcactcactcctcctatgcctccttagacggcgttctctataaccaactcttcctcgaaaaaggaaactatcccaaagtcttgattatctcttgctgtatgatcggggaaagaaaaatgattttcatttacaatgggttgtttccatatcagacatgattttctttcagttgaatataattttgtttagttttaccttaataaaaactacaagaaataaccaaacatcccacgaattggtttaataatttcaaacaaagaaatcaaaaacataccgaaagactctcgagacgattataccccacagaacaccaattagatgagataacctcccaaaagatgactaagccttgcggctaatgttctatgaggtgtatcattgtctcgaaactcttttcgaagggttttgatttctttgcttgaaattgttaaactaataagtgcgtggaatgtatacgtgaaggaatattaacatacttgtgagaaattatcagcatatatgtcaatataaatattatatgctatgagtctatgacaacgaatatatatatatatatatacatggttaattaatatagaagataaatcagaaaatatgataattttctactttttagggtgtttagtatgcattcccacgtgttgaatatgcatgatcaattacaaaataacacgacaagtggaacaattatgtgaatttgaatatagtcatggaagattgtcatttattattgctaatttcttttgaaacatacaataaagcaaaacacctaagttcttttgctaatatttcactttttttctttcttttttcaatataatcaatatttcacttttttttatttattaatggaagattgtcatttattttgcgatttatcatgtaagttcaacatgtgtgaatgcatactaaatcccataaatatatgttttgctatgtttatacattttaattcatggatataagaaaaatgcaatcatatttattatttctgatttgattaaacatgtgtcaatgtactttccataatatctagtggaaattggccaacaacaaaaataaatcttacttacaaaatagattcccacagatgttattttatttaaacaaaatctatgttttaatacatttttatatagatatactggatttatttatatcattttccatatttctagttagtggaatatgaaaataaccatgttatttaattattatcattaaattatttgataatatcattttaattgcttaataatttaaatatattgatttcccttaaatatatccaatcttttgtaagaaaagaaatttaccctgaagtttatcacctaaaatttagcatgcttgtcttttaagggttgtcgaaaacaagtttacatagatcttcaattattaattaaataacataaacttgtgtttgtaaactaaaatttagatctttaagtttctgttatttaattaatatttgaagatctatgtaaaaaaaaaatttccctttagattttttgaaccttgttaaatcaaatcatttataataattatttaatatttcaaaatataataaaaacttataaaaactagttttatacttattatctgtaaaagctagaggaaacgaaggaagaagagaagaatcatgctgagattgtgagtgttatatgttgatttagtattttaatcatacatataaccaaatgttgtattataatataagaaaccaaggtttgaataatattttcgtggtcatgacagccagaagtggagaatgtactcacaattcatgcacttccaaattgcctacactattttcctccttaattttgtgcatatctgtggggatgtcattcgtatccggcctaagttcggtctactctacatcctttttattttaatcgaagtgctactaaaacatctttgtccatccgacaagattctttgcagctttgtcgaatttttaagccattttagtggagctatcactatcgggctggtgagctcatgttgtaatgtcttattttattgtgttggtataccttgggttttgtttgccttcatactctttgaatgtcttgttactgaagactgaagaacctaagacgcatacaggctcttcaagagggaaattttaaaccatttgcttgtgaatcgtgttacatatcttcgtttttagcatattttataagctttatagtttgtctttcttggactaccatggctttcctagtctattatatatctatgtgttatatgaatctcatggtggattgatattattaaatgaataatgttttctgtaagctctttatttcatccaagacatttttcatatctatattgaaactgaaaggcttccaatcgctaaggttttctatgaacgagttatctcccgtttgacaatatgtttcttcttctttgaagtgtcgtttaaaagaatctacaaatcctttatcacttcattaattccaaaagtgtcactgtttttatcgatgtcaatagactgattgctttttgctttcgtattcgttttgccatgagatcaaacaattgtaatttctaactatgaacaaaaaagaaagatattttagggtgcccttcataaatttggaaatagtcttcaccaattgtcctgaacagagagaaatgggtatcaagtcaactctgaacactctatgactaaaagaaaaaatcattcacctcgataccagaaagaagaaaagtcatcgcttttgggaaatttgatgaacaaagaccaaatcttaaaactcgaattcttctggttcctaaaaagtggctgtcaagaagagtgagacatgcatcaaactctctcttctcctgccatggcgtcaaacctccggaaaccctatttcctcaggtacttaactattcttccccaatcgatgatggtcgaaagctgaaacctttttctgcaaatcgattaaccgacaagaaaatccaacccaacccacccactttgttttgtttggatgataaaaatgtcggaaaagagtttgctttcttcaaaattcctcttttacacgataactgtttcaacgctactcttcattgtctcttctctcgtcttccttcaacgccacgattcttctttcacttcaagtttagttcgcaagctgattcttccaagaacagacatcaagaacgaagaattcggactaatcgatacgaaatgcgatcgagacagagatgtgttgaaggtgtttatgtacgatctaccctctgagtttcactttgggatattgaattggcacaaaaaaggatctgagatttggccaaatgtcaacaacattagtacaatcccatcttatcctggtgggttaaatcgtcaacacagtgtagagtattggctaacacttgatttattagcttcagagacacctgaaatcaagagaccttgtagtagtgcagctattagagtgaagaactctaatgaagctgatatagttttcgtgcctttctttgcttcgttgagttacaatcggaaatcgaagctccgtggaaacgaaacaagcagtgatgatagattgttgcaagaaagattagttgagttcttgaaaagtcaagatgagtggaaaagatttgatgggaaagatcatttgatagtagctcaccatccaaacagtttgctctatgcaagaaactttcttggatcagcaatgtttgttctttcggatttcggaaggtattcgtctgctatcgccaatcttgagaaagatatcattgcgccttacgtgcacgtcgttaagactatctctaacaacgagtcagcttcgtttgagaagcgtcctgtattggcatatttccaaggagctatctatagaaaagatgtaagtgactttgagttttcctctctaatcgatatcaatcctgttactgattctaatcttaaacatcgtagggtggaactattcgtcaagaactgtataaccttctgaaagatgagaaagatgttcactttgcatttggaactgttagaggaaatgggactaaacaaactggtaaaggaatggcttcctcgaagttttgtctcaatatcgcgggtgacactccttcctctaaccgtcttttcgatgccattgtgagccattgtgttccggttataatcagtgatcagattgagcttccatttgaagatactcttgattattcgggtttctccgtgtttgtgcatgcttctgaagctgtaaagaaagagttcttggtgaatattctcagagggataacagaggatcagtggaagaagaagtgggggagattgaaagaggttgctgggtgttttgagtatcgctttccttcgcaagttggagattctgtgaatatgatttggtcagcggtttcgcataagctttcttcacttcagtttgatgttcatagaaagaatcgctaccgtagatctgaaatgtttgatagaaacggttcgagttaagatcatgtatgtgaaatatactacattctctttatgcttcatgtctgttttcttttcttgagttgaaaaagataacagtcaaatccttcaactcaaggtctaagttaatttgacagtacaagtcaagttttcactttatagttttgtcagtaagcttaatcttagaaggcttaagaagaacaaacatataaatgatggagaaaataatcacagattcatataaacataaaaagtttagatcttcaaaagtaatcaaagtaatgtaacgaaaaaccagaagaagaagatgatccaaaaagccttgtgatgtaactttatcggctcgggacacactcacaattgtagaaacttagccgccaacataacacttggccaacataaacacacaaaacacaatcacagactcataatctctagcttttaaatagataagatggttgcattcttcatgtttggtattgtcgctgctatagaatcaagaacgataaaggcttcactttccgctggaaccaatcacctcttccgctctgctggagttgtcttggctgcaaagccaacaacacagttgagagcagttagatgcaagagaatgtgtaagttctctagtgattttcagtaagattatcaaagaaagcactctgagagatttggagaatgtagtttgcatgtattagcttttggcactaaccgtttccttctcgggacgacagaagaggtttctccttcttattcccggttttgtcacctgagtttgcgagtctcgttgttcttggagagtgagaagtgatcctaccattacctggagatggtagagagtgacgtctgggaacagtggctttctcagttccatcttgctccgcagactttggtgagccttgaagccttagctttgctttcgccgatttagttgcttgcatatagcttgggattgatgggctagtctcgtgatgcccattactctcttcacgctcagtcttgctagtagctgaaccctttttcctggatttctggttctccttcccagcggaattctctttattgtttggtttgggagtcttttcttctttggtatccttttccattgagggtttttcctcaaccatggctttttcattgctgtcaatttggttgaccagtgaggaatcaagtgcttcattagtttctaatggtccaggagtatgtacttccatctcaagagcatgtacctcctcctcaggctgttcggaaatttcttgctttttcttttcatcacaaacattcacaggttcttctgcagtttcatgaaccagcggatatgatgattcccttgtcttctcaacgccaagctttggcttctcgacttccttacgaggggatcgttgaggttggatagagctctcaactacaggattatgtaccttcctcaagctacgtttaaccttttcaagttcaatctgaggatcttcgacagcgggtggctctatcgactggcttgaaactttccggaaactgcgtttgggtttctcaaactcaaaagatgtctgtactgaggaactttcaaagtttgaagcaggaactttacggacactcttcttgggtttagcagactcagcctcgactaaaagcctgttctgaggttttctgcttatcgttttcttcggttgaggaactggtttccagaagcatgaggctgaccagttctctaaccagatcaagtttgagtttggattggatgtatcatatgcgtgtacaggtagcacttttggtgatgaagcgagaagctgtaaacaaaattatccatcaagatctttaaataaaattagagactccatagtataaaagagatattggatacagtgaacatcattataataaataactctaccaacaagcgtaccttctgagcaaaagcattggctgttagtttcttgattccaaggtaagcatctgtaggatttgcaagcttgttcccctgataaaaaaagccagttctaacaattatttccccaccaacccaaactagaatatcttcctcgactaagtttgtatttaagtgtaagtttgaacttacaaagaaatgaaagtatcattacctgaagtagctgcaatctgcatttcctataaacttgaactccaatgtcggacttcctgatctctcttcctcgagcaaatgcttgcaacctgacaattcccatgacagagaaaagagttgcaacagcttgtctcctaacaaggtgaccacggataagcgcttgtagccttattatgcctttgagtgcccaaaaagcacgccgagccttcacacaaagagctcatgttaggatatacaaaaagacaacacaccagaagcagcaatcaagagagagagagagacaagcctaataaaatcgaaacagctggaattattaccaagtaacctctaaacgcagcctgcacagacgttgctgcaatctctcgttggattctctctgcatcagataatgaatgatcttgaacaggtgcaacattctgagaatctgttgattttccttcaggaagctcaatttcatcatctgagatctcttcaggtcctacattttgagtctctaacataccaccacttctatcaacggtattggtctctgcaacttcaaaagatggaagatctgataccacatctgattcttccacctttgaagtaaccagtacctcttttccactcacaactctctgcgcattattataactataattagaacaaaaaaaaaaaaaaaaaaagacaatcataagcaaattggtagcctaaaaccatcactgttttctcaattatgatccaaattctccacatacagtatttaatcatcacatacataatatagaattctcttacaaaagcgttacctctttgtctttggaaccactagatttagaagtttttttcccaagcaatacattcttcaaccattttgtagacttccccataatgtatagaactaaaacaaacctgcattgcccaagaaacaacacaagccaatattagtatgtgaatatggcaactactagtctaccacaatagtcaaaatgaagaagtcttttaattcattaattagttatggcaaaaaaggagagtaacacattatcttgttctaatcaactctaataataagcttataaagataaacctaatgataactaaatgtaagaatcaagaaagaacaaaaaaaaaaaacaatgattaccatataaatttatgaagtgaaattaccagatctggaactcagactgaaaaagaagaaccctaaatgactcaaaatccactttccaaaatgaaaaacaacaacaaacaaacaaaaaacaccgacagagtcaaacaacaaatcccaaacagagagatccttctaaaacccaacactactcgaacaatgtcttaaaataaagtcggtttaaagttggagtaaccgtcggatctccgttctaaatccaagtccgattcagaccaaacaaaaacaataacaaagaaggagataatataccgtaaattagaaatttagagttgtgttagttcaatgcttccatagcgtctctctctctcttcctcggagctttgatgctctctaaagaactgtttttctctttggtggtggtttcagagactttcagtgaccagacggaaagagaaaataaatattttgcgcaaaataatatttctaattttaaccaaaaagtaagcgagcatctccataactccaatcttacgcagttgatttctagccgttggatcttctctgaaatttagtatttttgtcaaacatttttagtttaactaaaattaatttttacagaaaaattcagaactcgaaagagggaaaattaaagaagagttaagagagcaatctataaagaaaaaaagctgaaaatcattaaatgcgataattaaaatagaagaaaaagggtaatttagtctaaaaatttggttatgtcatcagtagtctagattttaaaatacaacagtaacagatatttaattgaaattgctcagattttgttatagtcgtcgagattacttcgaaaacaagtgtaagaataccgcgacgttctaatgaagcattcgaagtaaatttacaatcatacccttgcactgtcgttgaatacgaaagaccaacttttgcaccagaggcacgtgggaaatttattaaccagtgcctagtggttcccgctccagtgaagtagtctcgttaaccgttatgggcctaagcccaatccataaaattattaaaaaaaaaaaaaatgatcatggaagaaaaaagcttgtgattgtgagacatttcatcgaacacttggtgatcaatatttgaaaacgaagagcacagccaaaattcgataaaccctaaggaacagtgagatggagaagaagaaagcaatgcaaattgaaggttacccgatcgagggattgtcgattggtgggcacgagacgtgcatcatatttccatctcttcggatagctttcgacattggtcgttgcccacatcgcgcaatttctcaagacttcctcttcatctctcactctcacatggatcatatcgtaagtatcttgaatcttctataaaaagacttgaaatttcggattatattttgcaaagatccttcttttgactttttgttttaagaacaattttgataagcctttgttgagactgccaccatgtgtttattatcattagcttattgctctgttactgttttgataaacccttgttgagagccaccatgtgtttattatcattagcatattgctctgttgctgtgttggtgttacattctctaattgtcagctaaattgttatgttatattagcctattgctctgttactgtttgggtgttacattctcaaattgtgagctaaactattcgtattgttatgttagggtggattaccaatgtatgttgctactagaggcttgtacaaaatgaagcctccaacgattatagtacccgcatccattaaagaaactgttgagagtttattcgaagttcacagaaagttagattcttcagagctaaagcacaatcttgttggcttggacataggtggtaactcaacctctagcattcattgcagccaagatttggcttttttgttaaaccttggacacttcttcatgcaggggaggagtttattataaggaaagatctcaaagtcaaagcctttaagacattccatgtcatccaaagccaggtttattttagtaaactcgcatgagattttcgatatcttagcgttatgtgtcttcgttgaattcatgctttcgtttgatattttgcagggttatgtagtgtattcaactaaatataaactcaagaaggaatatattggcctatctggaaatgaaattaagaacttgaaggtttcaggtgttgaggtttgtctttgatttgcttaatattgcttgtcaattttttcttatgtttgtctatcacaaagtcaatagttttgcaatggtctttccaaagtatataagcctgtttaataagtttggattgtggattgtagattacagacagcataataactcctgaagttgcttttacgggagatacaacgtcggattttgtagttgatgaaactaatgctgatgctctcaaggcaaaggttctcgtcatggaggtgaatatctgctactgatatgaatttggacaatgtgcgtgatttataatgatatagttcttcccggtccaagtttcatggctttgtattaaaagggaagctgtctctatttcctcttgtgcagagcacatttcttgatgattcggtatcggtagagcatgcgagagattatggacatatccatatatctgaggtcaggatcctcctttctttgacacctcttgttactttctgtctcttgatggtcatagaagatttcatatatccttaaactgcagatagtaaatcatgctgaaaagtttgaaaacaaagcaatcctgctaatccacttttcggctcggtatacagtgaaggtgtgtcttctttatccaacctggttatgaagcagtaggaaatcagttactctcttaccttgtagtggtaattaatctttgcgagttttcacaggaaatcgaagatgcggtttctgcattgcctccacctttagagggacgtgtgtttgcactaacacaaggattctaaacattataacactcttataggttttacatacttttgtttttgtattccacatgtaaacattgtattctgttgttaattttaagatttcttctatctcgataaagaatgaagtgtggaagtagagaatacagacgagcacaccaatatcagataaattcagaggaaatctcatgggatcccaaatcttattatttccctgcaacaagattgttatgtaaatcattggttttgaaaatcaattttctgtgtaacaagaccatctcccaagattgctatgtaaattattgactgcagagatcaattttcttttattttattaaaagaaattaatcatgaatacaggatattatattgttagaaaaataaagaaaattgatttctgcagaagaatgatattcgttatagttttacaaacaaaatcatattttaataattagatttagccagaacggacttggggttttcatatcaccttgcaaccagaagttattaaaaaaaaagaagcaaatttgctttgtaaactcatacgtattactttttgtcgcatatgatatatgattgatcgccactccaaattatttttgtctgaattgcagcttctgccgcgtaaggtaagataatcaatctagcattgcctatttgttgtattttttattctgaccagtgaccagcgatcaaaagtatgggatttgggcaacttgtatagtagtttaattggacttatttcgcaagttgtcaaacaatgtctcgagttcaacccttgtagtcgatcctccttgtgatagaagtttattggtcttatgtcttaagttgtcaaataaatatggagtgtgaacatttgaattataggtttagtcgtagagtaattatattttaacctcattttctaacttgtgtgtactttctgttaactcttgatttatgtgtttatcatttttttaagttatgtgttttccattatgctctgtttatctacaaatagtagtagctgaataaccatttttgtttttaaaaaaaaatcaaagttggacttccaagtcccaactaaagattaaaacatgcatgcaaataatttttgcaagtaggattttctttcttaggaactcagactccagaagacgactttatttttcccaaattgttttatactcaaaggaataaattatccacgctttgtcacacaaaaaaaaataaaaattatatagatatatagatatatacatgcaggaatttaaataaaattattaatcttacgtaattaagaacttttttatttttttttaaaaatcgtaattaagaacttgaatggtaaaatactagaagaaaattgttagcgtcagtgtgaaagcaaattatactgtaggttaacttttctatagtgagcaaaatacattaggttatctaaattcaactaacgtcctatttctagttatttgactaaccaaatcgattttttcgtgaaggaaaaaaaaagtgtttagtacactcatatagtcatattcttacatatagaattcaagatttcgaactaaagcatacgacactagacttaagtctagaaggatgacggaaatgagaataagctaaaacgtttctacgaaattaagaaattcgtagcatccacaacacacatattcaaagtcttgaataacaataaaattatgttcagctgagagtctgagaccgcgtccaacattttaaaacacttttaaaagtcatactataatatctgaggaccgtgtctagtttcagtttattcggttttacaacagcaatgatgcttgttgaattatggtttcattctattggattatctgcaagacttcttaattttaatatatagctcgtgatgataaaataacaatttgacttctaaagtctagtcctttatagtcttaacaatattcattttgaccaggttgagtaaatcagacaaaaatctaaagacaaagaataatcgtttcctcaaatatgtacttggtgagccgtcttaatcaccatatgtacatgagaataaatgtgtaatttggtggttatttcatagaaattttggggaaattgttgcacctctccactctttgccagtctcgtgtgatcttaattgactcaaaatgaaagaaaaaaaaacatgaaattaaagcaaatattcctatttgaattatgttcctttaagatttttaacaatattttttaaatgataaaaactggtctcaaagagcctaagtgggtttcctagcaaaaaaagatactcaaagtaatttactcctcaaaataatgcaatgatctaatgaagatctgttcaaatagtattgattttccaaatttaattatactcaaagagttttaaaatctgttcttgttattctatgctttgttttacatgtaaagtacttaaattcacttgatatttgttattactataattttagaaatgtgtcaaaatttaaaggagcatgcgtgtaatgccatatgccttatgtacgagaacttgtaatgcgtttgcaatttgtagtgacatgtaatgttttttacgatagtttaaagtgcaaaccgcttccgtatcaaacgagaagagtcgtctagcatacaacacccacacgagaggaaccgcttagaaagagaatccacttgaaattgctgtccatgcattgctcaaattcattgatacttggtctatgcaattttacactacctcatttctgactatttcaatttgtcaagatattataacatgcatttataacttttttgtcgacgataaatcaaccaaacgaatccggtctgtatgtttgataacatgcattcatacaaaacgattatctgttttttagtctatttaatttggtttctactttttacttttgtgaaactaataataatagatcaaacaattaactgatataatttattaatttaattcttagaccaagtaaatgattcatgaaatattaaatgcacgactaactttagaaaaatgtttctttgtatacataaagatagaatagaagaaaagtaggattagaagaaaaaaacgaaaatttcagagtagtttactaaagaaattctgagaaattttgtgtgaaaatgaaatgaaaatcttcaattttagtgggcccctgctacatcagtcccctatttatatctcttctcaactctaaacccaaaccaaaaaaaaacagaaagagcaatctctctatactacaaacaccaaagtttaaaattaaacaaaatcttcaagaaacactttacgaatttctgcaatggcttcacttcaattttcttctcagtttctgggctcaaacactaaaacacacagctctatcatttccatctctcgtagttactctccaactccattcactagattctcccgcaaggtcttttttctgttttgttttgtttttttcaattctgttcttttttttggaggaattcataatgattaacttaattttattggataattttcagaagtatgagtcatgttcgatgtctatgaatggttgtgatggagatttcaagacgccacttggtacagtggagacaaggactatgactgctgttttatctccggcagccgccactgaaaggctaatctccgccgtctctgaactcaaatctcaacctccgtcgttttcctccggcgtcgttcggttacaggtacatcactacatcatcatcatcatcatcatcctctgtttttttcttctaagacacaatccgatttgctgctgtatgtgaaagaatgagatcacgccacgtggtgtttttacattggtctgtggtgatttcgttctctagcttgctgtcttgctgcatcgtttatgcctaatcatttaagatcctaatcgttatgattattaaaatcatactataaagcagagctcacaacaacgataaatatatccaaatctaacagttaatcataaactattagaagatgactaataattatcaaaaagatatggttattatatttcttattagtttatgaataaaacacacactcgaactcggtcgtacaagattccgtgagtccatcgaactatttaattgggacttttgggacctttacatgtaaattataatgaatattttcttttagtcaattttacgtagactaaatcaaatacattttagaaagaataatcatgtttttttagtcctcgaaatctaatttaacactgttaacttttagttagtgtggccatgctaagataatttagctagaaaagtaataattttgtgttttgtgggccagaaaataagtaaaataatgattagaatccaatttgttgtaaaggcaaggcggcgatcaaatacagtcactctcattaaaacgcagagttttttaaaaaacccaaatcacagtcgaattttcccgcgcaataaaccctaatttggatttggtgcaggttccaattgaccagcaaatcggagcaattgattggcttcaagcccagaatgagattcagcctcgctgtttcttctctcgtcgcagtgacgttggtcgtcccgatcttcttctcgatctagctaacgagaacggaaacggaaacggaaacggaacagtgtcatctgatcgtaatctggttagcgttgctggtatcggctctgcagttttcttccgtgaccttgatcctttctctcatgacgattggagatccatcagaaggtttttgtcttcaacgtcacctctgattcgtgcctatggtggtatgcgttttgatcctaatggcaagatcgctgttgaatgggaaccttttggtgcattttacttttcagtccctcaggtacctttaaagattgattctttataagagattttttgagtttgtgttgttgtttaactggctgatacatgtgcaggttgagtttaatgagtttggtggaagttcaatgttggctgcaactattgcttgggatgatgaactctcttggactctggaaaatgctattgaagcactccaggagactatgcttcaagtttcttctgttgtaatgaagttgagaaacagatctttaggagtatctgttttaagcaagaatcatgttcctaccaaaggagcttatttccctgctgtagagaaggctttagagatgattaaccagaaaagttcaccccttaacaaggtagtttagactttagagattgtgttcgtatctattcttaaaacaagtttataggtttcgttttaactgatgtttttggctcgtggaattaggttgttcttgctcgtaacagcaggataattacggataccgacattgatcccattgcttggctagcacagttacaggtgtgtttttatctctggatattatatagtagtcagttttcaatgtttagatttatatctcactaatttttttgtgtgacagcgtgaagggcatgatgcatatcagttctgtcttcaaccacctggtgcaccagcttttatcggaaacacggtaggtctttttatatgtagtctgtgataataagttctgttgataaagatatgtgcacatttgttatttatttctaagaaatatgtttgtgacatacatctttgtgaaacagcctgagagactattccaaaggactcaattaggtgtctgcagtgaagctttggctgcaactaggcctagagctgcttctagtgctcgtgatatggagatagagcgtgacttactaaccaggtcaatttttacttcaagtgctttgaacaattacagaatccagttctccattatcattttactgaatttttgctaaactgttgcagtccgaaagacgacctcgagttctctatcgtacgagagaatataagagaaaagttaaacgtaagttcaatcttgatgctctgcagcttcaatgcttcatttcttggataatagtttggtatattttttcttattatgctttcttctgctttgcagggtatatgtgacagagttgttgtcaagcctcaaaaaactgtgaggaagcttgcaagagtgcaacatctatattctcaattggcagggagacttacgaaggaagatgatgaggtgagataatagtattggaatagtttttacatttccaagctcttcatttcttcgaattagctttaaccctttttctttctatctgtctatagtataaaatattggctgctctgcatccaactccagctgtttgtgggcttccagcagaagaagcaaggcttttgattaaggagataggtaaaatatctaccttggttcaactatcttctagtaactatagatgtagagattaagaattatgctgactcaaacattttgcttcttctagaatcattcgatagaggaatgtatgcgggacctattggattttttggtggcgaggagagtgaatttgcagtcgggatcagatcagctctagtcgaaaaggtgagcttatttgatctctttctccctttaaaaaacacactttaacactaattgttatagcaaaatcgatcattacggtttttgctacaacttgtaaaaaaatgctgaactgtattttgatttacagggtcttggggcattgatctatgcggggacagggatagtagctggaagtgacccatcttcagagtggaatgagcttgatcttaagatatctcaggtacgagcttttgtccagaaaatgtttagtgacatcatggttctctgttaccaaaatcctaatttttattctctcttttgttgttgtttttgcagttcaccaagtcaattgaatatgaagcaacaacatctctacaggcgattaattgaagaaagagtaacatttgtatttgattgttttgtttgtatgggggataaggggttctcacaataagaaagcaatgttgtctctcttgtaaattaaaaaagaaatgctttaatttgttaatgggccgagccttttcgggttgtaactagggcaggcctatcatgaatgttcataggcctagctgttatgattgttaatgagcttctatagtgtttttcttcaaagacagatatattcaatatggatctaaaactgaactgaatttaactgacatgacaatcgaatcaaattgaatttattttttcaattttcatttagcaagaagtgacccatcttcagagtgaagtaatctatgcttattatctcgattaagcaaaaatccgtagaatgcttgggcctttcaacgatgatgtagccgtgtaggacaggtttacggaatctgcttttatgcaaatggtaaatattaatattcctttataagttagcgtttcagatcatcttctttcgttagattaagaaactactttgttattatataactataaataccatccaacaaccttactcgccatatcttttcatgtgtggtggtttataggaacattgaaaagtaccatattataaaatgaagaatcaacacgtcaacaaaaacacaaataaaatgagatagtacaattaaaaaaatggagcgcatgtaaaaagtgaagaatcaaacgaaggcttggcgatagagaatggaatcagatttcccattatccccactctaacaccatatattcctttccctttttaccctccacctcaattaggtttattaatcatatttaacactctaattaaccaacccatttcatctcttttattttactaatcacaatgctttggcctcattacgttttacctagatttactttgtcacaaactacacaaatatgaacctaattatctacactcgtgtcagaaacagttttagctaatatttagtaagttttaattaaaactaatgaaatgaataaatagtgtatagtacataggatttgtttttagtttattaatggaaattaagatttcattagtactaaaaacatgtaaataaaataaagctttaaagaggaatatattcaaataaaaaaagcaagacctcgaaaaaaaaactttctattatctctcttccgcgattaccgtaatctctgtcacaaacaacaaaaccttctctctctcactatcttaatgagagaagaagacattctcgagaaatgagaagactaccactacgatgaacacgacgccgtttcactcggatcctccgccgtcgaggatccagcgtaagctcgttgtcgaagttgttgaagctcgtaatattctccctaaagatggtcaaggaagctctagcgcttacgtcgttgtcgatttcgatgctcagaagaaacgaacctccactaagttccgtgacctaaaccctatttggaacgagatgcttgatttcgccgtctccgatcccaaaaacatggattacgacgagctcgatatcgaggtttataacgataaaagatttggtaacggaggtggccggaagaatcattttctcggtagggttaagatctatggaagccagttctcgcgaagaggtgaagaaggtcttgtgtatttccctttggagaagaagagtgtgttcagctggattcgcggcgagattggactcaaaatctactattacgacgaagccgccgacgaagacacggcgggtggaggtggaggacagcaacaacaacagcaacagcaacaatttcatccgccgcaacaagaagccgatgaacaacaacaccagcaacaatttcatcctccgccgcagcagatgatgaatataccaccggagaaacctaatgtagttgtggttgaagaaggtagggttttcgaatcggctcagagtcagcgctatacagagacacatcagcaacctccggtggttattgttgaagaatcaccaccgcagcatgtaatgcaaggtccaaatgataaccatcctcaccgaaatgataaccatcctcaacggccaccgtctccgccgccacctccatcggctggggaagtacattattatccaccggaagtgaggaagatgcaagtaggaagacctcccggcggagatagaattagggttacgaagagaccaccgaatggagattattcacctagggttatcaatagcaaaactggaggaggagagacgacgatggagaagaagactcatcatccttacaatcttgttgagccaatgcagtatctcttcgttcggattgtgaaggcgcgtggcttaccacctaacgagagcgcgtatgttaaggtacggacgtcgaaccatttcgtcaggtctaaaccggccgttaaccggcccggcgaatcggttgattcaccggagtggaatcaggtttttgctcttggtcataaccggtctgattccgctgtaactggtgcgactcttgagatctctgcttgggatgcttcgtcggagagttttctcggaggagtttgttttgatctctctgaggttccggttcgtgacccgccggatagtccgcttgctcctcagtggtatcggctcgaaggctccggcgcggatcagaactctgggagaatttccggtgacattcagctctctgtttggattggtactcaggtagatgaggcatttccggaggcttggagctctgatgctccgcatgtagctcacacgcgttctaaggtgtatcaatcgccgaaactttggtacttgagagtgacggttcttgaggcacaggatttacacatagctcctaatctcccgccgttgactgcgcctgagattcgtgtgaaagctcaattagggtttcagtcggcgcgtacaagaagaggctcaatgaataaccacagtggttcgtttcattggcatgaggatatgatctttgttgctggagagccgttggaagattgcttggttctgatggtggaagaccggacgactaaagaagcaacacttctaggacatgccatgatcccagtgagctccatcgagcagcgaattgatgagcgttttgtgccgtcgaaatggcacactctggaaggagaaggtggaggtggaggtggaggaggaggacctggaggtggtggtggtggtggaccttattgtggaaggattagccttagactttgtctcgaaggtgggtatcatgtgcttgaagaggcggcgcatgtatgcagcgatttccgtccgacggctaagcagctatggaaaccgccgattggaatacttgagttggggattcttggagctcgtgggttgttgccgatgaaggcgaaaaacggagggaaaggttccactgatgcttattgtgttgctaagtacgggaagaaatgggtcaggactcgaaccataacagacagttttgacccgaggtggcacgagcagtatacgtggcaggtttatgatccttgcaccgtgctaactgttggagtcttcgacaattggaggatgttctctgacgcctccgatgatagacctgacacacggattgggaagatacggatccgggtgtcgacgttagagagcaacaaagtgtacaccaattcatatcctctgttggttttgttacctagcggtatgaaaaaaatgggtgaaattgaagtggcagtccggtttgcatgcccgtctctgctgcctgatgtttgtgcagcttatggacagccgcttctgcctcggatgcactacataaggcctctaggtgtagcacaacaagatgcattaagaggggccgccacgaaaatggtagcagcttggctggctcgagcagaaccaccattgggaccagaggtagttcgatatatgttagatgcagattcgcatgcatggagcatgaggaaaagcaaagcgaattggtacagaattgttggtgttttagcttgggcagtgggtttagctaagtggttggataatatcaggcggtggaggaatccagtgacgacggtgctagtccatattctatatctggttcttgtttggtaccctgatttggtagtcccgactgcattcttgtacgtggtgatgatcggagtttggtactaccggtttagacccaagataccggctggtatggatatccgcttatcacaagctgaaaccgtcgatcctgatgagctagatgaagaattc

SEQ ID NO: 1251 - DNA, 97263 bp, Arabidopsis thaliana
gaattccgctgtgatggaaaatgttggcaagtttgatggcacggaggatggtttgcaagtgactctattggaagtgcatcatgtgggtcgggttaggtatatattggcgacagatcttagcggaaagcttacggttttcactgagaacagaacggtttatggctctgttagcccaacgagtagaccgcttgtgttcttgaagcagaggcttttgtttctcactgagactggtgctggttcattggacttaagaagcatgaagatcagggaatctgagtgtgaaggtcttaaccattctctagcaagaagttatgtttttgatgcgtccgaacgggctaaagcttatggattcacatccgaaggcgaaatcattcacgtgttgcttctcggagacattatgaacttcaaatgtagagtgagatcaaagaagaaggtacaaatggaggagcctgtagcgttacaagccatcaaaggctatctacttatagtcaaccaagagaaagtctttgtatacaatgtatcgactcaacactacgtccgaaccacgggtcctcggcttctttttccggctgcattagaagatatcaggtcaacgttcttgagccatcgagaatcaactaaaaccacagatcaccagaagctagaaaaggtaactcctttaatagcaagcgaccgcgaaaagctgcttgtgatgggtttaggagacggatacgtagctacatacaaatcaaagcttccaatctccaaagcagaattcaacacaatgctttggagcagtcctgtcttcttcttcatacttttcttattcggcgcttggcattttttctctaagaagaaagaatctctcacagcttggggacctgacgatcctttctcctccacgacaatgtcttcttcttctacaacaactgcacaaaatagttccgcattctctgaatcaactaggagaaacgacgaccacatggatcttcggagaagatacgtttcgccatctcggtatcctcctggagcagcaacaggtgcttaccgttcagtagggtctaacgacccgagctcaagagctccagtggaaactactaactacagaacaaccgcacaggagatgaagtatcgtggtgggtcaggtcttgattctggcggatttggtaaaagaagagagagtttgtttggtaataacaaagctttagacgacgaaagttagttcctttttttttcatagttcgttatgttctttttttaccggtcaacgcttgaaaattttctaatgtgtaaaactccggcgaagaaataaaatttttaccggttgctttgtttcttctccggtcacttattgttagtttaatgcttcttaactgtaattttcacaatctcaagattaagaacagattaaaaaaaattcaagatcaaataaatgaaactgaaccagagagagacttgaggttaacacgtcaagatatggcagtgttcttcatcttggtcttggtctttttcttccttgtcttcagattcatctacagtaatatatgggttccgtggagaatccaatctcacttcaagaagcagagcgtgacgggtcctagttaccggatattcagtggaaactccggcgaggttagccggctaacggcggaggcgaagtcaaagccgattccttccgggagaaatcctcatgagttcgtccaccgtgtggcgcctcactaccacgaatggtcacgtgtctacgggaagacgttcctctactggttcgggtcgaaacctgtggtggctacgtcggatccaagactaatccgggaagctttgacgacgggtgggtcgtttgaccgaattgggcataaccctttgtctaagctgctttatgctcaaggtcttcctggtcttagaggtgatcaatgggctttccatagaagaatcgccaaacaagcttttacaatggagaaactcaaggtaacactaacacacatcaatgtagaagctaagatctgtaattcagacaacattgtgctatttggaatctcagtctagtttagtttaaaaattaccaaatccggagtgctttataggattgtggctaaagctaagatctttttttcttttatagaggtgggtgccacaaatggtaacaagtactatgatgttgatggagaagtgggaagatatgagaaacggaggagaagagattgagttagaggtacacaaagagatgcacaatttgtctgcagaaatgttatcaagaacagcttttgggaacagcgtggaagaagggaaaggaatctttgaattgcaggagcgtatgatgcgtcttttttatctggttcgatggagcgtttatatcccaggattcaggtaagtcttatgggaaattttcctagttttgagaacaagtttggaactagaaccttattgctcactttttgagttttgaatggtggttttagattctttccttcgaagacgaatagagagatatggagaattgagaagcaaatccgtgtttctatcttgaaactgatcgaaaacaataaaacagctgttgagaaatcaggaactctgcttcaggcttttatgtctccttacacaaatcagaatggtcaagaagagaagcttgggatagaagaagttacagatgaatgcaaaacgttctactttgcagctaaggaaacaactgctaaccttatgacgtttgttttagtcctcttagctatgaaccaagaatggcaaaacattgctcgggaagaagtcatatgcgttctcggacaaaccgggcttcctactctagacatcttacaagacctcaagactgtaagtcctcaagccccactcaaaaatggtttcaggaaacactgtttcttagcaatttcttgtttttgttaacagctaagtatgataatcaatgagactctccggctctaccctccagcaatgacattaaaccgtgacactcttaaaagagctaagctaggagaccttgacatccctgcaggaactcaactctatttatcagtagtcgcgatgcaccacgataaagaaacatggggagacgacgcagaggagtttaatccgcgtaggtttgaagatcctaagaaacaatcagctctgcttgtaccgtttgggttagggcctaggacttgtgtgggacagaatcttgctgtgaatgaggctaaaactgttctggctacgatcttgaagtattacagtttcaggttgtctccaagttatgctcatgctcctgttttatttgtgacgttgcagcctcaaaatggtgctcatcttctctttactaggatatcaagttaaaaaataccaagattggctggtattatggtttccggttttctccggttttaatgtaattcggttcggtatttgaatgaaaaggctaaaatggtcaaagcaaacaattatttttatattatcaaaccctgttatcttcttcctccactctctcagctctcatgagtctgcaactcctaaatcactgattttgtgttcatatattgggcgggaaacaaactgattcatttccccctttaattcccttttcttgttcttgtaatctgagatatactgtaattggaaaaagtcggataggaaagataagcatcaacggaaatacgcgctcaaggtgttcgacgaaattccgcacagagacaataactctataagagatgccactagaaccgattcgattcttgagaaccaccgcaggcgttgctgttggtgggtttgtgataataaccgcggtttcttcagcagctttaggagcatttcgatatacaattgaagagaaacggaagaaaagcggaatggcttgtagagtgtgtcgtggaaaagggttttacatatgcaaattatgcaaaggaaacgcaacgattaaatggtcaccattgtatgatcccgtttgtatcaatccatgtctttgccctacttgcgatggtcacaggttttttttcctccttttaactcttaatcagagaacaaaactctgagaagacatttggatatggtatctaataattttcttttagactaaaatttggaaactttgttttaacattgcagggtacaaaaatgtctcaactgcttaggaaaggagtactggtagactccttaggtttatgatttgatcatctttatgcttctgagaactcgaaaacggtttggtttttgtatacagcttttactaatattaaaccctagaataagctcttttattcctttataaatttcctatttttataaaggggacacctaaaatatctcataaatgtttgggaaacgttctccatcacgttttttgcttgccgtccctctgtttcatgaaacgtttagaggatgtttccctgttgtccccgtgaagtaccagcccccatcacgtttcaggtacgtgagacgcgtgcatcataggttaatagtgttgaatggtgtggatttgaggggaatataataaataatcggtcctgctttgtaataaatatggttgtgctgagttcggtaattctgcctaaacctctctacctagttagatgttattgttaatatggcctttgaccaagaacaacttcagccgtgttaaaaaacattgaaaccaaaatcaatggttatataagattaacttgcactactaggatttgatcacagaagaaagaaaggggtttattaatttggttactgtatcttactctttttactttcggataacttcaattggcaatggcggttcgtaaagagaaagtccaaccattccgcgaatgtggaattgcgatcgccgtcctggttggaatctttatcgggtgcgtctgcactattttgatacccaatgatttcgtcaacttcagatcatcaaaggtaaacttagttcttatactctaatcatgtacagtcggtttgttttttgaaattctgtggtctagagctctagagttgtgttctgaattataagatgtcctctggaagctagccattatggcatttgagttgatttataatgctggacatggtgttgttctctttgttgtagattatatatgtcaaaatgttgatgaatgaagtttgaatactatagtaaattttagaaccaaatttggcgggagatggattttagaatttaagtctcttactgagttcgtttgttttgaggttcataatttttgagtaagaaacactacatgtttaatcatcatcatcgtggatcttactcaagactgataatttggacatcaaaaccaaagtttaaatggtgaacttcatcctttctctgtttatctttttcaggttgcatcggcttcatgtgaatcgcctgaacgggtcaagatgttcaaagcagaattcgcaatcatctccgaaaagaatggcgagttaaggaagcaggtcagtgacctaacagaaaaggtacggttggcggaacaaaaagaagtgatcaaggcagggccttttggcactgtcacgggtctgcaaactaatccaactgtggctcccgacgagtctgctaaccccagattagctaagcttttagagaaagtagctgtcaataaagagatcattgtagttcttgcaaataacaatgtgaaaccaatgttggaggtgcagattgctagcgtaaagagagtgggtattcaaaactacttggtcgtcccgttggatgattccttagaaagcttttgtaaatcgaatgaagtcgcatattacaagagagatccagataacgcgatagatgtggttgggaaaagcagaaggagttctgatgtatctggactgaaattccgcgtcttaagggagttcttgcagcttggttatggtgttcttctatcggatgtggacattgtattcttgcagaacccttttggtcatctgtacagagactctgatgtggagtccatgagcgatggtcatgacaataacacagcttatggcttcaacgatgtgtttgatgacccaaccatgacacggtctcggactgtctacacaaacaggatatgggttttcaattcagggtttttctatctaagaccaactcttccttcaatcgagctactagatcgggtgacagatacactctctaagtcggggggatgggaccaagcagttttcaatcagcacctcttttacccttcgcatcctggatacactggcttatacgcttccaagagagtcatggatgtgtacgagttcatgaacagtagggtcctcttcaaaacggtgagaaaggatgaggaaatgaagaagctgaagccggtgattattcatatgaattaccattcagataaactcgaaagaatgcaagctgcagtggagttctacgttaatggcaagcaagatgcgcttgataggttccgtgatggttcatagaggagtatatgcttgttaagcaagatatcgaaagaaccaaacttcttcttcttctgatgtttaggttattaaaccgcttttttgttttgtcaaacttggaagttggttgaggaaaattggaaccatttcttttcgtttcgatcgaaaaattaaacaacttctctctttctctgtcagtatgttatgggcttgatcacagaagacgaaagtgttcactaataagatgatgtttgttatttaagtttgaatactatagccgaatctagaaatacttggcgggagatggaattgattggggcgaacaagcacattatatttttaagggtttccttcgacttctcttttatattttagggctaaacgaaagctctgattccttaaggccgtcagccaccgccgaagaggagcttcgttggtctcttaagaaagaaaagaaggggagaatatggcttatcaagaagcaatgaagcccaatcccacgaaggctggtttggaagaagtgatggcatctctgacatcagttcgatacttgtaaaaagtgtgaagctatccaaatccattacaaaactgtttcattacggcgatttttggagatagcttttctcgttttttgcatgttgatctgactgatctcagatatctcatcggaaccgtagtaaatacatcatcatctacttgcaagaagtgcatttatcctgtttgtatgaatccatgtctttcccctacttgtgatggtgtctagctcaacttaattactctttagccttaataatgaacagtcttatcgatcctgcttaattaaatattgaatggaagtttggtttgtggtaggttcggcaaattttgcctaactagtacataaatgattgatcaagtccactctttatagactgtagtatataaattattataattttgttaaccttgtaacatgattttaaaaattagaacccacttatttatttctctatcaggatggtatgttaatagaatgaactatagaacagatcaacagacagtaaatgaaacttaaagaaaaaaatacaaatggctcatataaaatgaacttgcagaaatacagtttgatcacagaataagagagggtttatcaatttggcttctgcgtcatttcggcaatggcgggtcgcagagacaggatccaacagctccgtggatctcgaattgcgattgccatctttgtcggaattcttatcggctgtgtctgttccgtcttgttcccgaacggcttctttaactcgggatcatccttgattgctaacgaagaacgcatttcgaaatcaacctctacggtactgagagagatcttatgctttaaacatctacaaattcctttttttagaaatttttctgtaatctcgagctctcgatttgtgattagaattagtgtttgttggaatttgagaatttgagtctcttgcgtttgttatgaagattcaaaatcttcatggatttttgagtagaactacaaattgcatgtcttgaacatttgagtttaactggtgaagtttcattttttttctctgttttttgaattgttcaggatggattggcttcatgtgaatcatctgaacgagtcaaaatgctcaaatcagacttttcaattatctcggtaaagaacgcagagttaaggaagcaggtaagagaactaacggagaaggtacggttggcggaacaggaaacagagaatgcaaggaaacaagtcttagttttgggatcagagataaaggcagggccttttggtactgtcaagagtctgagaactaatccaactgttgttcctgatgagtctgttaacccgagattagctaagcttttagagaaagtagctgtcaataaagagatcattgtggttcttgcaaattcaaatgtgaaaccaatgttggagttgcagattgctagtgtaaagagagttggtattcaaaactacctcattgtcgcgttggatgattccatggaaagtttctgcgaatcgaaggaggttgtgttttacaagcgagatccagataaagcagtggacatggttggaaaaagcggaggtaatcacgctgtttccggactgaagttccgcgtcttaagagagttcttgcagcttggttacagtgttcttctatcggatgtggacattgtcttcttgcagaatccttttagtcatttacacagagactctgatgttgagtcaatgagtgatggtcacgacaataacacggcttatggcttcaacgatgtgtttgatgaaccatcaatgggatgggctaggtatgcacacacaatgaggatatgggttttcaattcagggtttttctatctaagaccaactattccttcaatagacctactcgatcgtgtggcagatacactctctaagtcagaggcatgggaccaagcggttttcaacgagcaactcttttacccttcgcatccagggtacactggcttacacgcttccaagagagtcatggatatgtacgagttcatgaacagtaaggtactcttcaaaacagtgagaaagaatcaagaactgaagaagttgaagccagtgattgtgcatctcaattaccatccagataaactcgaacgaatgcacgctgtggtagagttctacgttaatggcaaacaagatgcgttggatagctttcccgatggttcagattgataaaagagatggatgcttgttaagcaagatatcgaaaaacccaatcatcttcttcttcctcgagttaagaaaaaaggtaggctaagtttcatcttcccacatctgttgttataatcagttatccttttaggttcctagttcttcttctctactaagaatcttgtgtagcctatagctgaaaaactcaagagtcttattaacaatactgtattgttgaccacagtttcttatttagtcagaaaagtctctctttttttaactatgcattatttcctgaccacaaaaaaaaattatgagagagacaacaaacgagagattaggcaagaaagagagatatggaagaacaaggaagacaaagagagtgtaagagttttggatgtatgtgggttttatccacaaacaagactctttaagattcttctctctgtaatgaccggaaaatcccatttttttgtggtttcaaatcaaatggaaccccactcttacctctgtctttgtctttttcttaaagccttttgtttcagcctctgtatgtatctccctctccggagcaattgcaaattctgtgtctttgtgctatgcagacattaccaagctcagaaaccgttcttttaggctccaactcagcaccacctgtgttgcgtagtcccggtggcgatgacgtggacatcgattttggtgacgtgtttggtggtcctcctaagagacgctctaaagttactagtaacgaagtcacacgacatagcttcagtgaatccgctctccggcgtcgtgacgtcatcgtcgacgtcggcgatctgcttccgcaagacgagaagcctgtattcggcgaagatacatcatctgtccggcgtcgtttcaccactgatgatttcttcgacgatattttcagagttaatgaatcatcatcacttccgggttctcggatccttagcccggctcacaaacccgaatcttcttcagggacttcgtctccatcccaattcaggtctgttttctttgaactaatttaaacgaagagataagtttcgttgctaatttgtataattgttgactttgttactcagtcttcctgcaaaagcaacagagattccaacatttaatttagcagctactcgtagtttgaacaagaacaaagaaactgtttcgagctctcctttgtcaagaacttcaagcaaagcagatgtggtctctactgctaaatcatattcagatgattgtgatgatcctccacaagtttttgttactgggaaaggaaggcaatttcatttctctatctacaagtggcctaataaaggagttcctgttgttatttggggaagctctagattgagttctatgtctaaagctgaggagacaacacctgtaccattgagtgattatcgaaaaacttcagttgttgagaaattgggtaaaaatgaagaaggagatggaaaaagtggtttatctggtttgaaagatgtgaagaagacctcgctaaagcgtcctggtgtccagacaaaagaagagaaaacagaaacagatttgaagtctgaacaagccttctttggtgtctcaaaagcacgtgaggctaatgtgaagcctcttgattcagttgagtctgaacaggccttctctggtgtgtcaaaagcacatgaagctactactgtgaagcctcttcattcaatttttcatgaagaagatgagagacaaggttggtttctgcagacatgtatatttgttacatttggttgggttaacttccttttgttgactgtgcatttggttctttgtcattgcagatgagaaaatagtatcagagagagaagtgagaaaaggtaaaagcaaagcgaagaacactcgaagttttaccgaagattcaagaaccaagaagaaatcacaaggcactaaaagttctttggatagtagcccgatacccgataaatccagcttcgcaagttcatcagcagcaccagaagttggcaaagatggagtcaaaggaaaagtgagtgacttcgttaagattttcagtaaaggagcttcagttggagcaggtggggaatctcttggacaaagctctagatggagagctaaagaaactcccaagactgatatcattcatgatggttctaatgccaaggaaactgtaaacattcctgatcaacaaaagaaatcgactccagatatccccgctatggtacttaatcagaaaatcaagatcctacttgctatatgttccttggtttgtgattccttacctgtaaatatcgttgcagaatcgggatcagaaaccttcacagtcaactcagaaaaaagattcagaccgggagagcatgaactataaggctcctggtgatactgtacaagaagagagacaagaacctagcacaagtaagttctttgattgtttttaaatcttgttattactacacaactaaataacatcttttttcttttctttctatcagcacatactacctcagaggatatagatgagcccttccatgtaaatttcgatgtaatttaacgcgcccttccacctttcagtttttcaatctaaaaatgtgtatgtttctatttataattgacatggaacttgtaatgtgttgtgcaggtggaggatataacacaagatgaaaacaaaatggaagaggccaataaggatgctgaagaaatcaaggtaatactactgcaactgcaaagatatgtatattttcgattcttttacctgaaaataacctcaaaactaaaagaaaacggaatccgaacctctgcagaacatcgatgctaaaatccgcaagtggtcaagcggaaagagtggaaacattcggtctcttctatccacgctgcaatatgtaagtattcttgttgatgtataacacataacattgttggaaactatgcatcagtgcataagtgatgaattttgaagttttattttaaagattctttggtctgggagcgggtggaagccggttcctctaatggatatgatcgaaggaaacgcggttcgaaaatcgtaccagagggcattactaatacttcatccagacaaactacaacaaaagggtgcttctgcaaaccagaaatacatggccgagaaagttttcgaattattacaggttcttattgttactataaacattggtttatgacaatttaaaaacattgcaggatctttaaaatcttaagtccttttttttgtttggtccaatcatttaggaagcatgggaccacttcaacactctcggaccggtttaaaggaagaaaacgagtctttagtcttttagttctttacacaaaggctatgtacagatacggttctgaatcaaaagatgttgcagaattttagttgtcacaggtatacttacatcaaatttttgttggtttgttgagacttgcatcaatctaaagggatcattaagtacgtacggagagagatgtgggtgttgtagttatggccatataattgattgggctaaaagcccattaaaagagggtttagtggttagccgttagaaattaaagaaaaggcaagccaggtgagtttgtggagttggtgttgtgttggcttttacgattctttttcttaacggtaagctactttcttaacttatacttaaagcttttgttttcccaattttacccttcactcgtgttccaacacccacatacacttcaccaaattagactctgactctcagcccacctctcaacctttatgccctccgtaaaattacaactatttttttacatagatacaaatgacacaagtgtatcagaattggaacttttaccggtttggcctacaatttgtttgatcggttagctttaattatctaatggctagaaggatcatcggttcgatttgcatatcaagaatcctactgttgagatatcagataagatagaacataaaacaatctactagttatttgccaattgatgaatttttaatttagaatgaaacaaataatgaatggaatgtaatgggtaaaaattctggttttctagttccaatgcttgagtagttataaaaccaataaataacataaaaaaaaaagaggtcaaataatcttggttgatttacaatcattgtacttgcccctcttcgagaagccaaaagctgtgattgagcacgagctactgaagcagttaattcgaggttgaagtaaataaatgtacagttgtttcatcaattttactgtatatggactggtcacaaagtcataaagcatgcggggactttgggtgcattctccaaaacattctttagagtttaacctaatgtagttttttcgtcaagtttttactgtatatagttcaaagtcataaagcatagtaggactttttgatgcattctccaaaacacctatttttaattattgaacgaaaattaattaaccataagttagaaaataatgcaggcggcaaacttttaatccggaattaaatgacaaaagcgtaatttgcacgacatgtaataaaccatttggtgtcctttttctgaaaccaacaaggattaaacagaaaattaaccgacacgtaagcaataatcaccggctatgaccggtttacatgctttctttatctgttaccgttctacagtttttaaaaaccttcgttaagctctttcatactctgttccatctctctctctctttctcactgatctcatttcattccttatctttccaattttaccctcacgttaccttcgaattctccatctcctaccattcaaagcttctctcagatgtctatagtctctaagcttcgttctccggttaaaccaatagatgagtcacgagctatcctctgttcgaccgggaacagatttaaggttacgaaaacagaaatgacgaagaagccacaactgaatccacgagtgacgaaatctccggcgacgaagaagcccgattccaatttctcagtttcgactgatgattcctcttcttcttcttcatcctcggaacgttcgtcagtgaacacgacaaactctgggaaagtaaccactccgtcgaaacggaacggagttgagaagctcaataatgtcgttgcctccgtcgccgtcgttgaagacattagtcctaaaattccgggaccggtcaagagatgccactggatcacacctaattcaggtctctttgtctgacacctttttttttccctctttgcctcatttaactttaatttaaattcacattttttctctcatttatttagagaaaattctgttttttacctctgaatttcgtgaataacgaggaagtatataatccatctgttactttttgtttgatcttttagaaaatacacaaatattaagaaaacataataaatgttgcatttaaatgtattattttttgtgatttacaattttcaataactttaaaccaatgatattcactaatttgtgttgaagtttacaatttatcaattataactaataactattgtattgaaaatctaaaaaattaatctttttgaaacaatttttttttctaaacaatcaaacaaaaaggaacgagggagtatatttttaaagaataaaacaaaatattagtttttaggttttattgttaggaataaaatgttttacactatgtagagacttgttgtccttgtcacaacatttaatgaatctgcaaagaattaaaagatacttaccaaatttcttcgtttttggccccaataaaatatctcaatcgactttataaattgatgccatgtgaatggctttttatggttttcgaaatgtaattttgttttgataatacgttaaagttaataaaggttacaatcagttttcatagatgtcaacaacacattaattgcacctagcaaaaactaggtattgtagttgataaataaggacaaaaaaaaatgtagaagatgattgatgacattggatatgtaagtttttcagttaataataataatggtgattgatcaaacagacccgatctatgttttgttccacgacgaggaatggggtgttccagttcgtgatgacaagaaactcttcgagctacttgtcttctcacaagctttggctgagtttagctggccttcaatcctacgcagaagagacgactttaggtaaacttaggacggtgaatttgctattttgtgttttggtttggtgtgatatcagaagttttggtttcttttttgtaggaagctctttgaagagtttgatccttcagctatagcacaattcacagagaagaggttgatgtctcttagagttaatgggtgtctaattctatccgaacagaaactgcgagcaattgtagagaacgcgaaatctgttctcaaggtaggcactgtgtgttttgctatgaaattgtagatactatgtgtttactgaaatagctttggttgtaatctgaaaacaggtcaagcaggaatttggatcgttcagtaattattgttggagatttgtgaaccacaagccattaagaaatggctatcgatatggtcgtcaagtaccggttaagtccccaaaggcagagtacattagcaaagatatgatgcagagagggtttcgctgcgttggtcctactgttatgtattccttcttgcaggcctctggcattgttaatgatcatctcacagcttgtttcagataccaagaatgtaatgttgagactgagagagaaacaaaaagccatgagactgaaaccaaactggatctgcattctccattacttgtttgatcagaaacagggattggactattaagaagatgagtgaccagtgtttgtattcgttatggaatgtaccatttgtagctagctgtgttcattgattatgctactatcctagctagctttgtctaactagatatttgatgatgtgttagtgtttgaccaaaagattgattgcagggaaataaagaatttaacattttgtaaaagcaaatgtttttgcaaattttggatcttgatgctaagagacagaatcggctcaagaaatgatatatgactaagcaatttgacaagacacaagacagtttcaagccactaattaatgtaacatatgtaaggaaacagaatcatacatcttaagatttttttatctacaaataatgcttttgaaaccaaattcatgaattgaataaccactctaacactccaatgcttccatggagaaggctttgggcagcatatttggataataagtgaagaacatatgagattccataaagatccaaatacctggacgaagaagaaaatactcaagaggattagtttctcatattccaatgacatgccatttgggtttgcctagttgtttatgtcaaccacgagccttcccatttccaagtgtaagctcaagatcctccatacccacatcatgtatcctctctccttcccagggtttaacttggctattctcaaatttaaactcagagctttgaccaatctcttggaaggcagcagtatttggagacatctgctgaggcgcaggtttcacaagattgaaggtaggagaggttggcaccatagaggcagagaatggctgttgttgtgcaaacttctgaaagcttatccaatgaccagaatcaacagtggaagagtcagactcatcacattcaggtatagtagccggggtatgaaactggtggcgatgtgtcggactagcaggtgcagaaaccgcatagaaaggataattaaaagacgccattgattgtttagcaatggccatggattgcttagcgatagattcccagttaggcaacggtttcgggttcttagaagtcggcgatgagaccggtggggtaactggacaactgtttgagattctgagggaaggaagagaagaaggaatgccaccatttctgaggaaagggaagaatgtagaggacatgttgttatttggttcaccgcgagaaggactcgggaatgatgaagaagacgggctaacttggtaagatgggatgggactttgaaaggctgatgaaagagggctctggttctgtgatgaatatggagttactcgagatgaagtcccagctatctcaccaggtaaaggcttgcatccctgatactccaacaaaagcaaaacaataaccaatcaaacatcaatcaatcacaggtaagcaaaagaaacacaatgcaatgactttggaccaagtatcatacataaaagattaagactttagcataccaataataactctaaaattagaaagaaaacccataaattcactttgagaaatcagatccatccatagtttctgatgattcaaattcactttgagaaaaccctcaaattctcagattcaaacccatttaaccacaattgaaatcaacgaattcagattcaaacatcaaaaacatcaataaaacaagctcagatctggaaaaaatggagaaagtcttcaccttgcgataagtagtaccatcttcttcaacaacccaaccagcttcaacacaaagagctttaaggacttcattattatcacaatgtttaggcaaattataatcaccttgagctctaagcccagtgtatatcttcgcagctacagctcttctccgtctttctctcctccgattattctccctttctctccacgacggcttcctcctcgccgctgctgccgccgccgcagctgcagctgctgatgtcgacgtagctccatccgaagtcatcgggaaaaccaacaaccaacccctcgaaacttccggagagagctttgaataggtgggtgaaagattgtgtgaacgtagactgatgaagaagaagaagagaggagtgagaagttagtgctcacgaggaatacgcttttccttcgctggaatcgaagaagaagaatctctctttcttctccaacaaataataatatttttttcatctaatgtaaaaattgggtcgtgtgtgtgttcaagtacattgagttcatattaagaatcattgttcttgtgtatcgatcgtccacgtgtaaatacatggttttggaagggtgagattacgtgaggtgaatataagaggtgtatgttaaggtgcagaggataactacgcttagtaacgtgtgtttatgttctaatctttttttttttctgtgagtatgtaaaatgagtaatgaccaaataatacagagaaaagaaaggaggagacacagtgggaccgtttcttcagtgtgggtcccttacttgtgtgaccgaaaaacacaccatttgattggtttttaaaattttattttatacagtgaagccgtgtgattaacatcataatgatatattcaattaaaaattatcacttttttcttgcatacaaatctcactttagaaacaattttgactacttttgtcctgattagttgtatgtacactggctctctcttttttttaccttcttcgtaccttacaaatgatataaagattggtgaataccatttactatgttctataaagtatttagtttggttacatgttgattttaagctttagtatctaatatccaaattttggattaattgctgggtccatcattatttatgtattcataaccaaaacttgtatagttcattgaacataaaaggaaaaaggggtttacgagtttgtcccataacaaggttcggcggcatatatgatgtatgatcatgtaatatttttggattatgacgtttattttgtagaaagtgcaggagcatgtaactaatgtcttaaaagcagaggaacccgaaccatcaacgcgagttgggaaacatttggaatgaatcagagggttcgatgaattaggcaaaactaaagtaatcgccgttgccggggatcgaacccgggtcacccgcgtgacaggcgggaatacttaccactatactacaacgactttgttgctaatcgagcgattatgtgttaattattggtgatacgttttaaatcatcagttaaatcttaataccagctttcgtttctagcattaaaaggaatttaggggttttcttctttggtttggcactagtaacctacttgtgataataagtagattatgtgttaagtatgttttttttggaaatatgttctgtttttccgattaactccatgttacctagctaactcgttttggacaataagtacattactttaaaccatcaaacttacaaaatgctatgtcttgaacaagaaaaaatgttggcttaagaatcactccatgaacattgttttagtttagttaaatgttcaatatggacattatacgatgacatatttaatagaggcgtgatttcaaattcaaattacattggagaggaacgaaaacaaataaacaataggggtataatcgtaacttacgcatgcatgggccccataactcctgactttttttttattttgaaaaaacccagtcaaccattcatattcacgtcgatcgcgtgtagacattacacaaaatttacgaagtgtggccctcgttttccttttttgatcattttaaaaccctctaaaagcatcaatctcagattccaatacaaattagtacccaaaatgtttcatacaaattaaccaaacgtatccactcctttcttttttgtttcaatttcgtttttacaaaatctaaatcttcacaaccaagacaagacaagtaatacagtgaataaagagtaaaaagtaatacaagttttccaacaaatgaattcatctttattagagagtaaaaagtaaaaaagctctcggtaaaaaacaaaaaaaggttttggtacccatccatgaaaaaaccgctcaatttccacagtgcaaatgatacaagtacaaaacacacgtgttgataccttattggtcacgataggaaggcggtcgctatcgcctatcgtcccttcccttccctcctctgtatctctatctttctctctcttactcatcataatacactctgctttttcctctttcttctctcactcttactctgtctttcttcatcagaccaaaaacaaaccctaatttctcagctcgatttctctcttactccatttctcaatccttcacaaaatgcaccaacttccatttccgagatcgtaaaaaagcttgtggtactttctgataatagagagggaaaaaacgagagagagagaaaacacaaaatgctggaagctccggtgaacaagtcaagcatcctcaatggaggaggaggaggattctctcagctacagagttgcttcggcgattgcagtagcgaagaagaattgtcagtgttgccacgtcataccaaagttgtcgttactggaaacaaccgtaccaaatctgttctcgtcggtcttcaaggcgtcgttaagaaagccgtcggactcggtggttggcattggctggtgagcaaagatcaacttcgctttcttctttacctcgttttgtcttttttgcatctttgtgtctgtctgtgtttttattcccccagtagagtagatttttaaaaactgattaacaaaagatccagaatcattagctcaataatgcaataaaatcaatggttgttctatgttaccgattagattgattgttcttaaaatatcataactttattttgttaaattgcatcataacgatctgcactttttatatttatttttaacttttgtgttactttttctcaatcaattccttgagaatccttatctttgtgggttcaagctggcttttagatttgttttacttgtagtcactaattttgatatactttaattaataatatttagggtttttgttctttctttttcagattggtcattttcatccactgaaaaatgttaaactttttatagatgttctccgtttcattaggcttcctagtttttatattatcaattttactttctttgatccttttttgatcatttctctagctatacaataaaaatcagtatcttatacgatttcctcataacccaaagcatcatttttttttttactaatatcgatatcaaattccaccacttcttgtctccaaccattcccatttctcaaaaagtcccaaactttactttgtttgtggagttcaatttttaatctttgtcctttttgctttaaattttcaggttttgactaatggaattgaagtgaagttgcagaggaatgcgcttagtgttcttgaacatcctacagggaacgaagaagacaatgatcttgaagtcgaccattctacacagtggaatcatccctccgatatgagtaagtttggttccttgtctctgcaataaagtaccaaattttagtctttttgaaatgtttcataaagaccgttctttgattgtcttttgcagcaactgaggacactttgaagcctcataagtcgaagaagagaggacacagatcatcgcggttatctcaaaaggctttgtacagggaagtttcttgtgactcacactcaaaaatctcgagtattactcctcgtctgaacatggtaaggcctcaaatttcttctacttggtgggggttttcatgttaatgctatgtgttactgatttgggaatattgttttaacgcagaaggttgatcttaccaagttggatatggctgcattactgagatattggcgacattttaacctcgtgagttcaaaagaaacaatcttatgttactgattattgtggaagagagtgttttgttttttacaacaggtgattcattgatctctttttcgtataggtggatgctcttccgaatcccacaaaggagcaactaattgacattattcagagacacttcatgtctcaggtagacatcaaagctatgatatgtttgtgaatgttgtcttctgattttggattagtctgagacatgttcttgtttacagcaaatggatgagcttcaggttattgtgggattcgttcaggctgcaacaggaatgaagaaggcttgccaagtggaagaccaaagaagccagaaacactgatccttaactgcatcagctaaatctcctttaatagactaacaaatatctgcgcgggtcacatgttttaatcattccgcggcttaaaaagtttgggtaaatagtttagctctctctcttttggtaaacactagtagttgttattgctctctcatgtaattaggtccatcaagaacaaaatgatatgaaacaaagaaaatctctaatgaagcctccatctttgtttttccagatctcaaataaaataggtaatgcaaaatcaatactttgtaaaatataaaacaagatacaaatcaaaacaacaatgccaatgaaatgaatgtaacaactgagtactagaaaaatctttaaaatggaaaaatatgaaccaaagtgctattaagcaaaagaaacgtgaaatctgaaccggagctcctgttttttagttccgggtggggcagaaagagatcaagtagttagagccggtacaagtgaaggtgctcgtggcgtcgtcgtaggcgtaactgtaagcaccagggcaagcgcttttaaacatcgccgagtaatgcgtcggagaacaagtttgcggcgtcgcgtgagcaccggtacaacagaactcctcagaattaaacgccgcacaagcgcttttacacgccgcgatgattcctgtatgtggatccatgagccgaagctcgttagggcaaaccgcgttgacgtcggcgacgcagccggcgtaatggcaatcaccggaacctccttgaggtttaatccccatctcgacattgtaaccgtcgacgagactcacgtcgtagaaatccttgccgccgtcgcctacaagtgtgaattcagccagagtgactggtggaactccgccgccgttacatttaagaacaccgccgcagtctccggtgccgcagttaccgtggccggaggcgtcgaagttgcagccggtacgagcccagaaccgtcctgaccatcctgcaggagccgtgagctgtacggaagcgcctggtgttaagggaaatccgccgtcgccgagggtgttgtcgttgccggagagaattccaggccaaacggtgtaaggacaactgttctgtaaagtgaagacggtggcggcggaaacagcaatgccgcctgcaatttcaaaacaaacaacaacaataaaaactgttaaatccgaagaaaaaacacgatatgttttggagaattatgttgtgatttgaagacgaatgaacataaaaaaatatagttttaagaaatagtatcgaaattattctcatttagaaacagataaaacagaggagaaacagaaacagaaacagagtgtgattgctctttacttgtgatgaagaccaagaagagaatgtgaatacttgagtaattcgccatctttgttttaacgagttttgtgtgtgtgtgttctgtgaatgatgatgatgatgatgatgatgatgatgaatgtcagttactcgcaccaatcctctatttataagtgcttttccgaggtagtgttatcatttttaattttggtaaatattttcagtttacagtaaaaatatactgtagttgtgcctattgttaacccatgttctttggctctgtgaagtttattggcagtaatggtatttattgcgttattttactaaagttttttaaaaagttgacggttaaaaggaaatatcgtgggtcatagttaatatttttctttttttaacagtaatggtgaaagagcatgcccaatagttaatatttttcttaacttaaaaaccaaaaaatcaaagagacgtgaagagatccccgcacgtgtactattttccagacgaacgtgtgaggttccgttaaaaaaaacaacccacaactatgatcctgcgcaagaacatcccacaatcgtgtgatggtcttccaatctcatgattccatcaattgtgtcttgtattttcctttattattttgttttggactttctattttcattatttttattccctggtagtttcttttagcattccttttttctttacaaaaatacgtttcatgtcgtctaatctctaaaatacgtttttgttttaatctctaaaacaaaaacaaacatgtcgtctaaaattcgtgtacaccattccacgaatgggttcagaaatagtacagaggggagactttgaaatttaaaaggtgagaagagtaccttaaacatagaatcaagtttcataaatttacttaactgtgtgtcggagtagtaaatggtttttattatttgtaaacggtcgtgacgattaatttccttgaacttttcattatcttagggccatttcattaatggctcgctcaatgttaactaatcagaattctatttgtttcttaaatcagagtttacatcgtccacacggttttaatctatatatgcggccatggttttatcaggtattaatagctgttaagttttcttttaagtgagttgatgaaaaatgtatctatagactttttctttggtaaagaacgttcaaaattccgtttcgaacagaaagatacatgatctctcacttacacagcatggaatgcaatagataagtatccgtagatcaatcattttgttttatttctttgtaaacaaatcagctgagtgtaacaactgactaatactcactaaaaaagcttaaaagtggaagacgatgattcatagtcatcagctttccttatttatctttccgtacataataagcaaaagaaacgtgagagataattaaacccgactgtatctaactcgaagcttcggtttttaagggcagaaagtgatttcgtagttagctccggtacaagtgaaggtgctcgtttcgtcgtcataagcgtagctataggcgtcagggcaagcgttcttgaaaatcctcgagtagtccgtgggaggacaagtttccggcttatcgttagctccacggcagcaatattgatccgtattaaacctctcacaggcactcttgcaggccacgacattgttctgatccatgaccttaagcatgtcggggcaagccgcgttgaggtcagagacacagcctgcgtatttgcaatctcccgatcctccggatggtcttatccccagcttgacattgtaaccatctacgaggctcacatcgtagaaatctttgccgccatcgcctactagagtgaattcagccagagtgacgggaggaactccgccgccgttacatcttagaccgccacagtctccggttacacatctaccgtttccggaggcgtcaaagttgcagcctgtacgagcccagaaccggcctgaccatcctgcaggagccgtgagctgtcgggaagcacctggagtcaattcaaatcctccatcgccgagcttgggtccttgaccggcgagagttccggcccagacggtggtagggcaattgttccttagagtgaagtctgtggccataacagcaatgccgcctgcagtttaaaaaaaaacaaaaacatcaaaaatacgaaacaattttgagaaataatggtgcaatatgttgtgatctaagatgatgaacaaaagaaaaagaaatcatcagaaaaggaaacttaagaaacagtattgaaagctattctccttaaaaacagacaaaacaggtgaagaatgtaataatgaaaggagaaagataagacatatataagtgaaacagagaagaaacagaaatagagtgtgtttgatgttgttacttgtgatgaacacgaggaagagaatgtgaatactggagatatttgccatatttttttatgggttttttgtgtgtgtctctgtgctgtgggtgatgatgatgaatgttaatggcaccgatcctctatttatagatgttggttcgaggggtagcgacgtaatgttgtcatgattaatcaattagaatttttggtgtcttgatagatatttcctttggttctctgaattttctttgcattactggtttttacttccattagtttactataaatggtaaaaaaaaaatcttaacattttgactcggccatggctgatgcacactacactaaaccttagggttcagtgtgatgttttatgtcatgtgatgtgtggtccgcgagtatgatatctgtatagatgaatttaattgtgatccgcgactatgagatccaattagatgtgtctaattgtgatccacgaattgaatatgagatccggatcggttagatattgtgttgtgaggtgcgagtttgagatccagatgaccagatagatgtgtttgttgactgttgtaacccatgagtatgattgtatgaaacccgaatagatcgatgctttttaatttggtgtgaatcctcgattataagaccggaacagatgcatacataagaggcctgatttgctacttgaacgcgaaagcttgaatcctaaggttttagatatcatatcctccatgaccatgaatgtgtagtttttaaaacagtaaacatctaaacaggtataaaatctggttataaacgaataggtaaattagaaatatttcgtacgttaaatggtatcgttatgtagttttgtcccgcattttaataatattgtaatcttttatggcttctagaagtctagaacatagttgaagaaaaatctgtatttaaaaaaaaatattttatgaaataaaataaaatcaagtgatatataaaacgatgaaacggagtgattagtgcagcgggagactttaaagattataaggtgagacgactgacttagacgtagaaactggttcataaattgaaccaactttgggtccgaggaaaagtaattgaatcttgccgtgactatgagggttgcttttgagtcctttcattaatgggtcaacgttgttaggcataaaacctgtcgtgtggctttgatcaacgacggctttttccagcaaaacttatatgtttttcgaaattggttttgtagtttatcgaaaacattgtattatatatgtcaaatctcgaaatataatatctgatatgaaaagggaaaactaatcagcaatcagcaaaagggtgatgggagctagaaagaattgtctctttatgagatgagattcaaagggcgtacagagaggaagaagatggacttttcttactaaacccttaaaccaagctaagtaatcctcctaattagtataagcagtggtgtggtaaaaaaacgtggctgctgaaatttccttgtactaatacatagcataggacctttctattctaaggggtaatgttaaaaatcttattagtcccactcatcagggttatatggtccacacggtttcgaagattttagaccgtagtggcaatagctaaaattagacattaatagttgtaagatttataatacagttgaagagtttattggttttgaatggatttgcacatgtctcttatatgttattttagctccgtccaagaacttttagagtgagattctaattctaatataatacacctccgagataaatatataatggttcttatgtctatctcgaaccaagttccactaagaccgacaatacaacctactttgaaccatctaacctgattcaataaacatttcatacatccatgcattgctaattagcaaaatgagggttactggtctatccatatttgcaagacaatgcccagtggtgtgaattatgagacattctctggtttacagaaaatggatgagcttcaggctattgtaggattcgtttaggctgccacaggaataaagaaagcttacaagtggaaaccaaaataagcaataaacactagtgatatattaactgcattagtacgatctccttaagaaattaacaagctgtcttgtagactttatcgaatctgtgcgcgggtcacatattttaaccattccgtggctgaaaatgtatttagctctgtctcttttgggtgaactaaaagtttttattgctctctcatgttagtaagtatatcaagaagaagagaaccaatgacctgaaacacacaattattaaccccctaatgaagcattcatctgtctttagtaatccagatattgatatgttagtctcaatatactattgtgctaatcaaagcaacattgcaaatttgcaaatgagatgggtgtgtgtgtgtgtaacaacagaacactggaaaaaatctttaaaaatggatcatagtcgcttttccttatcatatctttctttatttctctttccgtacataacaagcaaaagaaacgtgagagagagaaacccaacccaaatctaaaccggagctccggttttaagactgggtagggcagaaagtgatcaagtagttagatccggtacaagtgaaagtgctcgatgcgtcgtcgtaagcgtaactataagcgctaggacaagcgttcttaaacatggacgagtaatacgtcggagaacaagtttgcggcgtcgcgtgagcaccagtacagcaaaattccggcgaactaaacgccgcgcaagcgctcttacacgccgcgacacttcccgaattcggatccatgatcctaagctcgctagggcaaatctcgttgatgtccgagacgcagcctgcgtatttgcaatttccgaatcctccctgtggttttatccccatctttacattgtaaccgtcgacgaggctcacgtcgtagaaatccatgccggcattgcttgatcccacggtgaattccgctagagtcgctggaggaactccgccgccggtacattttaaaacgccgccgcagtctccggtgacgcaggtaccgtgaccggaggcgtcaaagttgcagccggtacgagcccagaaccggcctgaccaaccggtaggagccgtgagctgcacggaagcgcctggagttaagggaaatccgccgtcgccgagggtgatgctgttgccggagagagttcccggccaaacggtgtacgcacaactgttttgtaaagtgaatacggtggcggaatcagcaatgccacctgcaatttcaaaaacagttaaatacaaccaaaaaacctaaatgcataagtgaaacagagaagaaacaaaaacagagtgtgctttgttgttggttacttgtgatgaagacgaagaagagaatgtgaatactggagattttcgccattattaaaaaccggattttgtgtttatgtgatgtggatgatgatgaatctctggcaccgattctctatttataagtgctggagactcagaggtttaaagttagggttatcaacttcaattaattataattttctgtgcctactctgttagcccattttctttgtcagtgtaacatttatttgccttgatgattttttttttcttgcgttaataaaaagaagattatgtctcatagttatcgattacaattgtacatgtgtctttgtgtggttagatatagaattacaattctacatgagcttgtattgtcctaagagaaatgtatcaatagacattgttttgttttgtgcctctcaaatctttcccaaccaaaaaagtaaagaaagttcatgaaagttggtttagtcaaaactaacctgagctcatctgcacctactcatataaagagataagatgacacgtggacaagttatagatatgcatataaagaaaacaggagatgctatgctctacctgaaaaagatgatccaatgtatcagtgaaagggtgctgagcaacggccttcttactctctttttcatcacctgcaaaaagaaggtaacattcttttgggacaaagtgggttctactatgctttgtcgatcaccgacaaagttttgctcagatggaaacttcctttacttgactgattcagaagtaagaacaccttttgacaagatggtttagtgacctgttgttgtttctaactcaataaacacaagagttctacagttccaacatatcaacttttccttccaaattctgtttgctccgtgacagttttgaatgaaaagtgctaacagtggcacttgcaagactcaaacaatttgacataaccaaaatgtgactaaagactacacaaactatctatgtgagtttcaactttcaagagaacaacatggaatacaattttaactaactgaagatcaaagaacttacaatgaaaaaggcatcccagagatattttctgcctgtaatattatttctttgtatacaaagaaagaattgtatttacaacaaagttaatggtttttaactttacaagaatcttctctaaaacagccaggtgagggttggaacttgtaatatgtagcaaaagttaaatatgtgccgcttagacaagcatatactttgaaacagctatgtgaatacaaggtcagatatatgaacactactgtcaaagatattacccctgcaaatgttgcaatgcacttgagaacagagagttcttcttctggtctttgattggggaatttcccctgagcattgaaatcggatagcagtttgtccttcaacttaaatgaatccattaaccaagcagaagattctgcctcgtttgctggaatctcctttagtagaactcgccgaacgtggatatgtacttctgaaggatccgtcccgaatacattgtccatgaaagatgggcagcgaggtttatatgcgatagtcaaatcatatactgcattgcaataaaaggaaatgccttgttcagttaattgtggtcatgaggtcccacatgggtcattggaaaaatagaagatatgcacgccatcataatgtcgtcaaaacacataagtgtttgcataacatgtggcttgagatactactatatgtacaccaacatttgtaacaaaatttcatgaaccatacctgcatccaaagagttatgaagaacttctaagcaaacgccaaaaccccttgtttttggtagaagtacgtttgatagtgctggaagaccaacttcagctgcaaacttttggcttctcttgcatttctcttcactgcatatcaaataaggaaggtctcagtaatagaaagaagatatactaagagcagcatttcaaacattcatgcaatagcaggcaaattattgtaaatgagggtgactggtttaagatatttgcaagacagatgcgcatggtgttaaatatcctaccaaagagaaactgaaagatatcttcgaagattcagattaataatgtattagctaatatatctagagcagttaaatcagatagggagcatatagtacgtgaaatcggttccttcagggaatagagcaagccataagggttcttgaggatccttaaaagatgaaagcatttgaagcaaaacaggttcgtcgacctcccgcttcctctccaccgggataaattccaaaacatgaaagccccaaccaaaaataggtaatttcatcaagctgctcttgagcacgtatttgatgtagccaagacagccttttctcaaggcaatattccacagatacatccaatccacctccgtcctgtgatttgcaataagcaaaacacgtttctcaaccggaatgatgtctccagagaacaccacagttgtcccgttaaccgtttcaaacaggtaaggccacaaagctaaccagagaccaaagattaacgaaacaacttttctagattgttgcacactcagaagccgtagacctagagcagctattggtgcaaagtacagcagaaacataaaagcagtagacagaaacaccagcaggatcatcaagcccctcagaatcctaagcggagtcaaggggcggttctttaagttatcagatttcagatccccgcaaacttccatcttttttccagataaacctcaagacaaaactgcagcaatgagattcaaatattactcagtgccacctttaagttccccacaaagattgagtttttttctttttttggtaaatacaaagactcagttgcagaaaagatactataaaaaaccaatgcaagaacctaaatatatgcaatttgagtatcaataccaaacaattaatctaacagtagacatagagattagagattcctaatcaacacagccatgaatgaagaatatataaaaagccattttttcttacataagtgggaaaaaggttgcaaatttgaatctcaggaacatgaattaagctctaaaagcaacaatgaacagagaattccttatctatgagctcagtggaagattcaacaagcgaataatgagaaaagattcgtcatttagttagtatctaaagctgcataatttcgaatctataatcatcaatattccaaaacaaaaacacagaaatcacggagacaaaacatcctcaaattgggaaagacttgtgaataccgcaactaaaaaatcagatcccacgtgatataagatcaaagaagagacagagcaagagaaacacttctctcacgtatcttcgaaaaaagcaaaaacaatctaaagcacgaggaactcgacgaagtacctggagaagtatgaagaaacggaagaagttggcgaagacaaaagaggataattgttaaatggtggaagaacagaggaatgcgaatctcaaacgaagtttcagagaaggatacgtttcgggtcggatctaattaagacagtggggatgatcagagacggtagggtgcaccgtactatagcgatctgattcgctgagtgcgaaaaggtcaaaagttgcagggaagacaaaatccacaaaggtgacacttgcgacccgataaaattctcctggcgtcgttacactttttgtgaaactcaaacgtgaagcaaactctaattaatacttttccccacttattattattggttgtaccaaacaagaataaaatctagcttttaatgatttatattttttaatttaatacattgagcttgatattttttcataaattttggatctgaagtattaatatacgagtttcatggggaccagatgtttttattaattatttcgatgtcatttatttttatttttacaatagtataagtttttttttggaatttttgaccaaattcccttatttttacaatggtataagtatattttcttctaagataaagttatatccaaaaaaatataacaattcatgtataaaatgctgaagaaaaaatcgtgtctagttgattttttctaagtaaaatttttccttgaaattgttttctctagttgttgttaagaaagaactgtttgtttagtgaatatattggactcattattgtagaagactaagataagttctttctttattataatgaaacaatttgattataaaatatatcattgaccaagaaagtaaactattaaaagtgatagtagaccaaatatgaggatgtgattgatcggttcaaaagttaatctccgccaccgattcgtcaacttacagtaggggtacataagcaataaaaacaaatatgaggtcaaaactaaaataagtagtaatataagggttaatgaataaataatcagttcacggtgccggcgaacttgatatttttctcactcttccctcttctgcttcagaattatcgggagaacttcagacatgctatgctccgaccgaatctcatcatctatcaatttcatgtgacttattaaattgttctgtattctaagaagtggttccgtagaagcggagcaatgccgatttctatggaacttccagttttctctactctccgagtaccattgttctctcgtttagctttacttcctacttttggagttccgttttcgtcccttggtgctacgacgcgattgaactgtacatctcgaaaggcgcgtcggatttgcgtgatgtgcttagtgagggattctgctccgatagagacgtgcgagagagctggagaagatgggtctgacgagttcattgaggttcttgtcatcggtagtcgcaaggagtctatcatggattcatgcttggattctccttttccttctcttcctctgcgattttggtatatgctcgacttttgttcggcccatgattctgttttatctactagccactttgttgtagtctaattttcgaaatctgatagtttattgttactgactttcctagcacactcctaaattgtgtagctttcttctagtgacgaagcttatggcttgaattgattacgtacgctctgtgtattcgtgaaagggatcaaatttaattgccaaatctactttttcaggagtattagcaaggacagctctggaggtttagtgttacagcagaggctcaatcaccaaggtccataatctattcttttcctgtttcttcttgccgtttgagttttgaatttgattaaaaacagattcttgaacaactagcatatatttagctagttgttcaagaagattagagggatatgctatctttcttacttatcgcttctctctttctgtttacagataatgccttgaagaccatgaatccaattgagctgttacagtcacgtccaagggccttcatccttgtttgtacttttctcgcctaacattgtttgtgttctgttttctgctacaaaaacgtttttgaatttcgcagttccataggtagcaaaagatacacagtgtctaattgatcagtgattattaacaaccatggttccgaaattcgcttaggctcttaatgaaatgctaatggttttcaatttttctcgaattttattttcgtggaatagtattggccgagcatctgattctgcttaaactgttacccttgccaggtggctagtgctggatatggttctgaccaggttgaagctattaatattcttagtgcagtaagatctgggggtaacttagctgttgctgtgctattaaagcctttcagctttgaaggccgaaagcgtctagaagaggtagttttttgttgcttctaaagttgtagttgattgctatgtaccaaaagagccaatttggactttcattttatcatcccagagtcttgataataagattaaagcagttagttacgtgtttggacttttttattggtgctgtaagtagaacttgtatacctgaattgatagagaagaaaactaggtggagaaccttcgagtggcttcatgtttttccaacaacacaccttcccaaatctctgtcatctccatttcttgtcaacattttttaatatatacagtattccatataacaaactgaaaacagcccagtaaatgacgtccctatctacagacaagttcaacttcatttagtattgctagttagagccttttctctttttctaatttcccaggttgtgtgcaggttaacgagttggctagaaaactgcagcaacacaccaatttctgtataggtacgtctattaacattgtgaaatatttcctgacacaatagcgtcagaaaaattaccttttcttctagtagttctgctggccatgaactgactttaatttgggcgttgtagatatcgacatagaggttttactacagaaggatttggtaactttggacgaggcgctgagaaatgcaaacaatgctgtgtctatggcaataaatgcagcttccgctctgataagtgtaaggttacttttctgctctagctgtctctcatattatactcaattttttttgtcatttcatacatgggtttatctaggggatgcatggaaacttcatcgatgtgatgcataaagatcttaaagaacttgaaggttcagaagttaaaacggtaagtttcttggaattgtttcttttgggttttagtagtaaaaatcttcatagtcttacctattcttgagatttcatttgtctgtatggtatagtcacccttagtttcagcttgtcttcaatccttcaactctcttatgtacagattctagaaagttacaaagaggcaaaggttggttttggagttggtcacaaccttaagacttcgatattacgagctatatatgactgcccattctttcgacctggtctaaaggtatttctaatctgttaaagagctttcgacagaagattcatctgcctacttaagttcttcgtttgattttttcctcattcgtctgataataaagtgaatataaaaacattaattcgaggatttgataattggaaaaaataaatctaaacatagtgacttataaaaaaccggtaaaacagatggtatcactctcccaaaggagcaagggtatttgaaatttttgtttgtgtgtattttggcatttttctcgaatgatatgctccttgaaataattcttacgaaattatgttattcaaagtaacctttttcttctcaagtctcaaccatgcttttaccaacatgcaggatctaaacgctattatatgcattgtggctagttcggtacctctccagaagaaagacgtgaaaacaattcttcgtactttccgtcaaactatggagtacactggagatattatagtatctactgttcatgagcctgatctggagcctaaagtgcgtgtcacaacgttttttattctaaggtgtgtcttcatgtttagtgacagctaacaatttcaagctcatgcatatggtatcatatttagctgaaaatcaacaaagaaaagtaaatatatggtttcagcatttataccatatatttttatgtgtttgattaagatctatgatgcttttgaccaagactcagattctatttctcgtgaccacttttaagcattaatgctagtctcaaatgtcatcacagttcttcagaagtggaaacatccaacaaaggcaacattttttctggtcttgttccttttgttttaaatatcttcacgagatatcgttcacagctccaaaaagaaacaaatattggacttggagagacgccagtttcaattaaagattcagcagactctactgacgtaaaaacttccaatcagaatattgaggaatttgaaattgactctgaggacctcctggaagtttctgagaacggtgatgatagtgaatacccattaaaagagggggaaccatccagaaacagtcgtctggatcttaaagatgaaaatgtagaaggtacaaaattgaagacaactttctgttgctgcttatttttgtatgttgtattggtcgagatgctttattacttgttatttatagggtgctgaagtagtgacgccctaaactactttaaaagtgattaagtgaatgaaagtcatcttttgtagattttggtgctatccagagggagcctattgccaattggagtatggatcagggatatcagattgagcagaaatggcaagctgattctggagacactgcagtgcttagcctgggaattgtcaaccttcctgttggtgtgagaccttcgaagaaattgaacagtaatctcagtgttgccagtcaactctctaggaaggctgattccagagaagaatcatttttcaaccctaatggctcgacaaaagactctagtgatactgcatctaccctgctatctgagaaatatgctgattttacaaagcaaagaaatctatccgctcgagcatcgtctatgctggtaagtagcaatgtaccagcttatgaggttgagatatcaatcatcttcttactagtgggctgctttttcaaacaataatgcatatagaggcaaagttttctccttggttcagtctgcaaccatgatgaagagtctttctgtaaaaacatcgtccaagtcgatgccaactgagagaaaattttccatttttaattcttaggaagctgaacgagattcatcaaaaagatggagtcctattcttgagatgcagtacagaggaggacttttcaagggaagatgccaaggaggccttcccgaaggaaaggtaatctgtcttgttagttttattcattgaaaccaattcatccatggatcctcttcttatgtttgagacagacttcttagttaatccgaaagtaacagctgactattcccaccagggtcgtttggtacttggagatggaagcatatatgatggaatgtggcacaacggtaaaagatctggtctcggaacattctacttcaagaatggagacgtgttccaaggcacatggagagaagatttaatacacggaaaggtgaaatagtcttttgaccttttcgaattttgattagcttattgagactacacttttgcaccaactgcttagtttcaccaccaagtccctaagactttgtcaagctggtgccatttaaaatgcgtttcctacttccccaatatatcgaataggtttgataaaggactgtacaaatatatctcttattagaaaaacaaaacttgttcatttgtcttgcagggttggttttatttccacaaaggtgatcgatggtttgcaaatttctggaaaggaaaagccagtggcgaaggccggttctattcaaagtccggtgagatattctttggacatttcaaagatggttggcgccacggacaattcctctgtatagatttggatggaacaaggtcagtgactcttaaaaaaaacttttccctatcttaatcagaaaaggagcaaccccaagtttattcaaaattgttgacggctatttcctacagatactctgaaacttgggacgacggtgttctcattgaccggaaacaagtggacgccggagattgatatcatccggcaatgctgtaactatatagtgcatatcgattttgtcttttctcaggttattattatgacaaaacgtgattcataaaaagtattcctgtgacttaaaaactccttttctttgattagatgtttaaaagaaacgaattcaataccgaaagctacctgactttttctttccttgcaacctgagaaaagtgacgaatcttcaaaagatcaaaataagctattataatgcaaaattatataatatattttgtgtcggagagcaagactacaatgattcctattcctaattatcatacaacaacaacatcaacagaataaatctgatctccagttttcatattttagctgaagtctgattttttttttccggatgatttcaataatacaaaaatgattaaggtttatgtggtgttgtgattagccttggtcatcattgaacgcgtcttgcaataaaacttcaagtagagcaacgtgataacggcgttaagaacagagttaaacaaccaagcaccgataccgttacaaccgccgcgtttgaccaggtgtatacagagtacgcctacgtggcaaaccgtcatacaccctaacagaatggcttgacagtttccgacaaacggaaaacacgcgccacgcaacccaatctccgtccagaacctgtaaccgtacacaacggcgtacgaaacggtcgttaatagtatcgctaccacctacagaaaccaaaaccaggaagaacggttcaaatttataaattcggtaattgattccggtttaatgtgtggtaacccggttattttatacctgaaaggattgggaatattcgagccagaggaaggagatacagagaagagaagactggttgataagctggaagaagctgagtttacgacgtcgtatcacggagaagaaagtacggaacaagtgaaggaatcttgagaggtaaaacgcgtatgaccagaagaacacgcgtcccgaagcgcgtgtacctacgggaaagcagaggaaccattggagagcagtggtgcgggtgcgacgccatagccaccgcgtgtctctgatctctgctgcggcggagaggaggataccgacgaatatgacggcggagattatggaaatggttaagctgtgtagagctgggattggaccgagggagaatccgcggcggcggttagagagggagagggttatgaggaggaggaggtggagagtgacggcggcgatgatgtaagatgagacggcggtgaagaggaaagaccacgtggaggcgtaggattgggttggactccaacggaagttaacgatcgttggatgctccgctaaatagtaattgaacgtcgtcattggtaacaaatcaagatcacagtggttgtgttgtgtgatgtgaaagaaaaaggaagaagaagaagccgctgagagaatgagaggaggagaagagagagattcttgaatgtgagtcttctttaatttatgttctgtttctgtgtttcttgttttttctcaccggctttgctctatttttatactactgttttcgtatttcctcatttttttttgtgttagtaaattgggaatgcgatccattcatgtcatggtcaaagttgacatgtataagaagagattaaggatgtttatgataactttatttcatcaaataatttcattaaaccatcgttttcgagttatcgttttgtaattaaaaaaaaaacatcatttcatacttttagtgtattttttcaaaactaaggaagtgtattcaatctaccatttaaaatgatttgtgttaaaacaaaatattatgttattcaaccatagagttttaaaaagttataaaatatagtaatatagaacaattgatttggtaaaaaaaactttaaaattcattgtgattggaaatattttaagcattagatttttagtgactttaagagattacaaaggatttcttagttaattatgtgttttaatatagtttaaaattgtagattaaataacatttttctgatacaatattcaaatccccaatcttttaacaatttacgtgacttgacttttcgtgcagagtgagaatatgatacgattgtttttgttctttttatggtaaggataatgaaagttgcttagccgcattgcgtacaagaaataaatgcaaatgcaacaagactttatacccaactataatacttccagaatccatgtatattattatttggacttcagcacaaattatatgtgaagcaagttaatccaccacgtatgatatttgttggatcatgttccatttcgaacattcctatagttccagtcaatttgattcgttgtactaagtatttgataatattaataataccgtcgtctagaacaattttaaagttaccattatatattaaggtcctaaaatatttatctgaagatgaagtcttaaccgttacactaaaaagcattttatacgtgtaaaaaggtttaagtttcattctataaaaaaactatattaattgagtgcgttttcttttctgaattatttttgttgttgatatgtttaaaatcgtaaactaatcaccacaattgttacaacaataaaaatcacaaatatatagactggtatttttctagatgtaataggatttgatctctaactttatctaaattattttattcataatatataattactagattttaacctgcgatataccgcgggactatttattttttaaaggtaatatatattaaaacttacaaattttatttttataaaatatttatattttacagtttataattgttattaagtaacgctataccacgaatccatgagacaattgttaaaaaactgaagttttaacccttcttaaaacagtatattaataatattttaaaattttataaatattgattcaaatacatccaccatataacccaattccaaaataaaacccgttctgtaatttctttacctgtcccgtgattttttttaaagtagtaatttttaaaatttaagaattatttattatatataagagttttataaattgcatcattctctaatacatttatattttatagtttaattttatatatagtaacattatacataccacataattttttggttttatataaccttttctaaattaggatgatttgatatgtttaatattagtggtcttaaaaaataataaattaaagatttaacccgtattgtgaattaattatattttacctttttattattgttgattcaaaaccccatttctccaaatctgtcttgccaaaaagccatttatttaataatattaattttatttatgatatgactctaattataatctaaatattttagctaataacataggagtgcaccatatttatttaataggagaatgtaccatatgacccgaatgcacttttaccaaaatccaccaaaaagtcttgcaaaaatactatagagataagaaacgatagtcggttttgataggtataagattaacaaatatattaattagcttaaattagttaaagagtacaaattgaaaagttatattacactttattcgaatatattatcaaaacttatataacagagagatttgataaaattgtaattgttgaatactttttttttgtgctaatttttatgtaattaagatttaattgatttcgtatataaaatattaaattgttttacgaacttatttgtttatatttggtaagagataaatatttgaatattcggtatattttgattcagtttagaaaatctttgatgacccgtctttagatccaataagccctataattaagaaatgaatattgtcgttaaatgaattttggtaaccttaataacgtcattaaaagattttgtttttgattaaatttttctaatatcattgtcatgtaattaattacaaaaattaaggttacatttcaaatgtactttccaaaataatataataggatttctttgggtacaaggtgaccaatgatcatctagaatcccgcaaccgtcaaaatcacaagttttagcgtaaacagtttatggattgtttgactttaataattggacaaatgttgtaaacaataatcactactacgtgttttaacgttaggttgggcatttttcaagtaacaatgaaactaatttatttattttggtagggataaaacaaaatttaatgcaatgttcaatatgtattagtattgtttttgatcgagtactaaaattctgtaattcgttcacttaatttaaaggtatagaatcataaaacgataattatttttggtaaacaaaactattagtcaaaagtcaaaactgacatttaatttgaattgaaaccaaggaaataaactaattttatttaaattatgttattaaatctttaaaaatcatctgataattacatgaaggaagcttggtcagccataagaagaataacaacttttttccttttttttttgttttgttaatccgttagtatataaacaacagtattcctagtttctttcaccgactcttctaatctctgcgatcgtacatcagaaacctctatctcatcgccgaggtaaatctttcagacgctgtcccttctcgtaaaaatcgaaactttgaatcaaatctacgtgaaatttttgtatttctctgcatgtttgatcaattctatatgaaaccgcgtttaagggttttagagtttttcatctcattcgttaatttcattgcatgtgtgcaggaaaaaagatcttacaatggctattaacaccatcacgaacgaagaagatgatgcatcaaacaactttggatgcaatatctgtcttgaattggcaagagaaccgatcgtgactctatgtggtcatttgttctgttggccttgtctctacaagtggctccattaccattctaaatcaaatcattgtcctgtttgtaaagctttggttaaggaagatactttggttcctttgtatggaatgggtaagccatcttctgatccgagatcgaaactcaatagtggtgttactgtccctaatcgaccagctgcgactaggactgaaacagctcgacctcgtcttgaacaaagacatcatgggtctagtttctttggtgggcattcaagttttgctgccatgccaactggtttacggttttcaaatttcttgttgtaatggaaagtatcttttgatgaatctgagtctgtttttttgacaatgtttttgaaactattattatacattgtctacgatttttgttattttgacaattaatgtttagagctacttttacattcttataaaaaatttgcatctgcttgtaatatttgattctccaatcttccgctttgtgaaaaatcgtcataagcttgttctcgtgctacatctgcagattgatcaacatgaatgctgattatagtatatgatccttaatatatgattatcgcacagatgaatttaaagcttcacatttaatcgtgtaatttggagtagatggcaaaagaacatggaaattaactaaatgacaatgatgtgatgtaaatttttgttttgaccattttgtttttgttaacatatgtaacgaatctacacagagtatttgtgttttcaagctccttgttaagcccaatgaaggtttttaatgggctctaatgggccgattcaataagttggaaagctcatgaagcgagagggaccgtgcctaatctcatcttcactctgctcgttatcttcttcctttttacctgttcaacgaaactcctgagctcagcttcactttgctcgacgttatcttcttcgttcagcgacaatggcgtcgattacgaacctcgcctcttctctctcttcactctcgttctcctcccaagtttctcaaagacctaacaccatttccttcccccgcgcgaattcagtattcgcattaccggcgaaatccgcacgccgcgcttctctatctatcaccgccacggtatctgctccaccggaggaggaggagatagttgaactgaagaaatacgtcaaatcgaggcttcccggaggatttgctgctcagaagattattggcactggacgacgtaagtgcgcaatcgctagagttgttcttcaggaaggtactgggaaggttatcatcaactatcgtgatgccaaggtaaatttatttctaatttcattatcttattggcttttacactgttgcttagtcgcttgatgtgtttgcttaggccttgaatttggagtttatacagctgagaattgactactcatatgagattaagatttgaacttgaaattggtattttaacagctaaagctatgaaagcagtccacttacccccgtttgaacatattcttggtttatatgaatatctgatacctgcaagagactgacatcatgcatagtgtgtaatcgattgaagcatttagtagtataaattgtagcagtttgtaggagagaaagtcttgacctttatgaagatattctctgttatgtagggtatactagtcttgtgatcaaactgtatctttatgtacttctttttgatagatgagttatatcagcgcgttacagattaagttgaaactggaagaactctctgaacaaatagtttatatgatgaattctaggctatttagactttagactaggataagtggctgagaaagtgatcaaactgtatcggtattagtcttgtgatcagacgttatctgtatgtagttctttgtgacctgggagctgcatcagcacgttatagattaaggtgaaactggaagaaatttctgaacaaatagttcatatgataaattctaggctgtttagacttaggataagtggctgagaaagtgttaacaaggagagattatgataaaagtttggggggttttgacaagctgttttgttgtgaatgggaaagatttgaatccatacgtatattgctgatgatgatcattgtaaacctttttcaggagtaccttcagggaaatccattgtggcttcagtatgttaaagtaccattggtgactttaggatatgagaatagctacgacatatttgtgaaagcccatggaggcggtctctcaggtcaagctcaagcaattaccttgggagtcgcacgtgcactcctgaaggtaagtgcagaccacagatcgcctttgaagaaggaaggtttgctcactagagatgcgagagtggttgaaagaaagaaggccgggctcaagaaggcgcgtaaagccccacaattctccaagcgttaagagttttacatatcattggatcaactcttcaagtagactcctctgcctccattttttttaaaaacttttcttgtctattatcggtcttttgtttcatgttaatgtttatgtgtagacgaactaatacaatctctgttttgtttgaatggaacgcaaagttgatatgcttttgtaacaaatgcacttatgaattgtgatcagacaaatgcacttctgaatcgtttatcagttagatttcaggtgaaagtgaaaactttgcttctttcaaaaggtgttcatggatagtggataagcagcaatacctgaacacacttgtatcactttgtgtatctatctaattcctttgatattgaagtagtaatgttgattttgatgggctcataccgaacgaatcagaaatcgacaagtgtgagatagtatgtatgtgtgcataaaataggctggtttagctgggaatggtgatgcgaaaatggaatgttaggtatgagagagcttacccactttgactctttccatgcatattcgcttgctcccctctttcctgcttcctctgttttcttttattccatttccatcacttaaaaacaaaacaaaaaacctgaactcttgggttggatttcaaaccaacataaaccaattctctaatacaacttggtttgatacaatattagagctacttgatgtgtgtaatgtttcgatcagtaggaaaaacaaatcacgtgtatcctatcaaacttttgattatacacaagtcaaaagagacattcattgtgtgaatttaatgaatttgaggggtctattatatttattagtcagctttaacgtatcaaatccatgacttttatcaatgttttttcttcttttctttctggatctacttcccaataccatcaccggaccggaccacttgatgatcttcctatttatgaacactactactagtaaactcatgtataaaatacgtactttatacgtgtatttctgaagattagtcacttcaaaaaatcatgagagtaataaatgttaaaaaaaaaaacagtggcgctcctttgccatatcactatcccaagtctgtaacacttcactgccacaaaaacaaaaaacaagtaatccaaaataaaataatgattttccaagtgtccttccttcgattaaaccgaggtcaccaaatctgtgtatgtaacaaaaattgtagtggaacatattgaatcagcagcgttactgtataattattttttgattatatcattacatcaacataaattatgatttcctatcattctgtgaaattactgttttcaattttgtgatttgtacttgaaaactaaacctaataaaagaaaataagttaggaatattttgttttttagttttgaaaagtggggctattttttgataaaatatcatcaactttaacaaaaatagataaaaaggttatagtatatattttttagttacaaaattgagattgagataaaaataaataaaatttaatggtcatcgataatattgagatttgaagtgtcgattggtatttgtatagtgttgtatctctctctctctctctctgtctgtttgtttcagagaaggatttttggcgtctccacgcacgatttaacgcatcgaagctctctgcacgcttcctgaaagagagagagaagagagagatcgcagatcgatttctcttaaatctctcgtgaatcccatttgccttctctctgctagattctctcttcttctcttcacccatttctcgctttctcctttgttctctcatctgggttcttctcaaagcctcttcctttttatgccatggtgggtgcgtcttcctcttacgcatctccgttatgtacctggtttgttgctgcttgcatgtccgtctctcacggtggaggagatagccgtcaggctgttgctcttcaatctggtgggcggagtcggcgaaggaggcagcttagcaaatgctctgtcgcttctggatccgctagcattcaggctctcgtcacttcttgtttggattttggtccttgtactcactacaacaacaacaatgcattgtcttctctctttggatcgaatagtgtttctttgaatcgaaaccagaggagattgaatcgtgctgctagctccggtattacatttatctcctttttttattttctcttccaatctggggttttgtttttatgtggcaaggtttagtttttatagttcgatgttgttatgggtttatgttagtgatgaaatttagaggtaaagttgaagtgggaagcagctgacatgtgaaagtttgaatttttattgtgattccatgttttatcatctttcatatgaaagcaaactctgtgaggttagtctctagatgatacagagcttcgaaagctgaccaaatggcagtgaacttttatatctaaattttgaagttggctgtgattcttttgtttatcttgctattgagatgtggtttgtggatagtagctgattaagtttatctaccatcaactggctttgtgggttttaggtggagccatggcagtgatggagatggaaaaggaagctgcggttaacaagaaaccacctacggagcagcgtcgagttgtagtgacaggcatgggagttgaaacatcattgggtcatgacccacataccttctatgagaatttgctacaaggcaacagtggtattagccagattgaaaattttgattgttctgaatttcctacggtacgtattatttatatcaggatctcttggaagctttttggtgtgcggaatttctccgtttgcttttgtgtgtactagaatatctttctttgttttacctttgtcaagcgaattgcgggagagatcaaaagcttctcgactgaaggatgggttgctccaaaactttctaaaaggatggacaaattcatgctctatcttctcacagctggtaagaaagctttggctgatggtggggttactgatgaagtaatggcagagtttgacaaaaccaaatgtggagttttgattggctcggcaatgggaggaatgaaggtactttctcgagcccgggcttgaatgtatagaaagtatgaaaacagtttcattttaaggtttctgttcagtatctcgcctgattgttccttcatttaaccatgctttcactaacaaaagagtcacatgaatattgaatctaaaaattaggaagtctgttgcgaatcgttgcatttctaataatcttataataatacaggtcttttacgatgctattgaagctctgagaatctcttacaagaagatgaatcctttttgtgtaccttttgcgacaacaaacatgggttctgctatgcttgccatggatctggtctgattaaatttgaaatgctcttaatatattatggatgaccaccagcaatttagtactgaccctttttattttgtggtcatgtatcagggatggatggggccaaactattctatttcaactgcttgtgccacaagcaacttttgcattctgaattcagcaaaccacattattaaaggtgaagctgtaagtatcctccatacacttggaaattcgacagtttggtagacttcctctgtttctacttatagactgtttgtctttccactaaacttttcaggatgtaatgctctgtggtggctcagatgcagttattattccaataggtgctaactcgttctcttatattttacattgtcccatctattcttgaaatttaagcgacgtgaaatcgtatcgtatgtgtaccaatgcagggttgggaggttttgttgcatgccgggctctttcacaaaggaataatgatcccacaaaagcttcacgtccttgggataccgtaagtttaaacaatttcgtgtcttgtcttctattccttttgttacttgcatgttttagtacccttctatggttttgttttaatcttggtggatgctagaaacactgtatcgagtttttgccaacaggaatttcccttacattgtaatgttgtaggaaagaaagtgtgaggaaacgtgcgtattatgtttggaaattcttcttgttttgttaacctggtcttgattgcatgacagaatcgagatggtttcgtgatgggagagggagctggagttctacttttggaagaactcgagcatgctaaggtatataacttattcgttctttctgtcatttcttgtttcccatttttaaatcacaaaagaaacttatatccaaagctttttttattgcttgctatggaacgagttgtgagaacataagtattctgcttttctttcagaaaagaggtgcaactatctacgcagagttcctcggtgggagtttcacatgtgatgcctatcacatgaccgagcctcaccctgatggtagtttcattttcccctaatttatattagtctgctagtcaactacaaatttgaaatctcttttttctataatttttttgtcattatcccatttttcttaaatccgcaggggctggtgttattctctgtattgagagagcgttagctagtgctgggatttccaaggaacaaataaattacataaatgcacatgcaacctcaacgcatgctggagatattaaggaataccaagcccttgctcactgttttggccaaaatcctgaggtagcttcagttctttgttacaaaattccgaagtgcctttttatgtgcttttcttgatctttctcgatgtggcagcttaaggtaaattccacaaaatctatgattggacacttgctgggagctgctggggccgtggaggctgttgcaactgtgcaggtaactcatttgactcggtgtatctacaaggaaggaagtgttgttgaaaccaagttttagcatagagcgaaattatgtgcaatcttcgcatttttaatgttaatattctgttgctatctacaggcgatacggaccggatgggttcatccaaatatcaacctcgagaatccagacagtggagtggtatgttagtttcatatgagttcaatacctatacaaagaccttttaatgttcgtaaaaaaaaactcttgggagttttaataatcgtactgtgaaatgaaattggagcaggatacaaagctgctggtgggtcctaagaaggagagactggacattaaagcagccttgtcaaattcattcgggtttggtggtcataactccagcatcatttttgctccttacaagtgaaagcgaaagcagttgcttgtactccaaacctgattgtataacttgctgtaaggtaaaaagttacatccattgtacatttgtgtatcatcagattcttagaggaattgaaggacagttaactcttttgacctttctatatttattactttggctgagatggatcattggcaataatgaattggaagtttgtgcaagttccctttgaagtattgtcggtccagaaatgctctaaaatgatttgggatggactaagaatttgttatgaagctgagtgtttaaattatgtgcagtgttttacaagaagtttcccatgttatgctagtgttacgtcgagggaatcaacagagtttgttcaactaccaagagctaagctaagtttcttaggatcaagatctgatgagccaaagacttggacaggagctaaaacgtgctagagatatcagagtttggattcgccattaaaattctgtttcttgtgataccttcttattggaaatctttgtagtctttacatttctattgtttaacatgaaatctcaaaaaatgccaaatcaattctcaattttaaatttagtagctcttgacagttttccctttgttaattacatatatagagagtaactaaatcatcttttgaaaggtaaaaactaaaaaaatatattccaagggcccaatgttttaccactttcatatgtaagcttattttctgttaaatatgtgaaagaaagaagaggaatgaatcagctgtgaaaaccaagagcaagtataaaaacatggctaaaagggtatcaatcagccttgtataagagagccataagtagataaagtttctacagtaaaaacaggaatatagagtactattccttaattagcttatgttcttctattcttcttgtgacctctatcttgcatttttgtgaccaccccacttgccttcttctttttggttgcatactctaaataatatccagactttgatgtctttatgcgctctgggttcttcttgtgacccctcttccttgtaattgtatgtacctgcagcttcttctgattttgtttcttatggatatgtttgtgatgtataaaattttgtgaagatgtttataaaacagttaaaaaccaaattaaccaatcatccttattttctcacgagccactctatgaaccttacgttatctcgatgtacctgtaatgagttagcaattactacaatccaagtcaataaaataacaagttggacgttacgttataaaagaaaatcaaacttatttgtgtgttcctaacaaacgcatgggataataacaagagaataaaagacagagtgataggatcaacggctattgtgcgtaggagaacacagctgctatataagccgcgtaacaggtgattactctgactacgacaccaacaagaaaaattctctcaaatgtgggcagttaagttagacacgtgtaaggtcgcgattcatggaggagacgtgctcttcccgctttttgtaattatttattactgttgtcataaataaaacactaaaaaaaaattaataaaagggaaaatacaaaacgtgatttatggatcaaatttgcattggtggtggagttttggttatgtaagacccacaccgtgttccctctatctaacgccgttaatcctcttttttcccccaaatcataccgttaattctctttgagtgctaaaatatcacgccggtctatgagattaaaatagtagactaattaatagtgctaaaaatacataaattaatgccaagagattcatcttaaaaaaaaggatatatgaaccaactaaatggtataactgaaagactatcataatcaaatttcatctgaacattgatttgtttgaactaattaattttaggattttacgttttcataattttttattttatttgaacatcttgtaagggtaaaatggtaaaaacaggagtagtaagagggtgaaatggttatttcaagtgtgaagcgtggggacgtgggtgacggtggtgatctgaaacagtggtctgccgttaaaacattaaattaaaacacgtgttttaaatgtctctatgttaattaatactataagagtatattttactaatttccgtatctgcaaccagcgaaaaaaaagtaataaagaggtcctccatttcttcctcgtgacaaaacgcacttggcagagaaagataaacaagaaccctaagtttttttataagattcgagaaaattcaacaactcaggaaggaagatccttttgctccaatttctcaatcgaaacgatttcaatttcggtttcaacgatgtcgagtttttctgccgagtgttgggacttctctggtcgtaaaccgagcttttcacaaacatgtactcgattgagtcgttacctgaaggagaagggtagttttggagatctgagcttagggatgacatgcaagcccgacgttaatggtaatcaacctttctcttttagatctgttcatttcgtttctgcgaattttgagtttcctgttgcgaattacgaattatgaatcgattacatgttgtctggaaattgaatcgttgtagagaatcgatgattaatggattttgaatcaatttctatatatgtatgtatgtgtatgaatttgtggagatggttctgtgtttggtttaagcataatcctctaaagccataggcctggtttagtcattaagtagattttgttttgcagttgtttgagagattggtgaatgataataatctttacttttggatcaattttcgcaggaggttcacgtcagcctacaatgatgaatctgttcccttgtgaagcttcaggaatggattcttctgctggtcaagaagacattaaaccgaagactatgtttccgagacaatcaagcttttcttcttcctcttcctctgggaccaaagaagatgtacagatgatcaaagagactactaagtatgtgtttatatgtatatagtgaaaagaatcgtctcatatagtaagctatgtttcatcagtttaactaatttttgtgtgattttgaacagatctgtgaagccagagtctcaatctgctccgttgactatattctacggtggtcgagttatggtgtttgatgatttttctgctgagaaagctaaagaagtcattgatttggctaacaaaggaagtgccaaaagcttcacatgtttcacagctgaagtaaacaataaccatagtgcttattctcaaaaagagattgcttctagcccaaatcctgtttgtagtcctgcaaaaaccgcagcacaagagccaattcagcctaacccggcctctttagcctgcggtaattgatctcagcctcttttggttcaaccatctctgagcttggcttagtcctatttctctaactttctctctttttgatttgtagaactcccgattgcaagaagagcttcacttcatcggttccttgagaagaggaaggataggtaatgcattttaatgaaaacataatatcttgttattccataagttcttgttaagcgaatttctcaatatcctactcgtaaacctttaacaggatcacatcaaaggcaccataccaaatagacggttcagctgaagcgtcttccaagcctactaacccagcttggctcagttcacggtaaacttcgagcctgtccgacccagaaggcacaacttgagagaccttcttgtaagattcttctgatgctccatcgttacaaatatcaagctgctcctctgttcattttttctatagattaatttcacccctagtagttttgtttgtttaactcccccgaaaactcattatatttgtatgaaatcaatatcaatagtgttcaatgtttgcttctggggtttaagttttagccagtgtgtataaccctttcctctgccgatctcaacattagcttgcaacttttgtaagaaacatcacttgtgtttttgtgttgatggccattaatataatccaagtttatttaatccgattgtttgttcgtcacttattgagagctgaagcttacagttaaggaacagaaatacttaaagcattctcgaaaataaagaaatgtctaaaaaatgatgattttctatcaagtattgtcgtgtgaaagattttctttaacaagtctgctattgttcaaaatacgttttaacctatctatccattatagtattagcattttcgttttgttgttaaatacatggcacaaactatgtagactatttttggttaaaataccaagccagttacaattttgtttttcccaaaatactagttataactttgtaaaatatccgaagtccataataaaaagagcttcataaatatccaataagtggagtagatcagaccaggcttggtaggccacgggaattctgacccacgataactttttttcgttcggtcttgaacaatgatttgttcggtcttgaacaatgatcatccaactaacaaaacgtaaatttggtccaaagactggtccgaaattcgttatgattaataagcccgaagaacctaagatccaattttatccgatttggaaaaaaataactgaatttttcagcattaacaaatcgccaagactacgtaatttggatcggacagaatcggccccggacttcatctaatcaaagttgttcaaaatggtagggactaaagtttttaccaaaatatcattgtttttttagttggggaaaaggatcttttattaatttctgacaacgggccaggatacaacaagttgcatatttaagggcccacgtgcatacattgcactaagaatcataatgatttaaaactcataattgtgtttcttcaagtcttaaatttattaaaacgttattttggtttcttcattaaaatgatagtacgcgttctctattattttttgaaagataatttaagttgtttgtaattaagaaactgaactcgagtaatagcaaattagcaacacattacatttttgaacgtaattttaattttatacctctataaatattttgattggtaacgttttctttaaaataaaacagaagtaaacccacaggactttgtatttttgatcaaaaagtgtaaacatattcaaacaagtcttctagccacaaagttttagacttgtggaaaaaacaaaaaaagacatgtgtattgcacaatcttacattttcaattgattgattcaatgttttggatacagggaattgagaaattggcatatatacatacatacttgttctacaaagctatttcacgaaatgattattgatttatgtgattccgaggaaaagccataaacattactcggtattaaaagttaacaaaaagcaaacttctatacaatgtgctttttaacctaaccaaaaatttcactttttttttttttgttattttctaaccttttttcttctattaaggtaaaatggaatgatgatcacttttttttttatatataaataaaatatacttctcttcgtattattgtgaattgtgatcatcctaaaatacgaatactccggcagataatctctgtccggcggcgtaaggagagctcaaaacgtcggcgtttcttgaaacttgcgttttacattgctcttgtcgttcgtcattcattatttgcactgatctgcattcggcactacaaaatcccatctctcctctgcacacaacccaaaaaaaaaaggatcagtttctagaaaaaataccaataaaatattgaattagtctccaatttaacaaagatccaagaagcaataatgcgatgaaacttacttgtacatgtatatgtctttgccttgaagtttcttcttacacaagcaacacgaactcagaaactctgttggacccctaacactctgtctttcaataaccggtggttcatcgacggtaaccatcggtttatgaactctccgataatcattttcagacaattcaaacccgtcgtcgttgtaatacactttggtcggcccgtttgggctcgtaacataagtgtattcctcatccgacagatcaatctccgggcacctgaatctcccggagtaacgaaccggatcatgccggttaatcccgttgctagtttcctccaacgcagcaacaatacccaaaccgacaccaccagaaccgaaccgcttcgagtgaaccggggaggggaagttcaaatccaacggacttctcggactggccgtgtactcctccggtttaatagcagcagatctgcttcttggaaccaacatctcagacaatttacggatcattagatgaggtctcttgcttagtatcataatcaagaattgagaaactactgttcttgataaagaaaagaagaagaagagttaaactgttgttgattacaaagaaaataaacagtaaaagaattgagaggaagatagagaaagaggaaaggaagaagaagaaggcaaaggtaataggaaagaaagaatctgatagaagaagaagaaggagatggagaaaggtagagagactttagagtttagcccactgattatatttctcaagtttggaattttgtgtgctatgattaatgattgaagtttatagaacggcccaccatcaccattattatttttgtatttatttatcttgtttggtttcttttatcgacatcatctatataattctatatatacacaattattgatatgagcaggctcagatattattttttcttttcttatgtaatgattccttttcttctttttttttaagcatttcattggagtgtggtaggaccgtgaggacccacatcaagaattcaaatgtctttttctgatattttgttttatattattgggaatccaagactttctctaatgtaaaaatatattctgtgatgtacctgatatatatttttaaattttatgtaaatttaattgtgttattttttaattcaccgtattttatattaatagaccaattcatctatacttgaaatgtggattgttttctagtatttattagcacctagattattagtattagtttagctagtggtttttattttttcttttttattttgtctcgaatgaaatagtggtttatattgaaagtgatggtttttcttatttaagccgaaaatcaggtggcaatttgaaaatgatgggaatcttatccaccccaattttttttcatttttttttccgattactgatatttttctcgattcaattctattttctttgaagaccgtttctcttccttgatttccaatcctaatttcttgacttattgatgttgaactttgtaattgtcatcaatactatcgaaatgcttggaagatattttatcatatttcatttatagaaacccccttgtgttttaattaggccaagggaaccttcgtacttcacttaagttaactactttatcacgaaaatcaatttttaaaacaatgggctgagaaaaatgtttaatgactaaggcccaactataagattttgggccggataatataatcttccaaactcatcgtgttcgaaggatattcttcagaataatgaaatggacttttaacatttattactagaatcttatccgatttttctttacaacaaaaaaatgaaaaaatataggtgtgaatatgatccacatcaaattcggatccgaaacgaaagaaattcccgggtcattggagctccgtgttacaaaaaatctccagatttctccatgactccaaggaaaatctcacagttcgctctaaaaaaatattatgtttgggaattcaaaaatcccaaagaatcaaagattcatctaataaactctctcctccgtaatcttcgatgggtaaaatctctgtaaatcgatcaccaccggagaagccagagaagtcgtcggagaaggaatcaaacccgaaattcatcggaagcaaatccaaaaacgaaaaatcataatccaccgtcgatgtagcaacagatgcagatgtagaaggagactctggtcggatctcggatccgggtactaaacccgattcttcttctcccttgacaatgtcttggaatgtgttagcgaatctagcagcagcttcctgaatctccggaggcgtcaacgacttttctacggagatcgacggtggattattagggaaattgaaattagcatcgccgccgcggagacaaaattgagcggcgtcgaaagcacgcgccgccttctcgggagtgtcgtaagagcctaaccaaattcgttctctgctgtgtggaagtctgatctccgatacccattttccccatttcctcttcctcactcctttgtactttgactgcatcgccgtgtttctcttcttctcctcttccttcatcgcttgcttcaccattggataaaaactccggttcggttcgattcggtttggttgaattggattctgtttccggttcttaactcgagtttcagttgtgtaggttaattctgttatatctggttgatttcgaatttgcggctgtgtgggatttatatatgaagaagtggaagtggcaagtgaggaagaagatcaacgctgactggcgcgtgaagatgggacacgtggcggattgtattgagtggctaacgcgggaatagtgagactgttctgctttgtcgtgttccttgttttccacgtgatttaattcaactctcttttgtctttttgcattatatctgaatgattatctctatttgtttaggcacgtttgttttaaatactgagattttcgtcgcgacttctgtttctagaattttaagactacttcttcttttgtattttagagattattgggcgttgaatcggacacacataagtattgttattataaatgtttgcatcaatggttaggctcatgacatttttgatgcggacactaattaagaagttaagaagcaagtatatgactcactgttttgaagaaagaagcgagtcgtctgttgatcataacttgagattcgtagaagaagaaaggtggaaccaaaacagaagtttcatacatgaacactatttagagcagtagctatctcttttgtttacgcattctgttttccaaataagttaaaaaaagttaccttcttttaatcccacttctcaagatggagcaataattgaattgaaggccagtggccactactaactttcattatactttgctcgagatagccactactaatgaacttgtgacacaaccttgtgtaagaacagtctcccttagattcaataatcaatttccattttgggaaaatcgtttgttactattatttatttgttcagaacccacggaacagattgcccccaaccctccgagttaccaactttataggttttcgctgagcaacaacatcccattagaacggtgaagctcatcatcatgagcatgaaggagaagattcttgttgttgtggtcgccattatcgatcaaaagatcacaaattaagaaaatcgaagaaggaagattgaggaatataagtcgatgagttatttgagtattgatgaggaaaacaaagactatacgaactctctatttataaggtttacggaacctaatccttgccggtttaggattttactcaacgtttggaatatattacatgtttatttcctttttcaattttgattcacctcttatcttgcaaaaaaacaaaacaaaaaagtgacgtttaaagatctctaatccttttctaattaactttgtgtatgatttttagttcttctaatttctatatatttttgttcataatatgaaaatttgatctctgttttaattattttggaactaaatacacatttttaattagattagtaaaagagttataattaaaaaaagttgatctggttggtgtcagcagaacaaggaaaaaagagaggctttttcgttttgatcctcctactcttcttcattagtgaaagctacttataaagtccaaatcttgaagtgcgtgcacggtgcaccacgaatccacgatccagtgagcagcagcaactccatctccggagctctagattcagataagaacaatggcgattccgatgcctactcgccagctattcatcgacggcgaatggagagaacccatcttgaagaagcgaatcccgatcgttaatccagctactgaagaggtcattggtaagcgcttttctcaaaatccgccacagctcgattagatccaagtaaaaatgtatacttttgtttacttcttagttcgatgtggagatattacttgctcctaactctattcatgactatcttttgctgtatcgactactttctttccatgaattttagttgaagttgatccaaggatttgtatgtgttggatgagataggtgatattcctgcagctacaacggaggacgtggatgttgctgtcaacgctgctcgaagagcattatcaaggaataaagggaaagattgggccaaagcacctggagctgttcgtgctaagtatttacgtgctattgctgctaaggtattcattttatgtttgtgattgtgatgctgtgttgacaaagcctcagttttgtttgggcttttgtgtaatcagttttagtcttctgttatctgatgtgtaggtaaatgaaagaaagacggatctggcaaagctcgaggcgcttgattgtggtaaaccattggatgaagcagtatgggatatggtactgttgcttccattttgtttttgtgaaatgtagggttttctttgtaggtttgatcttaaatgtgtttgtttgatcttttgcaggatgatgttgctggatgttttgaattttatgctgaccttgctgaaggattagatgctaagcagaaagcaccagtctcgcttcccatggagagttttaagagttatgttctgaagcaacctctcggagttgtgggacttattacaccatggtagctttccttttgtggttaacttgtttgagtctatatggcacctattctattttatatgaccagaaactgactcatggatctggtttgatgttgaaggaattacccccttttgatggctgtttggaaggtggctccttcccttgctgcagggtgcactgcgattctcaagccatcagagctggcatcagtgtacgtaattgtgtataatctgttttgctcttatgcttctgtattggtccttatttgaacacgtctcatggttctaaattcagtacttgtttggagcttgctgatatttgtcgagaagttggtcttcctcctggggtcctcaatgttttgactggtttcggttcggaagctggtgctcctttggcatcacatcctggcgtggacaaggtattggtctttgagaatacagtaaacataagtcccaacaaaattaactctaaaggctatgattaaacattcagtttaacgtctgcgtttcttaaacgcttcaatgctaagttatgatttcgttgcagattgcatttactggaagtttcgccacaggaagtaaggtcatgacagccgctgctcagttggtgaaggtaattccaatttttgaactttctgctgtatattccttctcctccttttgtttcatcaccaatgtcaatgacacattactcatggcattgttgcagcctgtttctatggaacttggtgggaagagccctctcattgtgtttgatgacgttgatcttgataaaggtgaatgtcacaaaaagtagtttagtggatttggagtttttttataataacttcttcttgtgctatattcaagatagtactaatgcttttgttgctttgagacgagtagacatgacttaaatttgcttaatcttaaaattaaactctttgtatgttttgacgccggcaaatgatagctgctgaatgggctcttttcggttgcttctggacaaatggtcaaatctgcagtgcaacttcccgccttcttgttcacgtaagtcccaatcttctacttgctttaaggttttacctgatcttcccaatatgacatgcgaatatttattactggagaagtgaatgttccaagtcatacgggaagatgtttccattaaggtcaatgacaatgacatttatttcagatcaaaccttctggtggatatgccaacagggatacaattgctgactctcttgtctaaatttttttattttatatcttaggaaagcatcgcatctgagttcatagagaagcttgtaaaatggagcaagaacattaaaatttcagaccccatggaagaaggatgcaggcttggtcctgtagttagcaaaggacaggtaaaatcccagtgatcgttttttctgtcttcatattatttgtcaatttcccatcaggttgcaatacaacaaccaggactaaaaaggaaaagagaattgagttctgtagtatagtgattaacttttgtccctctaattctgaaccgtttagcttttagagcatcaatcaaatcacatctagcatatgatatttcatcacgcttatcatgttcttacttggtaggtgtgcttttcttctatgatcatataatctgattgagctgacaaatgtaaatattacagtacgagaagatattgaagtttatctcaacggccaagagtgaaggagcaacgatcttgcatggtggttcccgacctgaggtattacatctccctcccttacctatccttgatgcagtttcttccagactatgatgatgaccttttatatcatatctatatttcacagcatctggaaaagggcttcttcattgaaccaaccatcataactgatgtaaccacttcaatgcaaatatggagagaagaagttttcgggcctgttctttgcgtgaaaacatttgccagtgaggacgaggcaattgagctagcaaatgactctcagtaagttaacgtttctccagaaagtgaaatctgatcaaatcccatccgctgacactggtgtttaaatcaaatttatcatttaagatcttatgtggctgaaaattattcattgattaatgacagttacggactaggagctgcagtgatatctaatgacacagaaagatgtgaccgtataagcgaggttagtaccggtttcttgaaccattcagatttgtttttaatgcctagcaagtgaaataacaataccatcaaataacacaaacaattggtgtctactttgttaggcctttgaagctgggattgtctggattaactgctcgcagccttgctttacccaagccccatggggtggtgtcaaacgcagtgggtttggacgagaacttggagaatggtacatttctttttctatctcgaatcttgtttttaaaagactatatcttgatggcttgtactgaacaaatcttggttatggctggtttcttgcgtgcttcaggggacttgataactacttgagtgtgaagcaagtgactctctacacttcaaacgatccctggggatggtacaaatctcccaactaagtaatgaatacattgtcatggaaatggaaaccaaaccaaatgctgtctgttcaaatctttgtgcttttattatcagtctgtctagttcggtcctgaaactcttttgtaaaacctgttgaatttataatgaataaaagatgctttgctgataattattggttgttctataaaggccagtattgaggcaccattttaggctctggtgcagcagtatcaagaacatgaaccattttatgtcaccttcaagtcacatcaaagttaaaactcacatggcaatcaattccaaatcataacttttttttttactataattgcttgaaataaacattttatgagatctgaagatttgtggattttttttccattttttaaatagtaaaatgtttggcaaccaaatctgaaaaagaggtaaagacgagaggtctcgcgcttatccttaaaggactgtggtgaatggtgagtgtgacttggagggaccccatcaccgcaacaatacagcttcttagatctcgataaccacaactaacctgtcacagtttcgattagatcttctcaaaaacttcacctttttttgtttttccagtttctcagaggagatcttccttcaaagctcaaatccttttgtctgaattgtgatactgctgtccccatttttctgcaagttgggaaatttctgtcaaagttttgtgggtctgttaaaaagatctgagctttgaacatggggagctcaatggaggagaaagtggtggctgtgatcatggtcggtggtccaaccaaaggtaaccgctaaatatgtttgctttttttctttctttctttctgattcctcctcaaaagcaaatgactgtgaaatctcgattgatcaaatctaattccgttagattttgatatccaatgcgtttctctcttgtttggttattagtttcgtgtatccgaatgattatggttctgattctgtgtaaatattggttattgagtgatgcacaggcactcgatttcggccattgtcgctgaatattccaaagcctctgtttcctattgcgggacaaccaatggtgcatcatccaatttcagcttgtaaaagagtaatattcttcactcatgatttcaacaattcagatcactggagagactgagagatgatgataccaatcccttattgtctgcagattccaaatttagctcaaatatatcttgttggcttctatgaggaaagggaatttgcactttatgtttcagccatctctaatgaacttaaagttcctgttaggttagtgaatctctcctctttttgcgttagcttcagctcaagtatcagtggctcattcgtgtagctctgatctttcttctctgttttttttttttgggattctgcaaattagatatctgcgagaagacaaaccacatggttcagctggtgggctgtatcactttagaaatcttattatggaagatagtccggttagtctccaaggatcttactatatagaatcattcttcttttgtgttttatggactaaatgcttcttctcacatctgagttcctatatctacttcttgcagtctcatatcttcctgcttaactgtgatgtttgctgcagtttccccttgcccaaaatgctcggtatattctttttcattaatccaaaccttgtgaggtctcatcttatggttttgaaggtcgttcttaactattgctacttttgatcaacagaggctcacaggggatatggtggaattggaactcttcttgtgatcaaggtttgtgattgtatatgattagtctggtttttgtttttttggcgggtcaatcaaatttgcttctgcgttttggtttttaggtctctcctgaatcagccagccaatttggagaattggttgcagatccagttactaatgagctgcttcattacaccgagaaacccgaaacttttgtatgtacatttattactgagatgacccaatctttatagcatcttcaagctttgattcttatgttttattttggaaacacaggtcagtgatcgaattaactgtggtgtttatgtatttacacctgaaatttttaatgccataggagatgtttctactcagaggaaagatagaggtaaagcagtaacaaagatcttacacataatttgtgttttcttgtcttagctttctatctttaaagacttctcatctttttcctctgttttgttgtagcaactctaaaacgtgtttccagcttcgaagctcttcaaccggcaacaaggtttgtcgattgtctccttgtccataattgaaaaccattcgaatcatcttcttaaaatgatcttttaacttctttaaaataggatcccgacagattttgtaagactggatcaagacatcctttcacctctagctgggaagaaacggctatatacttatgagactatggatttctgggagcaaatcaaatctcctgggtatgtattgcttgccttgtgttttcatttctttgaagccgcaaggatacaaaatgtttagcagcagctgaaacagggatagtgtttatggctctgacttatgagttgacttttgcacaggatgtcgttgaggtgttcaggactctatctttcccaattccgcttgacatctccccaactgttggctagtggtgatggaacaaggagtgccattgtgattggtgatgtttacatacatccttctgcaaaagttcacccaactgcaaaggtacttacatatggttttgtccctcgttgaagcaatttcttctgattccacttttatcacaaagcattaagtttcatctattaacagattggtcccaacgtctcaatctctgcaaatgctcgtgttggaccgggcgtcaggcttatgagctgcatcatccttgacgatgttgagatcatggtatgtctacttatacaagacacaaagtgaaaaacggttaaattttctcgaggttgacccttcagtgactctttgcccaggaaaatgcagtggtgactaacgcaattgttgggtggaaatcttctatcgggagatggtcccgcgtccaggcatgtttccctcttctgctcatctcttaagagcctgactcattctttttggaccttgaaatgtttttgtttgattcctttacaatcgtgaacctgaagttgtactttgttgatcacaggctgagggagtctacaattcgaaactcggagttacaattctcggtaaactgttcctccattgtagctccttctctttatatacagaaagcaaaatctctttatagacagataactaacctcaaacataatggttacaggagactcggttgcagttgaagacgaggttgtggtgaccagcagtattgttcttccaaacaagacactgaacgtcagtgttcaagacgagatcattttgtaactgaaaaacggaagttgaaaaatggaaccaacccagtggggagcagccacactatctccctctgattcaatatctactggagaaccacataagcaaatatttgggaactaattcacatgtatcatttatttacaccaagaattttccaacattgtatcaattccattttctatactcacaacacagctactgtaaaaggcactgaatttttgcccagaataataaagcacttgtgtagttttggcattgataataaactgttcttgcaaaatcctatgaagcctttcctggtccagtctctattaactgcaatgcaatgctttggggaagtattgattgttgtaaacatagcaagagtctatccccaatcacatgcagactagtaacttcatagcctgaacttccggagaagccggctaccagatttactctgcaatctcaagatctcctttgcaaaagcttgattccctgtcaaaagaagcccgttcagaactcgattaaaagtaaatttccggggtataaaccctctctcaaccatctcaagcaatagtttaccagcgaccaccatatcttctgatctttttctcacaaacattccacttatcagtatgttgtaagtatctagatttggcaagcaatcaccactccccattttctcaaacaaacccaacgctttctcgacctcgctgcattccgaataataacggatcatcatgttatatgtctggaagtttggttcacagccttcattctccattctctgcatcaactcctctccacgactaaactctccagcgtgaaacaaccctcttatcaacacattataagtcgtcacattcggctcataacctctcctcaccatttcctcaaacatcacaaccgcattctccacattatctttcttacacaaaacttgaatcatagcattgtacgtcgcaacagaaggaagcacaccttctctaatcatctcatcgaaaacattcctcgcccgctttatctcccccgcaacaccaaacccgtgaaccacagtagtataagtgacaacatctatttcacaatcccgtttcttcatctccaagaagaattcccaagcatgtctaatctgcccagctctgaaaaaacctttgagcattgtgttataagtagtcaaattagggtttatccctctctcaaccatctctttcaaaacttctaaagccttaggcgtccttttaatcaaacaccaaccgttaagaatcacattgtaagtaactgtatcaacactaaatcttcccctaagagctctaaacaactcataagctttctctacgcgtttagatttacacaacacatcgagaatcgtattgaaagaagctaaatcttgaaaacaaccatgttcgtgcatattcagaaacagcttaaccgctttatcgggcttcccagcggatgcgtacctctcggcgacgattgcgaaggttttgggagaaggaccgatgcggagagagcgcatacggtgaatgagtgaccagacggtggggtggaggtgaagacgggcggcaatgtcgattgcgagatcgaaggaggaagcgtcgtggacatattcgcggtggtgattgtcgaggaagtggaagaattggagagctttagggccgtggttccagagtcgcttgagaacagagttcacgagatttggggtccatggggttgttttggtggagagtagaaattgatcgtcttggtgagttgtgttcggagaagagaggataagcttagctatggcggcggaatctgccggcggtggtttgagattggctccggcggccgaagtacatagcgatttgctaaaaagacgtttcatcgattggtttgttttattttgttttgaaaaaagtctttttaagtgacttcttgggtaatttggtgtagttgtatcacatttgtttaccgctaaataatgttttaaccgttttatggaacgtttctttctttttcagattgtacagagttagttggtttatgggtctaattgggcattctttggaaatggtctcacaagacattgtggagttcaaagaagagttcgacgattctcacaaaccaaacagcagagtcgattgctaaccaggcctttccatctaaaacatattggttataattgatgcattgcggtaggagtatagcgtatccgttgtaattgattatgaaaataataccaaagcgattaaaaagatactttcaccgcaccgttctttctatccgttactttataccacttttaattatttacatatcgttaaccgctttctctatctgcttaaatttttgtaccgttttatgttattaatcaaaccttgaatggatatgtttgtttttgtaatggtgtccaccaaagtttatttgatgagttacaaaaataattatattttaaagttttgagaaaaaaaatcatgtttgtgaactttcaattgattcacctcatgaagattttataagttctatatagattttgtgaatcttcaaaagtacaaatatatgtactctttttccaacataaatgtagtgaaaattttattttatgtgaaagaatgaaaagaaaccaagtgaaagaaattaatagacagtacatgtaattactgaatacgaaagataaaaagagaggagagtagtcattgtcagatagaaagaaagagcagacaaaaggatcgtaaaatcaaagaaaattgggtccctaaaaagattatgaccgtgaagacacaatattacgttttctgacaagacataaacacatcactcatcgcctttagattctcttccgaccctcacaagatcttaacaacaacaacaacaacatcaagatccgatcctccagattctcttctgtgtatttccttaaatctcctcctctttctctttcctatttatttatgtatctcactcaccgcttctgcctctctctctctctctctcttatttatgtaactcctcgtcttccttcttcacattgatttctgcgtcctttgacgttcaaactttaaacgtttcttcatctgttttgttgtttactttcccgagagaaaacaatggctctcagagatttatcttcttctttatcttcttcttcttcaccggagttacatgttcttgccgttgatgatagtttcgtggatcgtaaagttattgagagattgcttaagatctctgcttgtaaaggtaaaaggcaaaactgtttctctttacgttttctgcttttcttttgtttggtttctgattcgtttttttggataaatttggtgggtttctttatatagtgacgactgttgagagtgggactagggctctgcagtatcttggtttagatggagacaatggatcttctggtcttaaggtatatattcattcatttcttagaatctctctgttttctagcaaaatcaaccctagacgttgaaacttgaagtgttcttatgctggtttggctcccaagaaatctaaggtttcacaatgtggatcaaaagtttaacctttagaggatgattttattatttgtttattgatgccgtttatatgaacaattttgcaaattttgataacaggatttgaaagtgaacttgatagtgacggattattcaatgccgggactaacaggatatgaactcctcaagaagatcaaagtaaatttctattttgtgtcatttattagagcaagatttgaataagctcttctcgtgttttccttacaaaaattctgttgtatatttgccaggagtcttcagcactcagagaaatcccagtagtgataatgtcttctgagaacatacaacctcgtatagaacagtaagtcactatagctaaagatacaaaactgaatcaatggatcttaacactgtaatctgatttttttgtctatcctctcttttgttgttgttgttgttgtagatgtatgatagaaggagcagaggagtttttgctaaaaccggtgaaattagctgatgtgaagcgtttaaaagaacttataatgagaggtggtgaagctgaagaaggaaaaaccaaaaaacttagtcctaagagaatcctacaaaacgacattgattcatctccatcatcatcatcaacatcttcatcatcgtcgtctcatgatgtttcctcccttgatgacgacactccatcttccaagaggatcaaattagagtctaggggttaaatgattgagctcaatcttttctcacgttttctcttgatttccttgtgtaatatacattatttttgatatatgcaactatgtaagtctagattctaatgctcaccttattactctgttttttttttttgttaaaacaaaaggagatcaatgtgaatatgatttaaacaattttataaaattaaatactttgcctacagtatatatattgtttcctacttcacaaccagatcaattagattctataatgtaacatataatttaaaagtacacgtaaaaagattttgtatatgatcttccatgtgacatacacgatttcacttgtatgtgtttataattcataaactttcaagcatcagaaaacaaaaaaaaacgaatataatctttgttggaatacattatctattactatattcctagttgtatagcagaggaaacttgtttgcacttacgtggcatcttatgattggttcagtgatgtctgttttagaccgttgagagacttggataccattgcggtcttatcccgaaactccaagaacacataattttttttcttggtggtctctccaatggctttctctgcgactgtgtctcagctttcttctctttcaaccatctcctcttcattaccaatttcttctagaagactccctcatcgatctcttcctcaattcacagtcaaagcagaagcagagaaagagaaacagagcacacagggcaagtctgatggggaagcatcaccagctgcaaccaaaacccctaaaaccctccccaagaaaccggtttactcgagtctgttccctcacttttgtttctaagtgttgaatccaataacagatttttgataattcttttgaatttctgtttctggtggatgagaaaacagtgaagaagggccaaatcgttcgtgtggaaaaagagaagtacctcaacagcatcaatgtatagtcgaaatctttcccagttttgaagctgcttcttcaaaaatctgtttctgaaacttttgttttgctacatttgttgaaattacagtacttatcagttggacatcctcctttctacaaaggacttgattacatatacgaagatcgcggcgaggtataacacaatcccttttgaaaataaatcacaagagatttcaagcttattgaacaagtaatctaaatcttgcaggtcttggaccttcgtgtctttgagacaggagagtatgcacttgtaagtcagtctccacacaaattgtttattctgtttcataagatgagctaatggattgtgaattttggagactttaggttggatgggttggtatccccaccgcaccagcttggctcccaacagatatgctcatcaaggtactcataattttctcagtacatcaacaatacgtagcattgtcttgatgtcaagtcatgattgtttctgtgttcttggtttttgttccaccgcagtgtgagaaacttgtttacgagcgaatgtagagtcaagaaggttccaagaagaatcctttggaatgcaactgatataccaaggattgtgttaagctgagatgaacgataacaatggcgcaccatcatgatcatgtgttcaagagtttgacaaagtatcaacgttacaattagttacaaaaactgttgtggagtgtggaatatgtcatcagactcctataataagaatgcagcttcagtaaacggatgatggtaattttatctcatcgatctcccaacataaactcatttctcacagcttcataaaatttcctctggttttgtctttggcttccactttccgaaaaccggaaacttcttcatcatcacaaatataactactgacctaatggacggatgatggtaaatttaggtgctctaaacgacgaagacaagcggaagtgtgccaacatgtttcaaattcacctcgtaatcaatgtattatgtatgtgactaggagagtaacaagacacaaagccaatctcatctctcacaacttcattaaacaatcctttcctctgctttgtctttgacttccattttctgataaattcttcatcatcacaaaaatactattgacgtgatggtgatgttagtgggtttcctatgatttctccttttgggttttcccattggtgaacggtgaatgagagaatctagggtttggatttgttctccatacaaggatttaatcccattattatgtatttttcctttttttttttaaagcttttttagattttatttatttttaatcttttggcttattctaaacttttgtattacttccttttcctattaggaataggaaatctaaacattgttataaaaacccgagtcaacaaatcaagagagaaaacaatactcacaatcttaaacaaaccatagtactttttcttctttcaagaattcccacagaatgacagtttctgtttctctagattctctacctgaagaccttcttgtagagatctcttaatgtgttgcagcttcatcattatccgagtttcgcaatcttcaattagtttcgaaatcgtttaaacgtatcagcaacgatcgatacattctgcagcggctttccctcaataaaatccctcttttaccatggcgcaaccgtaaaaaatttcacaattttttcaaaagatgtcgcaagagtggaaacctagaggctatataccgtaaaggacttgtcgattactttcatcgggatagtcatgaacgtcaacgagacagaggactcaaacatatagcaaaaactgcaaacaatggaaatcaagaagcacaatatgtttatgggttgatcctaatttgtcttggtggcaaaacaaaacaaaatggtttcaagatcttgtcttctctacgaaaacctttgatgttgtcaaatacgatcaaggagatggaaaaacatcggacacatatcagaaatatgtggtggtggggcgaaccgatgatgagacacctacaaaaaagctatgttcgtgagaactgcaattgcgatggtcgaaccgagatctttcccaactattgttttcgtcatcgttttggtgaggacgacgacatgcttacttcttccgcttgtgagatatgtttgtgccatcatgaagtcaaacttttctttgctaatattaaggaatgatcttttgatgtatcgaataaaagactaatattggtttatgtgtattatatgattcacaaacatgaatgaaaatttattgccgagatgacaacaatctaattaagcaaaaccacaaaattcttgttcctgatgaaactaaggacaaaactagaaaaaaagtttcatgaaacttttggaacttctttctttctctcttaagctctgtcaagtcctctaaacgacggagacaagggaatagtgccacgaccacgttgctgataacctacttctccactttttttactcgtctttttataatccttcctgcaagctggacaacgtgcttcgttttcactgatcttgttatggcaaaagagacaaatccgaaacccacaagtacatggttcgaattctagatccgttgcatccatcaactcagagcaaataggacattcttcatcaccatcacctctttgcttctcagagttagacctcttcttcttattactgtttctgtgaatcgtcgtctgatttccaggtgcagcttcttgcttgcacttgttcatcctctggcttgtatctggaatcagatcttcttcttcttgctcaaaatcttctgtcacaagtcgagagctttcgttgttatcattctcaaaggagtttaacgcatctttaaacccatcccagttatcataagcatcgtcaaaaacttcttcctcttcctcagtcatctgcttagaacaacaaaagcaatcaccactaacagaatctttcctcttgagaacactcgtgggactactagcaaatgatgatgtcctttcaagatcaatctcatcatcctcatcatcatcataatcaatcctccaagctttttgatcagtcagtttctctaacaaagatctcaatctacgtccaatttcttcttcatctacatttgcttttttccctataccattcacaaacaaattcatcatcatcaacactcgaaagattgaacaaaacttgaaaacttaaagattcaaaggctcttacattgagaaatccattgtttgcgacgagcatcaatcttccactgcttcagcttacaaaaccaattcgcctgcaaatgcacacaagattcgatgcatagattaagaattgacgattatcaaccctaaaaggtatccacatgacaacgaaaaacacggttcttcgaatcacacagaaactggggatttggtattagacgcggatcgattatacttttcttttgaatcaagcgtacatactcggatacaagaaacgaatcgaccgcattaagattggagtgaaattcgaagaacacaccttgcgtttcttggagaaatctgttgaaatcggagagccatgaaagagttcagagtctgtgacagcaaccatgatgatgataatctttgagcaacacacacacacaagcgaaacagagagagagagtaatggcgatgatagaagaaaaaaccctaatacttaaatctggattaagagagagaaatgaaaatcggaaactgctctgctacgctccttctatttctcagtctctcgctcggagaaccaaatgcttgtgtgtacacggtatataaaggatctcgtttgggaaactacccctggtttgacttttaatttacgaaactatacccttggtgatttttgattggctgaaacgacgtcgaattagtggattttttttagtctaatggctttttttggtctgtcaatgaaacttggactacaaggcatgtagactgagtttttttcccataacaagattaggaaaaaaggggatgcattttaaataattaagcaaactagatatatttgttaatgtgtttgtattgataaagaaaataaaataatgaaaaaattaatgaattttgaataataaaggaactaaatacaatagttacctttttagtattattaattaagggaaccttctactgtgtttaaaacacagctcaacaatttactgtagttgatttttaaggtctgtgattcttaattttaagattatctagaaaatatataatgggtttcataaataatcaaaaatattatttgtcttgaatctaagactgttatagattatttagtaaatatatcatgtttccttaaatgatcattaatatattatttatgatcataaaaattcttatattttcacaaaagaattgaaagaataagtcctccgtaagtcttaattactctttacgtagaagtaaagccggtaattatattgaaacggtctttaactttttaaacagaagattgaacaaactcgcatttatagatatcgcaatctcttgagtcaaattatttatttgattaacatttccttatttagtccatgattcatggtcgcaagtccaaatttccatgaataaactttgaccaagtcacaaaaactagtatttgctaaagacttctacgtaagattatttacataggtacgaaatggaagcaatacaatggtagctctttagtcttacaccatccaggtgtaagtaagaattttaaagtttccacctatccttatatattagatgattataaccattttgctggagcatcctactggttgattagttctgctgcaaatctttattctacgagaatggtacaagctgtgcccattaaaatacaataaagaaacatagaacattcagaatcttggacatcatatatatataaacccatcacaatggacaagagtttacacccaaaaccataatgcaacaaaagggcactgctactgatatcagtttttagaccatacactttcaagtttaaaggcaagaaggaaacataataaacttaatatgatatagcaaattagatgtatgtcgatatttactaaccttccaagccacatgtgctaagcatagactacatctctagatgattcactggtaaagctaggcttcagagactccaagtaaccatcgtctttctcaacagtcttctgtttcatgtttctacctcctcaaacgaggaatctccttcaagattacttaagacctccttctttctcttcctcttgaacgtgtacttgatgcaccgatttttactcagtgctaaaactggagtttcttcgcacaaaggagatgcagaaacctccatattctcacagctctctttttcttccttccttgcctctgtttcgctaatctccagctttctgtcattttcatgttccctcggaggagatgttttcaaggatataagagtgccgacatccttctgagaagagtttggagacactattggggcttctccatctttaacagaagatatggagtcagtagcatcagcacaaccagacatttctaagctctctacaattttacaagacgaaacttcgtgaagacatactccatcattcacatctcctacttctacagaggaagacagaaccccattggccatactgctatctactgtgtggatcatctgagctaaaccttcagtttccctgcgttttgtcagtatagatggaagagtgtagtgacattgatccttgttatctttataagaacaccggttaatactatttatgcgagtcaaagacggtacttttatcccattagccaccactgatccattttgttccactgggatgcaaaaacctacagcttctgtgttctcgtgactgcaagaaacctcaggcattacagaaactgcagcatcacggttattccaacagaggttttcctcatgattctttttaagatgtttctgaccatccgtaagtttcttgagctcatcgtgaagtactctcaactccaacctcagctctcctacaatatcttcagcttctccaagctgagcttcaagttcctcaaccttctgttgctgcttcaaggattgcatctctgtctccttaacctataaacacaaatcggttttttaaaaattagagttgaggaggaaacgcaaagccagccacaaaagaaagatatactccattagggaaagctcatcctcaagcaaacgtgatacagtctctaagatgaaaaagctatatcccccacactgaaaaacctttaacttaaaaatttcacgatgaaatgagaattgagagcataagccatgaaatatgtgtaagcctcactgccaacaatggtacaacgaatctagaacttgctgacactaagctacacttggttacgctcattagttttaggccttaggtttcatgaacaaatatcaatggaggaagagaaaagctatatctgcaaagtatcaatgtaatagtctcaagagtgtcaaaaacaatggcttgtatcaacgttcaatgaagtgaatgtagtgaaaaaacatagcaaaaatgatagtctcgaagcatatcatttgaatgatggaagattttagtcacttcaaatgtcaaagactgaataaacaaaactcagagtcacacacacacacacaacattaacaatgcttaaaaccatgaaagcaaggctgaaaaacttaatttcaaaagccatcttcatatgaagcaagaaaaaagaaatgcctctaagaccccaaaaacataatcaggcagaaaccaaataaaacaaaccaagaacccataaacaaatgaaaataagaacaaagtgatagtaccttggaatcaagcatctgtttaagcctaaccaacgtatgaagtgcttcatttctaaccgtcacaagttcttgctgatacctacgcgccttcttctcagaaaccatcacacgtgccgccgcttccttcgtcgtgttcagtatcgtatcggcgtaggctctcttcaacgccgctaaggtctgtgttaacccaaaacaaaacgaacaaaaaatcatcgcaaaccccgaaaagaaaagcaagacaaaacccacatcgtgaaacccaaaatttaaacaaaattagcgaaatcagcaacaagattctgtccgataagagaaacaaggtctagaagaaacagaacgaaactaaacgaagaaaaatccgaaatcgaaaaaaatgaactcgtgagaggaggagattgagggggtttaaggtaattgtacctctgggtctgccattagagccgataatgcgattgcagagaagcgattgttgattttccgaccaaggtcgcgaactcgccaagaagaaagaaaaagctaaaaaggtttttttttttttttttgtttctttttgtgtttccttgaagcgtctgtctgttaggaacagaaagaagtataaagacctatttacccctaaaaactcgatgttatttctcaaacgccacaccacacgtcacgtcagcttcagcatttcagactgcaaacggcggtacggtttcccgttatctccgtcactcttttcgtaatctctcttttgctttttacatttttcggtgataaatttacaatttcaaaatacactggacttttaatttttacctcatttagacaattagaccactagatttcgtagcttttaccccaaacaaaagactatattgtagctagttctaattattgaattttgtatcaactattccaatacgagacatgatataatgttccatatttggtagatacattcaaagaaaaaaaaaatggtagacagctaaaaaagaagctagctcatgggattaaaccaaaattaagatatccaaatgattttgaagtttcgattgcctagaagatggatggacaattaaaccgacttatagaacattgtctagtttacaacatatattaccaatgtaattgtattctactatttactagtgtacactaatactacttttcttgcaattttaggcgccaattttttttgatcgaaaaatatcgagttaaccaattaaaaccgggaagtaatcattaaaccgggtaatgaccgggtgattactcgagactgttatccacaataagaatccacgtgtcttcttcaagcccctccctcttcttccatttttccgccatttcacctagagagcgagcttttgggtgagaaaatctcttcttctaaactattctactgccaatcttaattcgtgcgtttctgtctagagcttggtggtgactagtaacttagccgttaatcttaaatctctgattcaattcaaatcgaattgcgattttcccgagaaaatctcgtttcacttgctggaggatttttgaatccttatgtgaactctagttacccaaaatgaacctagcaattccaaatcccaactcacaccacctctccttcctcatccagaattcaagcttcatcggaaaccggagattcgccgacggcaaccgtctccgtttcctctcaggaggaaatcgtaaaccatgctccttctccggtaaaatcaaagcaaagactaaagatctcgttctcgggaacccctccgtctccgtggagaaaggaaagtacagctacgacgtcgaatcgctgattaacaagctgagcagtctcccaccacgcgggagcatcgccaggtgcttagacatattcaaaaacaagctttcgttgaacgatttcgcactcgtgttcaaagagttcgctggtcgcggcgattggcaaaggtcgcttcgtctcttcaagtatatgcaacggcagatatggtgcaaacctaacgagcatatctacactattatgatctctttgcttggtagagaaggtctactagataaatgtcttgaggtattcgacgaaatgcctagccaaggtgtgtcccgcagcgttttctcttacactgctttgatcaatgcttatggtcgaaatggacggtatgagacttctcttgagcttcttgataggatgaagaatgaaaagatatcacctagtattttgacttacaacactgtgattaatgcttgtgctagaggtggtttagattgggagggtttattgggtttgtttgcagagatgagacatgaggggatacaacctgatatcgtgacttataatacactgcttagtgcttgtgctattagaggtttaggtgatgaggctgaaatggtttttaggactatgaatgatggtgggattgttccggatttaaccacatatagtcatctagttgagacatttgggaagttacgccggctggagaaagtatgtgatcttttaggcgagatggcctccggcggtagtttgccggatatcacttcttataatgtgttgttagaggcatatgcgaaatccgggtctattaaggaggcaatgggggtcttccatcagatgcaagctgcagggtgtacgccgaacgcaaatacatacagtgttttgctgaatttgtttggacagagtgggaggtatgatgatgtgaggcagctttttcttgagatgaaatcaagcaatacggatcctgatgctgctacatataacattttgattgaggtttttggggaaggggggtattttaaggaggtggtaactttgttccatgatatggtggaggagaatattgaaccggacatggagacatatgagggtataatatttgcttgtgggaaggggggacttcacgaagatgctaggaagatcttacaatatatgacagctaacgatatcgtgccaagttccaaggcgtacactggggttattgaagcgtttgggcaggctgctttatatgaagaagcgcttgttgctttcaacaccatgcatgaagtaggaagcaatccaagtattgaaacattccactcactgttatattcgtttgcaaggggaggactggtcaaggagtctgaggcgattttgtccaggttggtggattctggtattcccaggaacagagatacgttcaatgcacagatagaagcgtacaagcaaggaggcaaatttgaagaggctgtgaagacatatgtagatatggagaagtcaagatgcgatcctgatgaaaggacgcttgaggctgttttaagtgtgtattcttttgcgcggcttgttgatgagtgcagagagcagtttgaggagatgaaagcttctgatatactgcccagtatcatgtgctactgtatgatgctagctgtttatgggaagacggagaggttagtgccttcgccagtaatacacggtttctgatgttttcttttgcgtgtatttttatagctcataccttactaagcatgatgatttattccatcatcatagcattttgctctttcagttgccttctgtctatacatggtcaggcatgggggagatatgctagtgtaatgtagcaccctagttaattttcttgcagctaacttgagtgttctggataagcagtaactttagccattgttttgtatataacatcttaagattttaagcaacacttcaaattttttttttggtttataggtgggacgatgtcaatgagttattggaggagatgctttcaaatagagtatcaaatattcatcaagttattgggcaaatgatcaagggagattatgatgatgactcaaattggcagatagtggaatacgtgttggacaaactcaattcagaaggatgtggtttgggaataaggttttacaatgcacttctggatgctttgtggtggctgggccagaaagagcgagctgcaagagtactcaatgaggcaacaaagcgtggacttttccctgagttattccggaaaaacaaacttgtgtggtctgtcgatgtacataggtagcctaagatccctacactggcttcgtttcatgtgtatgaaatggttgagtaccagtcaatctaattcttggttttcaatgttctgcaggatgtcagagggtggcatgtatacagcactatcggtttggctaaatgatataaatgatatgcttttaaagggagatcttcctcaactagctgttgttgtttcagtgtaagtattttgatactgggtacctacctcattgcaagatgccttcaagctttttatcttgccttttgccttttttaattctttctttctaacctctcagacggggacagttggagaaaagctctgctgcaagagaatctcctatcgcgaaagctgctttctccttcttgcaggatcatgtctcgtcctcattttccttcacgggatggaatggaggtcgcattatgtgccagcgatctcagctcaagcagttactgtcaacgaaagagccaacttcagaagaatccgaaaataaaaacctagtggcattagcaaactcgccaatatttgcggctggaacaagagcttcaacaagcagtgacacgaaccacagcggtaaccctacacaacgaagaaccaggacgaaaaaagaactagcagggagcacagcttaagaactagacaacgtagtttctgttgccaagtccagaaatcaaaggcctcttctgccttcctccatatagactggtgggtgaaaactgtgggcgtatttcacaagcactccatatccatgataactatgctatggtttcaagcagtagagtcaacctctgttagacagaagaagctggagaagaagataaatggtgatcttagtttatatgaagaagcgtctatatgaaaatctcaagtaagtagccaactaagtgttttgatggattgttagacccatgattttgcagccatagattttttttcgtttttttttccattcaactatgtttttgattactataaagctaaatgctaatgtaagatcaaagctctagttacaattaaaggatctattaatcaagattcctcagggaagctctagtttttgcttgtgacctcacctgatgaactctctctgtttcgaaatctaacttattacatagcaatgacccaactccacccagaataaagaaaacaatctgttgtgcaagattccttcttcggtctgattaatctttttctctctctcgtcctcagatatgtgtttgttttctgatttaggaaagtcactacaagtttgtcatccaaattggtaataaaataagaaaaagattggagaaagaaaggatcttcctatagtgcttcacacattacaactttaagattccactttgtgtgcgcataaaagtaatggtggctttgctttctaaccgatgctagtgctttgtgtgattttgctgtcttccaaaactatttaccaaattttgtaaatactttttagaatcttttccctacaaatctaaaatagataaataataatagtatgtgatcatattgcttacagtcaaatcacatcctaacattctactaaaagactaaaactatcacctttttgttttttaatgctatatagttgtgatcaagtctggacatacgatcatgctgtttatactacaattaggtccttaacagcgtcttaaaatttactcttagctagaaaacgacaaattcgactacacaatcatttttgttgttgaattagattcctgaaattgtaagtttttgtgttgaaattcaaagttataatttccaaaaaggattcacctgtctcccaagatttttttcttaataatcaactcatagatccacaagatatagtattttagaagaaaaaaaagtacaaggatggagctgtaactaaatagattattagagcagagtacagaatcatttcagaagctgactatttttctaagctcaagttgcatgcgcttaggccttagagacattgcgttgaccagtacattataacctgtagatttttatcataaaaatacatgagggtaacgttaagaaaaataaaagcgtcgatttcatttcatttttctcattctgttatttcatttttttgtatttaactttgagtttgcgaaagtcaataaatatttcttcgttatacgacctacattttttggtcgacatagcgaaatacttttttaacttcttattataggataacatttatttaactcttttttcgtcatcctataagattaattaaactactaacaaaaaacctaataaatctagtcagccaatgaataaaaaaagtctatccaaatgaaaactctgtagagagacaggcaggtaagaaaaaaatacaagaacagacgaataaaaacaaaacacgtgtcatatggtaccgtcaccaacacctacaacatgtaatagtttaaaaaggaaccacgtggcttttggcttataaaagggtccccaaagaagctcagatctaactcacaccactccattgcccattgctctgtgtactttgcttctttaggagaaagaaagcacaaggggcaaaatcggaaagattatcatggccgacggtagtactagttcttcggagtccactaccgcctgcgctggaagcggcacaagaagagagattatgctgttcggagtcagggttgtgcttgacccgatgagaaagtgcgtgagtttgaacaatctgtctgactatgaacagacggcggagactccaaagatcgacggcgaagatagagatgaacaagatatgaacaaaaccccggccggttacgcctcggcggatgaagctcttcccatgtcttcttctaacggcaaaatcgagaggaaacgaggtattactcttcgattgaaacttttttttatcattccataaatttgatcactttaaacttagggatttgttagatatggtttgagaaatggactatgaacaactttatgttcatttggatttagaaagatggctaatttattgggtttctttctatttcttaggagttccatggactgaagaagaacacaagctgttcttgcttgggctgcagagagtcggtaaaggagattggaaaggaatatcaagaaactttgtcaagaccagaacctctacacaagttgctagtcatgctcagaaatacttcctcaggcgaagtaatcttaaccgtcgccgccgaagatctagcctttttgacatgactactgatacggtaaatctctaatcctttgtgactctagtaagttaagtggttaggtttagtttttagcttagttgtttaaaagaaactaatagagagcctttgtgaattgttggttagtgaaaacttaagtataacaaaactgattttgcttggttttgttatcaggtcatacccatggaagaagatcaccaagtgcttatacaggagaacacatctcaatcatcttctcctgtaccggaaatcaacaacttctctatacatccggttatgcaagtctttcccgagttcccggtaccaacagggaatcaatcatacggacagcttacttcatcgaatctcatcaatttggttccattaacttttcagtcaagtccagcaccgctttctctcaacctctcactagcttcatctaatcttaatgaaccatctccttcaatgcatccagcattcaacacgattggagtcgcttagagcttatcctaaaggtgaaaatctgcaacacaccctgtttgtttctttgctgtacagataggtcttgactttgttataaaaaaattcgtcaaatttatgtatttggctaaaaaaaatctgttgaaaagaagaataataaacagagtttggagataggacttaagtggggttttagggttcataatcatcctgtgtttttccttccatgtttggaagttgttgtaatactctctaagttcattcgtgtggatctatcaaaacttataaatcatattaacgttatgtttgttttattcatgatctcaatcataaacagagtcgtagtacttgcttatcatgtggctatctaaatcatgttagatgattcatggggttttagggtttttataatatatctgatttccaaggataagatattttatgtttgtagaataatgtcattatctttaatgatgccaataatgtcaaattttattggtcacttccatcatagtggagctttttcttttcccatcagatgcttttaatatattttgtgtgggatgattacatattacccctgttgcgtaagcaataatcttccaatcacagaacatgatccccattcattaatcgaccaatcaaacagcatcatttttatatgatgatgatgtatatgtgtatgtcatgtgtgtgttggcatgtcctctgtttctgtcgtgtatggttgtattcagttttagcgtcaacgacaaacttctcctcacgtctaagcggggaaaaaaaaaaaaaaaacgaatccagtttatctttgtttgttttgtatctctctgtcttttgacattgtctctaaatttatcaatttcaaatctgcgactatcctttgtttttgggtactttatctcatcaaattccagcccaatctagactctctaaacccagaaatagaaacacaaatcacaaaagattgagatagatagatcatgatctctgttctttgttgatctttgaccaaaattcgatctcctatgtatatacaattgctctgttttttcttgttcttgtttctgcttttacaagccacaatgtctaaacgttctttcaagaaatttgtggaacaagaactcggatctcttcctcatttcctcatctacactgttcttgaatggagcctcattgttttcctcttcatcgacggcgttatcgcctttctgtcaaaccaattcgccaaattcttcgacctcaacattccttgtcttctctgcaccagaatcgaccacattctcgtccctagagaccctcaattctattacaacgagtcaatctgcgactctcacaagaagaaagtatcttctcttgcttattgccatgtccataagaagctctctgagattaaacatatgtgtgaaggatgtcttctctctttcgccaccgagaaagattctgactgtgatacttataagtctctcattggcatcttacataaagatctcgagcttctcattgacgatgaacgagaccttcccttggcgttcaagaaagacgacaatttagtccagacaacaaaaaatctggtggattacaagactaacaacattaaaaatgatagcttgaagcaacattgttcgtgttgtggagaattattgaagataaaatctgagaagttaccgaagaacaacaattctttccttgctcctgctccttctcctagggtatcgcacaacaaactgtctgaaaacgaatctgagtttaaggatatggatgtggaccgaacaccaagttttgtaagaggaggtaacaagttttttgggatccctctgtctgattcggcgcaaaacagtccacgatggtccgttcgatctcttaagaaatccgttttgaataagacagagaatgcttcggacacgacagatccaaccggtgaatccattcttaatcagctcaagaaagaggttcgcttggacaagaagtcactcattgatttatatatggagttagatgaagagagaagtgcttcagctgttgcagccaacgaagcgatggctatgatcacgaggcttcaagccgagaaagctgctgttcaaatggaggctttgcagtaccaaagaatgatggatgaacaagcagagtatgaccaagaagctttgcagtctatgagtagtgaattggcgaagagggaagaggaaatgaaggagcttgaagctgaatttgaggtttacagagagaaatatggatgtttgactgatcaagaagatgcaagggaagagtttcataaacaaaacggcaatgctagtgcatatgatgattgccaagaaaccaaaccagtctcggatttggctgtctcttcttcaaatcagcaggaaaatggcgaaaacatcgatcaaaatgggcaatcgaaaaggtcagaggagtctaccgcggagaatgttgtctctgcagatgaagaaaaaggtatgattctttactcaaagtttgatcattatgtgttgtttaatctgatcctaaaaaccctttttaatcttgtgttgttgttatgaaattgggcagggagtgaaagcaaagaagggatagtaaaagagctttcagagatcacagagagactaagtactcttcaatcaaatggtgatttattgaaacacattgctgatgttttggatgttagtgaaggagaagcaattctattgcagatatctcagaatttgcacatgcttcgtagttttgttgctatgccttctgaatccatgaacttgtaatacaatttttttccatttcttagagaacaagcaagctttcacgccttgtctcaacttgaaaacatttcttttattctttcacattaaaaagtttcagtttgctccatgaacctaacctagtttcagttttgtacttcatacccaaaaaataaaaaagttttcagttttgcatttgtatttagatgtgaaatttttctaaaatgttttcacaatttcaataggtataacattttgagtttgtatttagatgggatttttatattcttacatattttcacatttcaaataggtataacattttcattttccataaacattttgttgagtgtaaatgaatcttaacactgaacataaacaaattatttcgttaaggattgacttttttacaaattttaaatgctaatacaaaatgtaaacataaataaattatatcattttccttcataattcaaattttaaaactaaaactattatatttttatttatagagaacgtacaatcaaatatttcaacttataaatggagacattcgacatttttaatttagtgatcaaggagcgagagttaattgtacctaacttgtttcagccatatatatatcatagctctagccacttgactagctaggtctccgtgagctagggtttattttgaacctaatttattttggcatagccatatatgctttgcttaaaaattgaagccattaaagaattgcataaaattaaacccaacactcataaagatttaatcttttcttgtgttttcctttaatcccatcttattttagtctaatgaagctataaggtcgatccaaaaaaaaactaatctctaatgctatataatctaccaattaacatcgtcatttatcatcatcaaccataatcatctcactcactagcaatggctcatatttcacaaatctcttcttttctctcaatagttttaatcttcctcgcattatgcatcactctcttcacgaaccctactctctcactcccagccctaaaacttaaccctttccaagacttttgtgtagctgatctccaagctaccccaactaacagtggttacccttgcaagtcacaagtcacctctgaagacttcttttattccggcttgaacactcctttaaacacctcgaacccaaaaggtattgccgctaatccagccaatctcttgacctttccaggcctaaacactttgggaatatccatgtataacgttgcaattgcacctggaggatacaaccaacctcactctcaccccggtgtaaccgaggcaggggtcgtgatcgaaggctcggtcttggttgggttcttaacgactaactacacgttgtactcgaaggttattggacccggtgatatgtttgtgattcctccgggactcattcattacgaggggaacgttgggaaaacgcaatgccgtcttttgacggtggttgctgacgacttgcctagcgaggttggtgtgcctcacactctgttggctacgaaacccgcgattccaaacgaggtattgatatcggcgtttaaggcggatagtaaaacaatcaacatgctcaggtcaaagtttactgcttaaaataatggtctctatatggttcctctaaaaatgtaatcttttatgagtttacttaaatgaataacaaaagtcagtgttttttttttatggacaaatctagtaatacttacaatagcaattctattttcatcataataagtccgttaccgttagcctcccaagttcccaactagttaggaaagttttgaaaaaagttaatatatagagaaaaatacaagatgataaacacatcttcttgggttttatttaggaaaaaataaaagccacatatcatctatgttttgcacatgaccaccatcatgatgtgcacttgcaaaaatggttttgatcgttattttgttgatagatcactctctcgaagaactcatgtccccatcccctacttctactatctccttgggatatatctgcatgttaacatgatcgtctatgaaattcttcttacaaagtctaagattcaactcaacgatctatatacagattctttacccaaacaaaaaaagaataaaacctggtggcctttgtcttcgttatgaccgagtgtacggactttgagctcgcctctgctcgttgttaactcgtctagaatctcagcatcacactcttggacccctctcgccgagttattcgactttaaaacagggttaaatcgataaacctcaatcctttaaactactctagacaaatatcaagaataaaaagaatgtacatattatatagacattgactcaccctgaaagacagttcaagcgggtttctaggagttccagggatctcctcatactccgccgcatcgagttcccggagataggctggtttaaagagcttagggagaaggtactgtctgatggctactaaaaggaagaaaagaaccggaaacatgattccggccactggaatccacgtcactccgtagcaaagcccaaagtagagtatctgaaatagcgtgaatgcagcgattgacttatgcggaactttctccacgaacgatgcatgcgctccttccaagaccctaacaacaaaaaacaatcacatgatcagtctttgaaggaaacctttaacaaaaaaacagagcattttcagagcacatacttgaatctccgggttggtgggacgaagagaagtactgttcgttcgaagaattgattgtctgggaggctatcaatggccatgtaagcaaaatatccccatagaagtgaagtcggtatgagcttaatgaccggtagagcaaacactgcacctatcactagcaatgattgcaacaggttgctcactctctgctcgttgactcgaacaggcaagtaagcgtcaacgtgcttctctggatcgaaaccactctcttcgccggtatccccgtcgtcgtcactcttcttcatcactgcctctttcagatcttgcagctcatttatcagtgttgtgtgtgtctcagcctgtagattaaaaataagagctcatatcttgaaaactggaacattaattatgagtctactacttacaagtgggcttttgtccatttctatgaagacttgttccatatcctcgtacacttgagaggacgttgctttctgtctgatgctttctttggctgtcatcaccatcttcctccgcattaactgtatagaaccaccaagtttcatctagaccgcttaacctgaatattcagtgttgattaactgagtattaattagacctgtcgtttgaaaacagctaggcttttggtatgcataggagactgcgggaggactccgttggaaggcggtagaccgagcattccacagatcaatacctgaaaaaaaaaacacagtttggagattttaacagagaattaatgttagcttgcagaggaagaaacagagtttgattgattaccatgaaacctaacaagagaatgtcgtagtgatatgcagaagggttcttgaggttaaactccttctgctgcgcgagctgcgagacaacgctgtggtcaaagaagtagaggcctgcgatcatcaatgcgggtataaacgctgcaaatatgtaaccgggagagactttacccatgtcctgtacagaaaaaagacggatcctaaagaggtttggattgtaaaccaaaatcttaaatgtagttgtgttttgtaaccttgatgacagtccaatgtgttaaagaaacagagtcccatggaagaggactaacgagtcttctcgggacaccagagggtagttttgatggcgtactgaaagacaatgctgtccaaaccacaaccatcaacggaactccgtagtctgcaacgaagcttcggcaacatcctttacaaagaatcataatattaaggccttgtagttgtttttaaacagaaattaccattaagcatgagaaaataaatcactcttacctgttccgtatggccaagaccttgcttttctgctcttcaaagcggtgtagacaagaccgactgtgaaaataaggccaagaagtccgtttgtgtagagccactcaaactgatacttttcaagttttgagtcttcaccttttggaatcctaaattcactcaccattccctaccaatatcatttgaaacatataaaagatcttttgacctatcatcagaagtgagaggtggctttgttgagccttttggtattgatacctttatggtttgttggagaaatagaacagcgatcaacataccaaacagctcaccagcgatcctcgtgaaccggttgatgatataagccatgttgaatatcgccattaggaatagtaacaaagccgtccacacacaaacccttcaattaaaaaacaagcaagaccataactcttacaggaaaacatttacaagaacaaacgatttagagttttggagtaatcaccaagcaacccaagctaagtagagttgtttgcccaattcaggtcttcctttagcgaagtcgtacaagtatttgtacattaagacagttggttctgcaactccaagtatcaacaatggttgtcctcccaataacgagtgtatcactccacataacgctgttgatgctaacgtttccactgtgctcaacgatctctctatacttttaccccaaattttaaatcagattacgcataactaaaaacaagaccaaaacgtacatgaaggtaacaaatttgagagatagacctgtgtcgtggctaagttgctcgccaaaggcaataacaggaagcgcagaggcgaagaaaacatatgttgtcggtgctaaatcctgtaaaacctctcaaaaaacatataattacaatttgtttctctatctcaagaagaatctaattataagtacccgaaaccagaacgtagaccagcgatccagtcttgcttgtaacacaaggctcttcctttgacatctcttatgataccttgaaatggccttttcgagccttccactctttcttcctccatatcccctcaaatcactcggagattctaaaccacgtcgctctgatcagatgttagcctttgcaacaggtctttatatgacctaaccacacacaaaggaagttatataacacatataaatgacttcatatcgtgtagttttttttatgatgtagtctttttttcacccactatgtagagaagaatctcaaagtctttatgttttttgggtactttagtagctgaaaataggaaaacgctatgtgcttatctgaattagacaaacatcgcaatgcacaaaacaagcaaaaagaaatgaaattttccttttatgacaaagaaaatctgaaattgcatatgtacccaaaattattaagaatctaattctttcattaaactccactgattaaaatgcatcgtgaatctaatccacaaaaaaaacttttttaatacggtctgacatcgaaattatatgttatgaactctttaatatctcacgaaaacaaaatcagagaaagaaagaatgaaacatgcaatatactaagtgatgttaaagtattacaaagagaccaagcaaacaagtgtggccgcagagagagcgaaaatcaccggagccgacgatcatatgtggcactggcaagtggcaacggtcatctttatacatggagaggaggagacacacttgtacacgtcttctggtggtctactgccacgtggcagtattcaaatggtggattttatacatccgtgaatcttggagttgattttccttaatttaaatggtcgtactaccgacagccaaaaacttgtctttcaccaacaaatatgttttggaaggctgaatatcatcacacaaacaaaataaaaaactaacatttattttgtatgaaactacatcttttatttctgttcagaattttcgaaaccgttgaatttgtttgtcgattggaaataactagtgaacgtacgtaactcgaggattaattattaaacaaattcaagtattaaaaaaaatggacaatgcatgtttttctttacttttgaattttattttttatgatcacgattttacgtttgattcaatttctcatattacatgctactattgacaatatttatatttttcttattataacaatatcttttttcttttctttttttaacaatatctttttttttaacaatatcttattttaaacatctttaatttgtatgaacacaaatagatacatgaatatttctacgcgtgtgttaatttcctatttttgtgaaacaatatcaacgtctccgcgaatgcgttgaatataagtcatgattttatatatttttttatggttttgaacccacatctgatatctaagtgaagtatagcattctataaaatgtaactaaactttagatcatcgagtgttatcatgagtaacgtaaatgaaatacttaagttagataattacatacacaagggtggtagatcatctcattttgaaaaacaaaaaggaattacaagaattgaataataaaaccattaagtgagataaatacatgcacatgggtggtagatcgcataataaacgccgtacgatggatgagtattaaaaaaacaatgaaaatgcagctttggagttagaactcgagattcaaaatccaactattggtaaatctcaagtgattaatgcattattttgaagttatgatcgttgtcagtactattgattatgtagcctttaatgtatgcttaagaatatgaaggtttttcttagcttgtttcttaattttgaatacgtaacaaccattgttgtctccgcgagtccttgtctgcgtttagcaacatgttgatcaaggggatcttgattgtgagcgtataacaaccatcgttgttttgttctcttctataaatgatcttctaatctcacttttctttttccgttcgtttttctataacaaaaaattaacgtcaaggactcaaggggatttgaacgtttgacttttgatatttagatgaggaatggggagagactggtgactttcaaagttgttacgtggctaattaactcccctaggatttgtgggagaatccaaatcacgatcgatttttgctcaaaggagctgaatataagatggatagcaaagatacaaaataaaataactcagtaagagctttatttagtgcaaggggaaataaagaacgctaagcttaatcagtaaatcttagattgatgtcttgaaatgatgaagaaggagagttgtggatagtggctggcaacttccaaaattagctacattgatgcttataagttataacaacatatttctgtgaatctaaacttgctagaaatttctaattacatggttttgcgggcttctaattgaatcataattgggcttcttgtgaattc

SEQ ID NO: 1252 - DNA, 67757 bp, Arabidopsis thaliana
tatcgttcgtcagcaccaaatttgttccatgcttcctggagaatcagaaaaagccggtaaatgactgatttgcagatggaggtaactcaatcaaatggaattaattttctatcgaggatttatggagacaaaccttgagaaggtcaaaaactttctcacaaatgtacttctgctgtgtggatgcgccacgttgttgaagcttgtcgggatgaacataaagagttgccttgcggtaggcttttctcacagaagcgcttgagacaagatcagtgagaggaatcggtttccatccactctctgctccaagtatctgcaaagaacatttgtttaagacttatcatctaatccattaaagaggtaagacttaagagctgtggacatatggggtaaacaaattacatattggagtgttgagatcaacgcccgtaagttgttttcctttccactcgaccaccgtttgacatcagcatcaagagcttccgcgagtctctgtaaattcaatcagacaaaatggtggtttagtacaaccaaattcaaagatatatgagaattttctgatgatataatgagtattgtctatgtgagtacatttctctctgtctgctctttctgggttttaagatcacgaagtttcttctctgcaagagcctctgcctggaatgatgacaccgaacaaacaatatgttttaagtagagaaaatagtataatataaaatacagatgaacagataatgtacaactgtacatactgcgcggtcagatgttctctggtgtctctcagatctagctttacatctctggattggttcacctttggcttcaacacgaaaatcatatgtacaagtcagtgtatagctcaaaatcttggaaacaacaatatatatatagacataccagtctggtttgaagaattggaaggacctgaacttttgttctccgtaccctgctgaaggatttcatggatcaaaatattacatgagagctgttaaaagaaaaatattcataagaaaagagggcttgggcttgaaactcacagaagatgaggagcctcgtctttcaccagaagagctaaatgacttgctgccgccataactttttgcttgagaagcagcagacttaccagacaatgctttttccatggcacgttctctgacctcagtgattgctcgttctacagcagcacgctcagctctgagtttggcttgcattgaagccttctcagctgatgataacttatcgtttacctcaacagatcccttttctgatttccttggaacctctctacggtgggctactgcctttgccttctccattgcagtttttcctgctctttccatagcatcagcaaatgccctttcgcgggcttcacgaatagctctttctaccataactctctcttgctttctttctctctctttctctcttgtttcatctatctttttcagatgttcctcaactgtctctgctttgttttgtgaaatatcagaagtagcatctccctcttcttccatagatgatcgacaactctcctctccctcattttctttcatgtttccatctgttgctgcgccaatatcagaagtagcatctccctcttcttccatagatgatcgacaactctcctctccctcctctccctcattttctttcatgtttccatttgttgctgcgccaataatttcttctccgtttggaaaacgacaggaagactcagctgcctccacattgcttctatatgtttcattctcttgacactcaaactggtgctctagttctttcttatctccatttctctctacaccaagacttgttttcatttcatcactttcttctttggtttcctccaattcgtcatgcttactttctgcctgacttgcccctccatcctgcagtgatctgtcgtcatcctctacaacactccaaccactttgaatcgaatcagaatctatttcttcaatgtgttcttccgtgttactgacagcactagctttttcagggaattgatcactgcgatgttgctcaatgccaacctcctcaatatatgaatcaccttgtctcatttcaaaagatgacctgctggtgtcagtatctatactaccatcgatcatagtttcttctgcttgttcctgtgtttgatcaaatctctccctagaattatttgaatctgtttcacttcgatcatattcaagcatttcagcatgagaatctgcatgctcatttatctcattaagttcagaaagtccttgaacccagccagcttcttcagatgcttcctgcacatcttcttcttctaggctagccatttctagttcttctcctatcagttcacggaccaaagacgttttaccttgcacttctaccttaccatcctcttttctacaatatgtttcttgtgccgactcatcttcattttctctggtatgtgcataggcttcataattcgttcttactgtctccacctcaacctgttcatatttttcttgagctttttgatggatatcaagatgtcccctttcagattccactaagcagtaagtttcatcctctcccttagtatctgctgtctgaaacatctgcctaaacatctgtttaagaacggtccaattttcttgcaatcctgaatcactagcttgtccagatgtgctttctatttcctcgctagcatgatggatccttacaccttcctcatgaaaggacatcgctgtggtttcattttccgcactttctagctgccagggcctgttgtttcccttcggagcctttatcatattatagacgtcttcagaggtcttccaaactcttcttcgcctgggaaccttgtgcactgcctcttgcacctcatctatgtttcctggctcagaaatatttactctgttaaaagacaccatagctccaacactatcatcggactgagttttattcaaactcggtgttggggtttcttccacttcccttacatatgttttggaatcatcaggaccaactaacatctcctgtggctcagagactatctccttctcaccttcctgatctagaacattgcaagtgtggtcaccattttcttggaaatcttttaccccagatccatcttcgaacttgcaagcacttttaacttgccatcctgtttctttctccatattctgagaagacctttctgtgaaagcacatatggttgattcagacttctcttcaatattcatttcgctcttactctcagtttgttgtggggtctcttccacttcccttaagtatgtttctatgactggaataccagctagcatctcttgtgagtcactttcctcatcttgaaccatttgagtgacggtagaattttccttctctgtaaactgtttctcatccttttgtgaaactttgctccccgtgaaggcctctacaacacactttaatttactgccaagctgtccaaatgtatagaagggattctcagttattggttgcacctcttgtttcgtatcaggttcaggtttagctggtgcaaggttttctggctcctgctgcttactattcataactgatttgaatatccctccaggtaattcccagtgttttcgacctcttcgtgcttgttcctcttctagcgttatgatatcttgctcttctaactcttctggcttatggtctgaagttgattttaaaagtccttcaggaactccccacagcttccgcgctcttttagcatgctgatctccctcgtttgaaaatgattgttcagaaggtttcaccatttcaccgagaatctgagaattgttgtctctgctttcttctgtaattccttcaacctttgtgttccctttattctcaattttagagtcatcacaagatttcagttttgcacaactgcgaaagccggactttttcttttccatcatttgttttgcaatattcattcttatttgagcctcttctatagcctttttcagtgctgcagaagactcagcggcaaccgaattttcatctgtttcagcatcgaagtatggaggtgaacttggagaatcagcatcttcagtttcatacctttccgaaggcccagaatttaaacccgataacctttcagaagctccatgttcaccattcaatgtacactgaaagcttgaaggcggtttcacatcccgatattcaccattagaaacggtcttacacgtggagtcatcacgcgtactgcatccatctcgagcaaaaatgttctcaaaatcaacctcagttttagatccctgctttctagaagccttgacttcctcacgaccctcgttacatggcagcttcttctcaactgctggaataggagttgatttactttcaatcttgtgcaacaaactcgtattatcaaccacttgagtcggaataggaccaggcatagtagcagggacctgagtaagatgagtagccccattctcattacgagggaccgtctggtgatatgatatatcagagtgcttcatcctaaccatttcaggtgattttttcccctcgttgcaaagaggaacatcagaagaatttccacctttcctacgattcctacacattagagaaacaagccaaaagctcaccaacaaagatccaacatcaaagtattccactaattcaactagtttatcaaagatgtctccagcaaaacatcattcacaaatcacaatcatatagcctttaaagaagctataactacgccagtacttaaagagagtaatatcagcactgaatcagcaaagaaccctaaatatcgtagaggaattataccttttcttatcctcgttaatggaggttttcttctcggacttgatgatcacctccttaggagtaacagcaaaatcgcaagctcctaagccaccaaacaccgaagagtaatcgagcttagaactccgaacatcgaccttaaccttaccaacgttcagctccggaacatccagaaacggaatcgaagacggagaaggacctgaacctcggaaaatctcaccgtaatcaactaaaggagatttcgaattcaccggagaagaaaaaactccgtcgtatacggcatttgcactaaagctaagactatggctacgattattactaatcttcctagagaaagtagtagcagtgggagatttctcatactccattttcgggattaagaagaaagagaaagagcttattagggtttcttcttcgttttggttactgtttcgtctatgatctcttcctaattttgtcgttctctctggatttttttctctcttattgcagacgaaaaaatggcagagctagagagagagaagagagagtagtgatgagagagctatgagctgtttattttttgaccgagatatttggttaaaacaaaattaactaattcgaaaaagcgcgtgaacaataataatacagtaataactaaatcgcttgattaaattttcgtttcgtaaatattgcttggtactatatgtataagaaaagcaaattaacgttaatgtgtgtcggtcaatctctttcattttatgctcttagtttctatatataattttattgatgtactttaagatgcctgattaagcattaaaataactgaaatacttattaaattactagtcgttttgttttgatgaagttgtcgttttatatgtcttcgtgtgattatttaatgaagggtttaggagtataaaatgtgccaaaaaaatcaaaagtatttcacaggccaatctcccatgtaccttgtaaagatgttaagtagattttcttgtcatggctcagttttgtcactctgttaaattgtttaaaaattagttttctttaatttgtctcaatacgagacaatggtgtttttacattgaaagaattggaacaatataacattttcttgtaaaactgaagaaacttaagagtcaaaactgcatcaaaagttcaattatattatatctatattagcataccacgtattagcaactaactagcttataacattaataataagaaatttattcatattgctatattggtagaacaatcattcagattattgtaccagagatcactactatttttgcactccaggttgactttcttcttttttatttttgcattttatgtaaaaatgcttttttgacaaatctgaatgcgttacattcttaaacacacgggattagccaattacgaaaattccaaatagatcgaattttacgatgttacccttccgattgagaattttaaaatgtattgaaaaagactgttatatcctaactgttatcaataatgtatcagtgacgatgaaataatgtaagggtatattcggaatttgatagaagcatattataaagatatgattctctcgactcctgtctggcgaccgttaggcattattaagctctttgcctgttgtcaaaaatttccacagcattgctttgtcaaattttaacgtaagaatattaagtacaaacaactaaacaagttctgattgtttttttcctatcaatgtcatagatttgaatgtttgtatattcgaaattcgaacatttaaaatagtaaagatgtttgagttttttttctttttttttaaagatgcttgagttatcgatgcaaaaaaatgttctatctaaaggatcaatcaccaataaattttattttactataaactaaaaattgcacccacaaaaaaagtatatataaaagttaaaataattactgcgaaacttttgtgattttatgtgttgataactattgattcgatcttcaaatgaaccaatacgtctggaattaagtccttaactcaacacagtttctgtgaatttagttcgagaaatcatacaatgttgtaatcatatttgttttatagctagtaatcatgccaaaaataacaaaagtaaaaacagaagaaaataagatcatcttcattggtagtctttaaatagagtttttcattaataaaataattacaataataataaggaaaaagagagtgaaaaactaaaaaatttctagaaactatgaaatactctctacaagttgagaaactatgaaatactctctacaaacaatcatgacatttttctcttctcaattggttaaatttttttattaaaattaaaattaataaaattataataattttttgtttacaaaattatttggatttcttcttgatggaaatactctaacaagagaagaggtagaatacaagtggccttacaaaagtgtatattaagccgttgtgtatgtcttttatctcaaacgatcacatgatttttgatataagacatcgattcttgtcacaacaacttcccacatatttttatcaaaaaaaaaaaaaaaaaaacttccctatatctgtatatattctccaaaatttcgaaaataaaacagttcgagatagtatattggtcattattgtaggacagactcatattgatgattttagtttgaagcttcgctttgtggtttttgggatgtggtccaaaactttagattacacaggctggtccaagcgaagtacgacaaaaaaatacgtataaatatttgaatatagcttataatatttgaattgaatagtaatgtagtataacaatgacatgtttttttttgttttcgacatcttaacaataacaatgacatgtatatatgcacacgtttggtagaaatgtaatgattcatagcttcatagttgctggcaatcaccaagagccagagaagtcatgcattttccgacaaaatagtatgaaaacaaaaccaaacatataaaatagaaggaacataattcacgaatcgaataaaaaccaaaaactctttgccatttccaaaatcgttttctactatcaccgctttgagtattttagactatttaaaatcagaaaatccaattgaaaaatataggtttatttttaacctttccctttagtttatatagcacaaaataaagtttaattgtctacttaaaaaacatcatagagacattttaaactggataatggtacacaaggttaatgaaataaagtatttagtgatggatcactgatcacctaatgatacaattatacaacttataaagtggcagtgacagatatagttgttgggaatgccttttgccaaactatgttatgatttatattgtgattatgactctaaatgaaaacgacatcttaaggcaaacataaaaagtaacaacatacatgtgtgtgtgtgtgtgatgttaaccgttttgctcatatattagtgtgtaggaaatttgtagccaaatcacatttgaaagtacaatttctatctaacatttcgaatctttaaacgcctatttataacacgaataaaagtcatatagttagaatatttgaaagccatagaagtaaacactcgtagcatcgtataatactttatagatccaaaactatcattgaaagaacattttgacaattttacattcagaaaaaaaattgtaaaaaaaaattgataactgtcggtcaattacttacttaaaaacgatatgatctagggtcaattactttgtagctttatagaagagaaaagtaaatcaaagccatacgatcgagaatctaattatgtcagtcaaagcacaaagatagaccccacgatactacaatacatgcatgatgcatcgtcattattttcgttccttttttatattaaattaaagatgtttcatgctttttgataggttatggtatcatgaaaaacctaatgtgtcatggcttttccaatctctaaagtgttttcagttgctttccttaaaagtattctgagagaatctcttagccatatgcattgcatattcacatcacacccaatcacatgcttcgcctacttcgctgttttttctctttaacaagaatcacacatcgtctcaggcccaacaagagcccataatgaaaagctctgaatcaggcagaaggttttgtaggagttgaaagactgaaacagcgtcgtattaggacgatgagctatcatcatctgccactctttctcagtttctccgtctctcgccggcgatcgattcgccgaaaagccccactacccaggtgcgtctgtctcgacctttccctatatcttgtaattgacacaagatactattaaaagtattcaattttagtgtaatatattagcttgagttcacaaaactttacattttgcttgattaatcaatttcacacgtacaagaatcagtttttattgttttgtgatttgtttttgtgaattgttctcaagtgaattgactgagatactcatcaatactcgtgtacttgacatcagggtaaagcacagaggcttcttcaccgaaccaaggctctattgtgaaactggtctgatctcccttcacaaacaccgcgtggtttatagacttgaaaacatcgatgggaactggagagtacgcaaaaagaacatatcttttaattcagcaaatgaaaaaaaatggtaataaagaatttaaacgacttcttggtgaattgtggtatgttattaatttctaaccttggatgcttttaaggatttgctcttctgatatgtgagtcttctcaagagacttgccgatctttttctcccacaaggtgaccatttcgttcatcgataaaatgttgttaggaggactaatgtagagggttttgttcagagtccttagatcatccaccgccttgatcatgtaagctgcaacatcttcctctttgttgatcacaactgcaaaatcaatttaaaaaacttgttacataagaatctttataaaaaaaaatagattatacgttctgttacattataaaattctcaacctttggcatttccatcgcctaatatggtgactttgtctctaggaggaacatttttgtcgccaaagatgatggccttgtctctagtatgagaaatgagaccagactcgaactgaagtaacgtacgcaagtaaaaaccggcagagcaattgctaacaacgtaagtgtatggtattccttcagcttcaatggctctcctgatctgtaccttccctgcaaataatgattttgccggctcaaccgcactggtcctctcaacgtctatcccaaactcagccggcaagaatctctgcaaagcaaaaactataaatctagtaagaggttatgttcagctggattttttctcataactattttcagttagatcatatgctaatcggattgccatttatatgtattgaggtttgaatcaaataccaaccttgacgttaccagcttctttaatggcggaaatgatcttggtttgatcaaagatttgcttgtgcccgatggttgatatcaccacatcaacctgtttaatggccttaactaagctctcatgatcattcaaatctccctgtccaagttacataactaggttatggttttgagtttgtatgaaacatgttagagagtgagagttcatgcatacgtgtagtattgtgacaccgagatctttgaagctctggatggttttgctcttgacaggatcagagagagatgcttctcggacaagagcgaatgttgggttaccggctttcgcgctcccttcaacgatgaattctcccatgtaaccagtccctccgatcaccagaatcttgcttttctccgtcgtcatgtttcaaacgtggtaatgactaatgattgtgtgtactactaaattcaataatgctgtggaatttgagtggcgttggcaaggcaatttatggacagaatttgttggttgattgacaacaataccctcactcaacatctcatgtggtgcatagatgttgactcccatgataaacatgttatgctcgttaaatccaaattttctcatttgaccatatgtaaaattgtgagatattttgtggttttacacagctttatagaccgtaaaaatggcttaaagatggatgcatatagagataaagcactgtgattagtcacacacattgcaagaatcattttttattgatacaaacatgaaagcagctagcgttatggtggtaaattaggtgtttaatgaagttcctaaagcgaaataactgagatactcatcaatactcgtgtacttgatatcagggtaaagctcagaggcttcaaaaccgaatgaaggctctatagtgaaattggtctgatctcctttcacaaacaccgcgtggtttatcgacagaagaacgttgaagggaaccggagactctgcaaaaagagaaagatcttcatattctagaaaatgaaaaaacggtagttataaagaatcgaaagacctcttggtgaattgattttctgaaccttggatgcttttaaagatttgttcctctgacatgtaaatcttctcaacagacttgccaatctttttctcccacaaggtgactatttcgttcatcgataaagtgttgttaggaggattaatgtagagggttttattcagagtccttggatcatccaccgctttgatagtgtaagcagcaatatcttcctccttgttgatcacagctatgaaatattcgactgtgttagattcaattgcataaaaagcacagtaatgttaatgatatgaaactaacctttgacatttccatctccgaaaattttgactttatctctaggaggagaagtgagacctggctccagctgaaccaatgtgggcaagtagtaaccagcaaagtaattggtaacaaggtaagtgtatggtattccttccgcttctatgtctctccttgtctgtagtttcctcccaaaagccgatttcgcaggctcaaccgcacttgacttgtccacgtccatcccaaactcagacggcaagaatctctgcaaaacatgaaactatgtacaaatttggtcttatgcaattcgattttttatatgttaagggtttgtatcaagatctgaccttgacgttaccggcttctttaatagctgaaatgatcttggtttgatccaagatttgcatgctcccaacggttgatataaccacatcggcctgtttaatggccttcactaagctctcatgatcgttcaaatccccctgaccaagttatcatatacataactaaggttatggttattgaatttgtatgaaacttattaacgaaaggatcaagcgtacgtgaagtaatgtgacgccaaaatctttgaaattctggacggttttgcccttgttgggatcggagagcgaggcttctctaacgagagccagtgtggagtgtccggctttcacgctcgcttctataatgagttttccgatgtgaccagtccctccgatcaccagaatcttgcttttctctgacgccatgtttagattcgaaacgtgataattgaatgctaagtgaatgattttgggagcgaaggaatagcgctttacggaccaaaacattggtcggttgatttaagatagaactacgataatacccttacctaacctttctttaattacaaaattgagatttattttttggttccctttttattttcgctgaatctagacaatggacatgaccaaattcaaattctattaccaaactcaaggtttgatatatattttttctgatttggatacaaaaatatttgatttaggtattattaaaattgatttgaataaaaaccttaggtacctaacatattgataatcatgtatagactataggtatgaattatatattactaattcatatttcttgggaagctcggaaacagaggtaaagcactgtgattactgattagtcacacatacacacacacattcaccattacaagaaccattcttttattgatacagaacatgaaactagcgcgtcatggtggtaaattacgtttataatgaagttcatcaagcgaaataactgagatactcgtcaacacttgtgtacttgacatcagggtaaagctcagaggcttccacaccaaaggaaggctctatactgatattggtatctccattcacaaacaccgcgtggtttatcgacagaacaacattgatgggaatcggagactctgccaaaagataatcatttaattcagaatgagtaattaataaagaatctaaaaacctctttgtgaattgattatctaaaccttggatgcttttaagtagttgttcctctgggaggtgagtcttctcaagagacttgccaatctttttctcccacaaggtgactatttcgttcatcgataaagtgttgttagaaggcttaatgtataggattttgttcagagtcctaggatcatccaccgccttgatcgtgtaagcagcaatatcttcctctttgttgatcacagctgcgaaatattctacggtgttagattaaactgtataggccacgttataagtgtttggattcttgaaactactaacctttggcatttccatcgccaagaatggtgactttgtctctaggaggagaagtgagaccaggctcgaactgaaccaatgttggcaagtagtaaccaccaaagcaaccggtaacagcgtaagtgtatggtattccttccgcttcgatggttctcctgatctgtatcttccctgcaaaagccgatttagctggctcaaccgcactcgtcctatccacatccaccccaaactcagacggcaagaatctctgcaaataacatatccaatatgaaactatatatatgcaattagatccctctagaactactctttcattaaaaaaagaaaaaaaaaaaatcaaaacattggactctgtttatatgtaatggggtttgaatcaaggtaatatgaaatactgaccttgacattaccggcttctttgatggcggaaatgatcttggtttgatccaagatttgcatgctcccaacggtagatatcaccacatcaacctgtttaatagccttcactaagctctcgtgatcattcaaatctccctgaccaagtcatataactaaaagttatggttatgaaaaacttatatgaatgaatgaaacagagtgtataaagttaaagcgtacgtgtagtattgtgacgccgagatctttgaaactctggacggttttgcccttgacaggatcggatagagttgcttctctaacgagagcgaatgtggagtggccagctttggcgctcgcttctactaggaatttcccgatgtaaccagttcctccgatcaccagaatcttgcttttctccgtcgccatgtttagtttcaaacgatgataatgagtgcgcactctttgagtggtaagaaaatgatttggaatgtgcttgaaggaatggtttgggcaccgcaatttatggaccagacattgtttggttgatttacgataatacccttactgaaccttacttcaattctaagatattcatttcttgttcgtgcctccccatcaaaattcttattaaaatcctaattagctaaaataatcactggttaaccggaaggttaaaaccttataactatgatcgtaaccattatttaaataaacttaatcgattgaccccaggtccccaacccttagcccccaacaggatcgttagtgagcttaagggggtttggtcatacgcaaactaaactggtacatagcaaaccgaagccttaaaccagaagagagaaaggaattagtagactggtttatagtgtacttatatatggaatctggacacaatatagatcaaattcattgacaaatacattctaacatcaattttggtttgtattggtaacacttggacaatgatttgaccatttgattggtgcaaaaaaaagaaggagactaaccaattggagaaggttcgaatatatcgtaacagccacttcatcaatgacgtcacaaatttcatgaacatatttaaagaccaaagatttcgttttccttgtattttatttgaaagacatttttgcctatttcattcatattttgcttttaaaacgagaattataattcttcgactccgtgggataagttttctaaaaaatcgaagaaagatcgatggctctagatatctgcgtgaaggttgccgtcggtgctcctgatgttctcggcgactgtatgttctctctctctatcctttctccaatcatcgatctccgttttgtttgtccacatcaagctttgatttcttaaattagggtttttgatctgtgatctattcaaatgcgtgtgctttattctatgaaatctcgatttctttttctcaggtccgtttagccaacgtgttcttctgacacttgaggagaagaagcttccctacaagacccatctgattaacgtctccgacaaaccccaatggtacgttctgtgataccaatgattactgatggagatttgattagcttaataagtaatccccaaatcgaaagctgtataatttggatgaaaagttacaacttttattgtgttttggacactaaaagattctgtatcttctgtaaatttgtgggcttttgatagatttctctgaaatttttgtgttttataggttcttagacattagtccagaggggaaagttccggtggtgaagcttgatggcaaatgggtggctgattctgacgtaattgttggacttcttgaagagaaatatccagagccttctctcaagactcctcctgaatttgcttctgtaggatccaaaatctttggtgcttttgtgactttcttgaagagcaaagacgctaatgacggatccgagaaggctttggttgatgagttagaagcgttggagaatcacttgaagacacattctggtccttttgtagctggagagaagattactgcagtggatttgagtttagcaccaaagctttaccatcttgaggttgctcttggtcattacaagaactggtctgtccctgagagcttgaccagtgttcgtaactacgccaaggctttgttctctagggagtcgtttgagaacaccaaggctaagaaagagattgtggttgcgggttgggaatcgaaggtgaatgcgtgatgtggatccatgcttctctagttaatgttgctttagaactattcttcactgaataataagaatgcacgagtatgtgtgtgttcttgtttttgttagagttggttatcaataatgatgcgataaagcagcatatctttttttgataatatacacctcttattcaatttggtattacagtccaatggtcaatctcttgattattagtaaatgcctgctacaagatgatgatgctatagtttcagacaaactggctgagttactcatcgacgcttgtgtacttgatatctggataaagctgagaagcttccacttcaaagtaaggctctactgtaaaataggtttgatctcctttcacaaaaatggcatgatttaaagccaacagaagatcaagtggatgtggagactctgcaacatttcaagtattagcaaacacctgatcttaattgtttatgtttggtaaaaaagagtgtcaaaattatctctctcacctgggattttcttgagaagtttctcctatgaaacgtaagtcttctccagatttttaccaaccttgctctcccacaattcgatgatgtcgttctgcgaaacagtgttctctggaggattgatgtagagagtcttgttgagagttctcaatggctctcatggtgtatgcagcaatgtcttcttctttgttgctgattgttttagaacagagtaatatcctttttttctttgttgccaatcaatatccttttttttagtagaacacagttcaaagactgttcccgttttgttctgttttttttactagttaaagagcaaatagaagttgatcaaatagagcgtttgcataaatttcatacaatttacatgatttttaagtgttctctatatctttatctttacaagtaaaccggcaaccatgtctccgtggcttcaagggattatctggctccgactcactcgactctgcaagtaaccctctcaagcatctcctccttactctcggctcattctttaacttcttcgttacggtcaccgtctccggtttcttctcctccacattctctggcggatatataacttccttcttcaatatttcaaacttaaaactcatatgaactcctggatcattctcgcttactgaactctcgactacaattgaattgtttatcccttgagtgtttccgtttatgtatgccgtaaaactcgcttcttcctctgcttcgtcgtctttagggttttcggtttctgtggctgtggtgttagagctctcgtctgggttacttctgtagccacggcgaatatgaacctcaccgtctttcttgtctttctcagaacctattcccattgtggctcctttgttttctccagtgagagtgtagacgctcactgatttatcatcaccgttgctttttccccaagttagcttactgattccatctctgatgtcttctttaatctttctgctcattgaagatgatccttctctattcgtaactctcggatttccaagattactcgttaatgcgcctttggttttctgatgattgtcatcggtaggaatctctgttctgttttgcgtttctgtctttttctccggtagatctctcggtcctctcgtggtttctgatgctgctgccatatgtcgtgtggttttgcttcgcgttgcatcttctctacctaccgcctgaagtgatctcttcgtttcttgtaatgcaagtttctcagtttctttgctcttctgttgtccctgatctgcttctaacttctgtacaccgtcgtcatgaagaactttcttcctttcttgtaacgcaattttctcgatttcttctatcttctgttgtccctgatttgctgctgacttcttcccactgccttcaggaaggactttcttattttcttgcaccacaagtctcgctgcttcagtattcctcccctgttcttgcactgcctctgtttctttctgttctaaatgctcttctggacgagctccaatcggaggtttctcttttacaggactgatattctcttcagctattttttcagtttctcccggtggcttctcttttgtcgccaccttttgttcctccatcctcagagaatccagtttctttgatggagaaccagattgttggttagtctgtttcgccaggcgagttggcgtggctgcaccgagagaaggcaattgagacgcggacgaagaagcagctagggctgcaacattacttctactcctagaaagtgacggagacgccttgggctttgtttctgacttcgacggctgagcgatgcctgcaggacgaaaaggagggcgtgaaggaggagtaggtggtggcgatggcgaagaagtccctgaagagatacgagaaggagagttggaggagaagaatgggatgcgaaaacggaaaggtggcatgatgattgtagagagatgtcagtaaatggtaaagagtaaatatttgattcactcatctctttgtgttgtatgtatatgagtggatttttttgtgtccgaatgagaaaagataacttttcaggtaggtaaagaaaagtgatcggtttctctagtgaggttatctttggaatctctcttcaattgatgtttttgctccttaggttagaagagagctttatggagaagcaaagaacaacaaagagaaaacttgaaagtgaagacatgcaagttgtttcgtttttttgaagaaagaccaagcaaaagaaaaacccatgcctagctgaaaatatcagacgtaatatatgtgtagataagtgttcttcttatatttcaccagctacagtataaaaaaacacatggagaaaagtttcattaattctggaaaaaaactgaatcatattcaagaagaatgagtgaaaccaaatcatctcttagctattatgtgaaattcaattcatcaccatttcactcatgtttattccactaagcactcatcttatacgttcgatatagacctatcataataattagtgtttctgattaaccaagaacttttgtatttcgttttcataacatttttaaagcttatgtatacaactatacatacataattgttctttactgtgactcggatctaaaaaataaccaagaaaatcctttcaaaaggccttagactctaatcaaccaaatatgaactaccaatgagaccatggacaactttttggtcgttttcattagacatgaagtatttacaacagaaaatagattagatttggatataggaattttatcacaaaaggaaacgataatatcccttatgttcttattcttttttttcaagttttctcggttatgtccttattctctatgcatcaaacttttggtggctcttataaaaatgcttgtcattacagatgggtctcttccattacatcacacttaaagtcattagatccaaggtccaggagaatatttatctatatcattttgaaatggtaaatgaaaatgattttctttaacaaatatccacgaactttggttaaggagataaggatgataacgtatcgaatcctttatttgtccaatctctagcatttttgcattcgtttcattattagttgatgctgggaatagaacttaaactatcattcaaacatcttttaatatgctttggatgtgaaaatatatattaggatatctacaagggcctaaatgtacgcagtttttagcaactagttcacttttcctcccacataattagccagaaacgatgcccaaataatggttcatacatcatcatttagttacatgattttttttttatatgtacaatttaactacagaatacagaattggcatatctttctatttacttgtgacttcatatcaaaaccttttcgttccaataatgccatgttatatgcactatgtctactaatattttgttaagttaatcaatcaccacacaaattatcttaataatggcttacgttaagatctcgaaaactgtgaacgaatatacaaaaaaataagtattgggactatattggagaattgttgtaatcttttgtctatcataatcacattacgccaagttgttcaacttaccaactttaaccttgcgtttttaaccggtttatcgatatgatcaatcggttccaacttttaatctgcttagacgtgtattatccttctgttgattgtttagattcttcttctgaaaatttatcaatcatatagatgcgtagacgaacatacgactatatatataactaactaaatagctgctcctaactaatactaatgcgtcagttgtgcgttatgttttacatgaactgaaaacaccaaaaaaaatctttgaaaagttttgaaacccgatattttaagttgaatagactttgtacttaaatcaactggtaatgataaattggttcatttcttaattattactttacgttttatcacactttccatgtgagtttttaacaagatacacttaattttcagaaaaatacatcagaaattattactatggcgttacgaatgactcttttgtagaccattaatatggttgttatcgtgagtaaaatatctttagtatcaacttaattattatagaccactaatatggctgttatcgtgagtaaaatatctttagttttcaacttaattaatgaaaagctagtgaattgaaaaagaaattaaaatagaaaactctccaacttgcagaatctaggaactctctttttctcctccttataaggaaccctgccttgctattcattttatagagcaactttcaacactcagtactctctcttttcaatctctttcctttccatctcaagttataagaaattaatggcgtcaaactcaagaagttcaatctcaccatggacgtttagtcaaaacaagatgttcgagagggccttggcagtttacgacaaggacacacccgaccgatggcacaatgtggcaaaagctgtcggagggaaaactgtagaagaagtgaagcgccactatgacattctcgtcgaggatctcatcaacatcgagactggtcgtgtccctttgcccaattacaagaccttcgaatctaactcaagaagcatcaatgactttgacacaaggtatataactaaatatctatatatgatgctctcgatatattttgataatcattctagtgattttgagaaattctctcaaaaagttcttgtaagttatatttctttggtttaaacgtgctctttatgactagtttgcccaaaatagcatatattaagtatgaactttggatttttgggattctgatattttattgtttctttgtgtcttcttttctttttacatattaaatagtttgtttagaaagtttctacaaatatagtttacttacatactatttttttgcttaaatataaatgcaaattgttctatttgttttaatcaaattctatatttaaaagcatgaaacacacctattaatacagtaaagggaaaaattcacatgaaatctaatcctttcatgtacttcatcacatgcacattgtctttaacagttttgaggcacgaaacattatatcatgataagataaatgtacataaatagataaattggttaattctacttatgtccatggtcggtggttgacattagtgtatttatattacaagttgttaaactcgagtttaggaaacccttaatgaacgatatcttcaagttgttaattaaatatgtatgtgattggaatctaatcaacatgcttgaaattattgataaaacatgccttcatttatgctgatttaattaaattctttgtgcaggaaaatgaagaatttgaagatctaacatcagcgtgaagaagtccttgtaaagattcagaaggaatatgtgattcttctgtctaccgattatgtaattgtatttgatcatttgctttcatagttgtctctatgttctattctaattgaagaaattaaaacttggttatatatattttaatttcagcccaaaacaaagcttatacattttaagtaatcaaaataaatcaagtagagaatataataaacctttgaaagccgacaagaatattgtttttcctaattgggaaagagtgatttatacaaaaagcgtgccaaaagaagaaagcaacaagtagctgctggggattggcttaattaagcaatttatgttttcttaatcaatacttttaattttcagaggtaatctattaaattaaaatcataagatgtaatcagagaacatagacagatgcattgcccctctacgagtttgatcattgataaagcaaagtatgtttagcttaatttatctatttattttcctttctcctctaaaattttctgtaatcataactatttaagaacgaattttcttctacaatggtgaaaatgtagtgtttcaaatcaatgacaaaatttgatttacaaattatattataaaaaaaaatcaatgacgaaaagtatcttaagaagttgacaatacatgagcttaaataactccaactccaacaagacctaaaatcattttgtcggtaacacagccataacaaattgtgttatcactatcagcatgttacactgggctacttcctatgggctttcatgggctgattgttatatagccaggccttataaaccatggaaacagcccaacatagaatcaacaaggtggccgactaaaacgctaaacgaagtcgtcatacggaagaagaaggatctcatactttatggtattgtacaaagtactgactttgatacgggaagctttttgtatacgtagtttctcttttggcccactttctttttctcaatggaagaaacataatttcgatgagaataagaatttatgaaattaataaatatcaacagtttcccacacaaaatggtcgcgaaagaaagtcgaaaaatatcatttataaccaattattacatatggtagcttagatacataggtcgtgacgacacagaagaaaagaagaagatacataggtcgtgagttctataattttggcctcatctatgaattttataacaatgagaatcttctctttttctgttttttagaaattttcttttcacatgtttttctttttggtacagaagttggaaggtgacagatctacagtagactcaaatcatatggttacaattttggacatatttcacatcaaacattttaaaaagttcaactttgatcataacgcttgcgtattcatataatttgtcatatatatctataaaaaaattctaaaatcattgttatatctaccgttacaatatatcaaaaaattaaaatattgatacggataagttaatctgccaaaaataattctgttaattaacattttattcatgattatataaaaaggtactataatggctgcattatacgtttacaatgtttgcattattattattttgttttcttgtattaaaatgttaattatagtgttttgtatttggctatctaagttagtacagcagaattgtttgtgttaagcttaaatgtaaaaaagacagaagcataaactagaagcaacagaagctgattacaagtacgatccgggtaaaagacaaacaaaataaaataaaaagactaaaaaaaaaaggcaaaccaaaattaaaaacattaactaagcaaacaaaagatccattgattgatccaaagatcgtacaaactacaaaaacctagaagaaggaaaacattaaataaacaacaacaacaaaagtagattaaaagaaaatctcttacataatctctcaattaatcatatgatcactgattagagagtagttgttggtgttggtggtttcttagcattgttcttgttgttatgcatccaaactttgaagacttgtctcttcactccgatctcgccgcagaatctcttaagctcttcttcgtcttgcttgttcatcctccaccctagcttctccgcaaagtccatcatcctctccttctgatccgtcgtgaactttgtcctgaatcttttcttagacgacgacatcgaaaacgccatttgtcccgccgccgcaccagctccttctccgcttgattgtccgtacagattcagatcttcactagacgactcagctcctcctcctccaccgccgtaagcaacgctcatcggcgtcaccattcctcctcctccgggaggactcattccatacttgtggtggtgaatcggctgataattcggtggcggaggaagcatgagtgggttaagcatcatattcggcggcggaggtcttctccctcctcctccaccgtattggttatggtggtagtggtgatgacggtggtgagagatcaaatccgagcttccaacgccgtccatttctttccggtggaaattacggtgacaatcacaagcagcgcatctgagagcttcgattgttccttcttcaccactcggcataaactcgccgcatccgtcgtgaacacttccgccgacgctcgccgcatgattctttagacactcacggtatcttacggtgggtttagctgcggcggagatggaaaacgaagagggagacttggattggtggtgatctagggtttgagagttgcaagagacacgagtgttgttgttattaccattgcaattatcatcaatattagtactaatgatgttactaataacaacaccaccattgttgttgccattgtcttctcttcttctctctatcatttcatggcttctcatatccattttttttcttggagattaataaattaaaacccaaaaggatcttaattaaaagagatcaacaaaataaaaaagactttttcttcaatgaagtttatgcctgaaaaagaacatgataatgagattactaataaggcaaaaaagaaaactaaatggcagtgagaatcagagacttacagaggagataagatgaacaagtacacgaggaaaaacccagtttttgcaggaccttaaactcatttaaagctcaaagctttttgcttgtgaagggttttaatggagagagagagagaatagaagagatttgaggaacttttgggattaaactaaaaggaggtttttagggctaaattggtttttttaagagtgaaagaaagaagaaaccatgtttgatgtctcagtgctcccaacaagccaacctttgagatcggattataagagacaatttggttgcttgtggtgaggccatgagagaaagagataagagctgagccctttgtgagagatgacactaatgtcataccctactactatatacttatacttattaagtacttctttattatacttcttccattaatctgtatttatcattttagtattatatttttaaatgcgcttttataacctttttatatatatttatgagggcttctatatttttaatgagaagagaatttctgaattactatttcgattatttgtgtgtgtttacaagagatttatcctataatattgttactttatagtactttagagcagaatgtgatttgtagtttatttactgacccttttactatcaaacttaatcataaagacagattaaaatgaaaaagaaaatatacagaaaaataataatatgggaaactattattttgtggtttttggctaattaattattatttttactctatagttaacaggaataattgtaatttttttaagatatgtggaaatttgtcacagttttttggaaacagatgtacttctggctatattgagttcaatcttcaagttaatgcgagtccgatagagtgtcctcctgattatatatgtcttttttttctatatgagagtatccaaaaagttttagtagttcttaacattgcataattaatattcgttgaatcaaatgatttatttttgtatgaattgattggtctagtactactctaaacacatagtggttgaatagtaacttgaagcacaaaatttcgtaatatgtgtaactcgcatgaaactgatgcaataattgacattctatctcgggtttttatgagctcatttttactgtgtacagtacgtcattaacgcgtttactataaataaatttgcaaaaatatagtactacttgaaaattggagaaaaattatacaacaaaaaagctggataatgcaccgaaatgggcttagactgttgcttgtatgttcaaatagttaatctcttgtaagcatactatattaaacaattttaatagtcaacctaatattaatttaactaaaacattgtaatttgtgccaaatggatcatatgtagtaacttgatggtatcggataatcttattacgtaatctttgtttctgtattttactatttttctatatagattgtgtttttgtcactatataccttgaaactgttggataatactcttatctgtagacataatttagcacaaacaaagtaactacatgatttgaattagctaaatttccttaattaagatgaaataatgagatatattcattttaaaatgaaagaaaaaagagagagagaggtgtgtgggttgcagagaagggcagtgcagagaacaaccgacaaggtcaagttggaagcccagccacatgccctgccacattatgggcccccttctctctctctcttccctccttcttcattattacatccctctctctcgctccttaatctttttttttcaaaccctaatttgtccaaacaccatttcttcttactcatgtcttttcttctttcctatttcactctacccctttttacttttccttttaatatactatataaaattacttgttattattaaaatgtttttacaagtataatacaacttgtatagtcttcatcaagattaataatactcaagaaagccatattttgtggaccatgtcgtcctagcatggagatgttttcctattgaaagcttaatcacaggctctactgtaatgatatctcatcagtacgttcatcaatatacgactaatagtctaattagtttcacaaattatctatgcgtacgtacgtgtgaataattagacatgcagattagttcatttcattaattaatgcttgttctaattggctctacattcatattagttactttgagaagatggaaaatacaagaatatatatcacaacgtcaaatgcaataatccatgcgtttgaataaatgttaaagatggtcgcaaaacaaaacaatcttcagattaattttagttttgataagaacaacaaaaaaagtaatcgtcatagcctctgcagaatttcccatggacaacctgtcacacgataattacttctctaccataacatgttttgtccccttttgcattatgacctcattctctttctaaccaaatttatttatttcgctttaatttaaattcgaatccaacccaaaccaatgatttactagctaaatttcgaactgtctaacaattagtgtattagtatttgtttttttggcaccgtctaataactatttattgatggtgctatcaagtttatagagattaggtttctgctcaattgtgaatcattttcacaagaaatccataagaaatggttaagaaaataactgcagccatttctcaaatcatatttatcttctaaaaatcattagatttcaaaatatctataactctggattatctattgcagaaccttaactatatagactggtataatctgtgtttatgtacttaaaaacatagaaacagtatatgacaagattatgaacattgctttacaaattcactcgtacagattttactaagttaattatcttggaagttggaaacatcatacgttctctgacaagctaaaccccaaacaaaatttgaggatctctatctgatacgatttaagatcatgatgtctctaaattgtgtaacacaaaaaaaatcaacactacactataagacttacgcattggatatgaacagtgtgcaaattcgacctttttgacctacaaaaaaagatttaaagtccaatacaaatcatggttaatacgattatcaagcttaccatcagattccattattttaattattgctatatttatattatctttatattatattattatcaaagtacgaagactttggtagtttactttctctcgtcaataaaagttttaaggtacacctctacgtatgcagacaaacaacgatgatatctgtctcaacataagatttaaatctaattgctaccacaatgtagtctctaacattgatcttctttttttgtcttttaagaacaatgatacataaatactagtaggagaaatttcgatatgcatctaacttctaagagatacttccaggaaaagcatagagaacaacactttaaactattactcaaaaagaaaaagaaaaacactttaaaacaaaaacaaaactacaaatgaaatttgacgtcaacaatttatattagacatgtgaagatgggatataaaaactgaaaattattttgttatattaatatgaagttactaaagcaagactactgaaaaaaaaaagattaagagagggagagaagtgataagaattgtgaagacatgaaatgtctatattcacacagagaatcaaaccaaaaaagtaaaaaacaaagcagtttgaagtagtaacaactgtagaacccaacaatgtctgaatctctctctctgccactctccacgcttccccgcaagcaaccctttttccttttttccactctcttttttttttctctttaattttttcttcatatgattttttacacctaagtgtagcttctatggtgtagccgtatagggacattttgggatttggaattcgtaatctcaccaacatggtttcactacattattcaattctctatccggttcatctaaaccgatctctggttaattaaaagcattctaaagagttgcataatgcagactatgcagttactagctactgcaatggtgagttaagggattagataaagttcatggaatatgcttatgtaaccattaaaaatatattttatacagaaaaaaaaagttagctgggaaataaaaatgaatgaaaaggaaagcagtgatttgtccctatcagctctctattctttctgaaaaacaaaacttaagggttttgtgttgcaacttgttttatagccaaaaccagaactactctcacttcactgtttcagaacacttttctttgttgttttctaccaaaattatgagttttctttgtttgcctctcaagtcttcccatgcttcactttcttactctactctcttacttaccaaacacagcttttattgtgtggaggagaaagacggatctgtgtctcacttacagtgacataggcaacaaaccaagcacaagtttcatcgacccctcttgtcttcaaactgattatagaagatcccataactaatgtatcatcaatagggtttcttctttttcttccatgtgattacagattgttactgtgttttgacaactcgacgcaacaaggacataacctctgtttatgactttcttgtgactattcttcctcggccaaaaaccatgtgttagttattttgtatggagacgtcgctctgttttagaaatcaaatatgttgctctgttttagatacgaatcaggaaacgctttagaggtttctttagacgagttcaagtctccaacaaaaagaaaatcgatgtcaagttcattagctaagcttaaatcttacatactcttcacttagctaaagaagatttctgttccatggccatttttattcttatttccaagctgtggaacaaagacttcttcaccagacagtagctgaagaccaccggaccagaatccctatcacgctatgagagacgataatttaaggtgcaaagtcagctacgtttggccccatgccctgttaagaaggcaaacataactaaattagaagaatacaatgtataaaacattgctgctattattgtcactagtccataattcacaaccaagtatttcagcattacagaaaacagtgacttggataagaaaatattcacttctataaatgttcaatccactgtatattttgcatttgcttgtggcaatgtgaaccattagtacaccagaagtaggtgaacttatcaactattagaagtcctaaatgaccattttcttccatctcatcaaggtttagtggaggcatacactgccataaacgtgattacgttgaaacacacaaatatcactctgatgcataggctaaggctgaggactaaattaagataagcaaaggactggacatgagtaatctatcaactaaaatcagaagatcaaataggtctatccagccattgaaatcaacctcaaaccaattccctacatagatgctatcctggaacatcctaagctccacaaaactaccctatcttctcaggtgacttgagtattttcttacgaactaaaaccaatttacacagatcttaattataagaacatataccacatgcatagcaagtgaaagtaaaatgagttgaagcactgagattgactttaggagacgagaaaaaacacgttcgtacttacttactctcagcaagtaatagcaataacacaatcactcaatgctctctctatctaaagaacatattcaacaataacggtaccaaaattcaagcaaagtagaaagcagaggacatgtattttgcatattaaccactgagatactaagttgcacaatgtagctgactatacccgatactgaacacattattaagagggtccataagctgcggctgttgttgctgatgttgttgatgttgctgttcttgttcttgttgctgaatgtcttccaactgtggaaacgaaagagcagctccggccgtagcagccgcagcattaggtggtgtatttttagattcaatgagccgccacaagtaccaagacgctactgatctatacggacgccatttctcgcaaagctgctccattttggatggacgaggcaaatcctccataccattaagcatctgcacacccttccttacaccaagatcattaactggtaacacatcaggtctatgaagagagtttatcataaacatatggaccgaccatgacccaatcccattcaccattgttaacatcgtgaacaaagatttctcatccatattcactattccagaatccgacaagatcccattttgatatttcctagcaagatcatgaaggtaactcgctttacgcccggaaacaccaatttgacgaagctgttgaggtgttaaaggcaatacattctctggcacgacgccgttttcaccgccgcataaggcaacgaagcgtgtgtagattgaattacctgctttagctgctaattgctgataaagaatgcttcgaatcaacgccaagaacggagtctgaaaagtctcgaacgttggtggtggatgaatgtcgattaaagacgcgagcagaggatcaacacttcggagatggtgaagagctgcttcaagctcgccttcacaagtgagagaccttgcttggattctcggcacggttacagtgcgtgactgtgataatttactcttcgttgccggtttcgtcgtcgtcatctgagaaaggttatgctccggattgaatccgtcggaagcgtcgtcgtcgggtgaaagttttctgatttttcgaggacggagagggatcttggtaggtggagacgatacattgcctaattcagtgacttgtggtgcttcaatggtggttgatgagacgattgagccagaaactccggcggatgaggcggagtcgtcatcgttggtttccggtggaattggattaggggtttcgtgattgggtgattccggttggtttggaggaagagtatgagatgatggttgagaaggtgaatgttcacccatgtgaaattgaagatttcgaattgatagaattagggtttttggtcgcttcagagacgaagacgaagagaatcgaaaacctaatcggagaattagccacgaccgagtgaagttgcgtctcgggtcttgacgttaattcttctctaacgcgcttttcatgagagtgcccttcacgctccgacgtcctcaatatgggcctatcttaataagcccaatatggttttgcttgggtctttaaattgggctcaataaaccctacagttattttattagaggtcaagaactagtctttgggttgtgtgagcgaggaaaatagtcttcaccaaaaaaagaaggaaagaaagtatttgatgtattttttttcgtatagactaaagatctgattgagtaatgtttatgtttataataagatctgatgggagtattttacatgtgaaaaatgtggaggaaagaagagacttaatcaattataattatatatgtaaagaagatattataaagttcaaaaaaaagaaaaaaaaaaaagtagatattgtaaagttgtggtcaacgaaagaaaaaatgagtgatgaatggagacagtaagatcagatcacaaagacgtgtttggtgtgatttgatttgattatgtgtctttttctgtgttggcctcctcttacatttctctcgttttgctcatgtattctccgtggggtagtttgagcaaatgtttgacaaactccataaacattgcaatttatatttattgcaattggtacgaaaattattgatgtataattgactagtggataggaaagttataaatatatgatattgatgtaaaacaaacttacaatattttaaaaattcagcatattcaaaaaaaagagagatatgtaagcttttaaaaatcaattgacaccacaccacacagatcaattttcacacacgcaaaaataccattataaactatgatttcagttataatagttaaaatacaattcaaacaaataattttggattgatctctttgtgatcatgctatagaatcacttaaatgacccaaacaactttatataatgtatgttgtttggattctatacattactatttttattgcacttccattcatcattttttttcttcttgattttctgtctttgtatactttatttctcttatctgttaacgtgtaagtaagatgtggatgtcttatccaagtggacacatttccataaaatcataaaattatgagatatgttttattaaatattagccggttttggaagacctcatattcctatgaatttacagaaatattaccaaaataattgcatatattttaataaaatttagaattttaggaaaaaacatgccaagtggtaataaaagagaaaagaatccaaaataaaataaattatccaattatcccaaaaaaaaaaaaagaagcaaagctatatttctatttatttttgtctaaatttggttgatgcgacgactggaactgtgatctaaaaaaaaatgcctgaagcagtctaaataattcttcttctctccagcaattaaacactacattacagccgtatagacccaaatcctttttcgtttttttttttttaataagacggcatttctctctcaatccgttcttatccaagcaaagctccgtcatcaaattcattagatcttccaaattgagttacaaagtccaaagtcggctcttttttggcattttccggcttagaataggcattttacctccaggggggctaaatagtgaagcttttttgtttgttcttgaagatataaagaaagatttgtagattaggatttgagaaactgtagaagatagaatcaaaagatgagtttcagggatgataatgaggaggctaggaatgatttgcgtcggccgtttattcacaccggaagctggtaccggatgggttcgagacaatcgagtatgatgggttcctctcaagttattcgagacagctctatctctgttcttgcatgtgttttgatcgttgctcttggccctattcaattcggattcactgtaagacaaattcaaaatctcaactttttttacatttttattccctttgtagaagaaaggtgtgacttttggtggaaaaactagtgtgagctggatttgatgatcttgggtttggtttgatttgtcattttcaatgcaagtctggtgatttgaaaatctcatatttggtgaaccgagatgattttttcaagtttgctgacagatttagaggactttgaattgggaatttctgattgtttgcttaaaccttccatgtttgactttgatcaccatcttttagtactctgtgtttggtccttaaaccctccatccttttgttcagtgtggttattcatctccaactcaagctgcaatcaccaaggatctcggtttaacagtatctgaggtaatggactgatcattgtctagagctgtctggtttttatcattgcttgtttagccgtgtttgactttgatgtaccactccatgttttagtactctgtgtttggttctctttccaatgtgggtgctatggttggtgcaattgccagtggtcagattgcagaatacattggacgaaaaggggtatactttgttatctgattcttgatcgttctgttttagatccattttataaagtcctctttcttgcgttctaaacatcttattgtgttttcttggacagtctcttatgattgctgcaattcccaatatcattggatggctttgcatatcatttgcaaaagtgagtttttgtcgttctcataccataaattggcgatttgattgtgttgcttgactttaactctttacatcattctggttttgtaggatacttcttttctttacatgggaagacttttagaaggctttggcgttgggatcatctcttacactgtaatactgaacttaactagctatttacttatggaataacggttcagtatattaatgcaactcggttcgtgattttaggtacctgtatatatcgctgagatagctccacaaaatatgagaggaggattgggttcggttaaccaggttagacatgtgtagtgactaattcctgttttgacttttgtgtactgactcgtaatgctaaacaagaaatgttgtgtaacttcttgctgtagctttctgtgacaattggaataatgttggcgtatttacttggcctctttgttccatggagaattcttgcagttctgggtaaaatctcattacacggcctgagactattttgtgattatgaataattgctacgctctaatcactttctctgttctcttcctttatctttagggatattgccgtgtacattattgataccaggtctctttttcatccccgaatcccctcgctggctggtaagccttacagtagtttgcttattcttcttgagtttagtgcatattttggttactccactcttttttttttttttaataacatcattaatcatctctgatgggatacttgatttcgttaaaatgtaggcaaaaatgggtatgacagatgaatttgaaacttcattacaagttcttcgaggatttgagactgatattaccgttgaagttaatgaaatcaaggtaacactaccacttaaaatctttccttccaagagttacatgaagactggttttcaaacgctaatttttcatcttttctgcaaatctgcagagatctgtggcatcatctacaaagcgaaatacagttcggtttgtagatctcaaacgcaggagatactatttcccacttatggtacaaatattgaatatctttccttggaatatactttgtctatcataagaaacattatcttaaaacttcttttttgtcgtgtgtgtgtgtgtaacaggttggtatagggttgcttgtacttcaacaacttggtggaattaatggtgtcctattctattccagtacaatatttgaatctgcaggtagggtttttctaacacctgaagcttcttgtttcatattattactttaatttttcattttccgtgttttcatgtttaggagttacatcgagtaacgcagcaacatttggggtcggggctattcaggtagtagcgactgcaatatccacttggttggtggacaaagcaggtcgtcggcttctgcttactgtgagtattaactcattactttcatatctttccgacttccctctacagaaagatttaagacatatccaagattaactaatgcaaatggaaaatattttccagatctcttcggttgggatgacgattagccttgtaattgttgcagctgctttctatcttaaggtactttttaaaatcttgaacttccatacacatcatttcatcttctgcaacaaatccaagattcgactttctgagttttacatctcttcttttaggaatttgtgtctcctgattcagacatgtacagttggctgagcatattgtcagtagttggagttgtggtaagttagttatatagcggaactttctagaatgcaatgaatgattatttgtgccttaactctgttgaatcgttataggcaatggttgtctttttctcattgggaatgggaccaataccgtggctcattatgtctgaggtaatgagttggttagaagttagaactaagtgttgtaagaaccgaaaagcgaaaaacttattgaactctacctttgcttgctttgtttgttgtttgataaacagatccttcctgtgaacataaagggtttagctggaagtattgcaactctagccaattggttcttttcttggttgatcaccatgacagcaaatttgctgttagcctggagcagtggaggttcctttctctctttctcttcttttctctttctctcataccatttgggacaatagagcattatcttgatggatttttgggttaatattggacaggaactttcactctgtatggattggtttgtgcattcacagtggtgttcgtgactctatgggttcctgagaccaaaggcaaaactcttgaagaacttcaatccttgttcagatgaacaaattgaaacaacttcattctttgtcaccctctctctccctctctgttttggccaagaacaagaagaaacaagagattttccagctttgttaattgggctgagaacgttactaagatttgtttgtttgttcgttgtgtgtcaataatcgcattatcttctatcacatgtatatcaacatactacattcaagtatttgtaattttattgaactctttacatagagcaaaggttttgccaagagagagcattatgaacatcgacattgccagaaaagctcccaagggttttaatatgatgatcaagaaatttaactcaacagcaagaaaaagcaaacccactggtaagaagttgctagcccagcagtaactgaggttactaggaaacaaaacttgggggatagtagagatttggtccaaatatgatcaatcaatatgaagttttgtaaacactgaaatgcctctttaaggaatatcatcgacattcaatacaaatttccaaaagataacatgtcactagagtcgcaagcttgtaccaagtgaaattgaaatgcaaataggcaagagaaactaagaaatgtttatagacactaagaataagtaccaaaccagaccattactggatttactctctcactgctatagaggtcattgggctgaatcacagaggaagaaggtgaaattcatgggacatgaagtcttcactgggtctgtaatacttgtctggtgagtacaagcgtaggtttgagacttggcttgtgtacaggcatgcgaatctttccacctgatgattcgaagataatgcagtttggaaaaagttattccccacaatcgcaaaacaccacataagaaagcaaaatataaaccgtatttacctgatgagcaaatcgagaactctggtagccagttttcatcagttgcccccagaccttgtgaaactgcagtttccacggcccacataacatgagaagtcgtaacagattgaaactgaaactagctgttacaccaatacacactcagattaacgaggctagatttaccttttggtgacattctctttgagcttgttgatgactctgtcgtactttatctcttttagactgttgaatttcacaaaaacttgacttagaatcactcatccaactgttgaagatctaggaattatacttgttctatcttacctctaagtccttgagcgctgataacatttcgtgcttattattctcgttgatatcctcaaacctgattgatagaattggttacgatataaacaagttgtgtgtaaaatggctttaacaattaagaattctactctatgcaacacagcttcttcgggccaggacctaatttaaagaacactcactttagagaccaattcaagtgatgaattttgtcttcaactgaatcacgctcatttctcatcaaaataagatcctgcagaccaaagaaaatactgaattgaaaaggaagaataatgtatacaattataaattatgatcataagcagttttagatccaatttcgtcaaggacaattcgaagacttgccgcacaaatgcatgaaggcctttcacaaaggaattgattatttagtttaataaaagatacttcaacaaacttgatttttttcaacttaatagatctctgagaataataacagttatatagagaggatccattcaccttacgcatattcctcagttcccataaaagttcaacctctttttctaattctggaactacaagcatagttctccagcctgaagaaagaagaagatcaagatccaaagtaactggcgcaaacacaggacactttgaacagtttcttcatcaacatgcaagtgctactagcctacttacatactaagctccccattcacaagtaattagggatataatataccatatatttcttctcagaatccatacatagttcagttaaacccatgaagatttgtttaagttacttcacacaacaaaacataaaaaaagagtctataactggaaatgaaaaccttaccaagtatttttttgctgcgcaagatatcaccgtatatatgatccccaacataaagtacctaacaaatacaatagctgaataagtgacgaatgatgcatagtaaatctgcagtcagtcactatagagttctgaggaatatctgtcatttcaaactaatctgatatatgtaatagagcaagcaaaattttctttgtaaaatagctagtgctctctacctgtgaacttgactcaattgagagcaaactgtgaagatgcccgacatttccaccttgaaaaactcgacaacctttatctttactcttcagtaagatttttggtgaaggatctcccaccttgaacggatacacaaggatcatttaaataagaaatagcaatatagcttgttgaagacagtgaatggatgtcacaattcattaaaccaaacctgagccataggtgttccattgtcagtattaataagcattccagactgaggttccacctcaaaaaggttagcacggctatcttcatggaagaacccaggttttgcacttaatgaaaaaatatccaattcagaattcagataacaaaaaaaaatcaaacgagataggaatactttatacttccaacaaaattcataaccaataataaataaatgattgtctaatcatttgatcacaacgattttgtttagagagattaaagagacttagtagagaaaaagacctgccagtgatcacaacatcaaaatactggagccaatcaaagttgcaagtatgcggaccatgtactgtgcgccctccgcagagaaagttcattacaatatttgtgtagtcccacaaactgcaagaatgttacacgaaaacttgtctctcaacaatatgagaaaaattgattatataaaaacagaataaatcaataatgttgaacatttgtctcccaacaacaggatattcacaaatgcttttgtatcttccttagttccatatatcagtaacaagggcgagggaacaggttacaatggttgaagttgcttaagttatattgtcgagtatataactattttcaattttttttacctatatctatctgcacagctacaaaagaaatatctgctaactttgggggaacactttgaagtttttagaaatatcgtcagcattacctattggttactaagaatgtagaacgtccagaatctctgatcattttaataaggggtactatcgtggtatcctcattgatatacctgaacatatggcaagttaagaaaaatcttaagcaaaatagacatttccaatagagaggcatggcagagttgtgcttatccaacttacaaaagacagtggtgaacataccaccagccttacctattaggttcttttgccaccatctgctttaaagttccgtcacggtggcacaaatcaacagcagcacgaacatctttatacatccgagcataactaaagcatatcattggaggaaatcaatttgtgaaaagtacaaacaatagagtattcaagctaaaagagtttcaatcataagcaaaattaagagaaaacattcatgccaggtataagttaatataactacaaccattaggaaacataaactgaagtagtaaaatgtgggaagctgtcttactcaacgtccttgggaactttttcagggttattatctttaaagtcaacaagttgagcgaacaaataggcttcggccagtgaaaagagagtatctatgagagcgtagtcgggttcatcaaaagaatctcgtactaggctgctcccatagatttcaactttatcttccttagagagctccctaaacccatggtaagctactttcacgtatttatggcgatccatctgcataatcaaaagttgattagaaagaggcaacaattattatgagagtcagaaacaaggtagtcacctttaagatgtttcccctctttttgtcaagcaccaagcctctaaccatgtaattccaatcaaatgtccactctagcagctgatttgtttttaacacaccaagtaaaacgatcagcaaaacttttctgccgtttacaaccttaaaacaagaaaatagtatactaacctcatttggatatcccaaatcatataccaatttcctgacagttccgtcataagcaagggactcgaaagtttcggacttgtattgggcaagagtgtagtccatatcaaagcctacggcaataatatttttcatattcagcgatctattgcagaaaatttggttgcttatatcaattttctttcctccttccggagaggaccattcatggggaacgtcacatccatctctggagcccacagtgtgaaactgcaacacattttcactgagagcactcggtttctgatcttccatcgaactcttaaaacacagctggcttgtccctgagagtttatcaaataaagtaaacatcattttttctgttcttcaaatgatgatatagcttttttgaacacacaatacaattagcgtagagaatagtacaaactctatccagcacagataataagaatatttgaaaataatctaggaagaaacaactggttagtcagaacccacctaggctaaaattagatacacagaagaaaacgaagctacctgatgacacgttctctacgagtggataagtgatttggaaattagtcaacacgagtcatacaaccattaaagctttggtgatcaagcatgattccactaacatatcttacctcgatcaaaaggatcaaagcgtgcaccacgttaagtcctgatcctaaagtatcttccaaggtatgctccaggcaaaacctagaaactgcaacttccacgattaaagatacctactaattaccacatcctccttcccgatctacgattcttcactaacaacaaactctgatttccagaaaactaagctactatcaaaattagctaacacgaaaatccatcggaagatagaaatcagtcatagcgaagtcactgaatatgcgattaacaccattagtctactacgaaaacaagagagagcacagcgaacacgaaaacggtctacaacaagaaatcaagcacgatgaagaagaaacctagctgaaacaagcaaaacgatgtagtaggaggaagagggaagacgaaccagtagtgtggagaaattctcttcgaggagctggatattttccaggaaaatgatggaaacgggaacgaggagagaaagtagagaagcagagagaaagaggaagcgagagttggcgtttagagagacgcatggtggtggttaaactattaaataggcattgaggagtatacgaatcgaattctgaagaaaggagaataaaattgggatttacaactgtaatacaactacttgggaatgccgtcgaaaaagtaggattcctactgataaaccactcagacatttaccggaaattcgccggcgaatattccctccgtttcaattgcatttacttttttttttttctcctttctctcggcggaactagggagggaaacgaggcgttgctgaagaagaagagatcccaaaagaagtagtgccacgtgacacattaaatcagaataaagacgagtacacaaaaagattgcgtggttgtggctgttaatggctttttaaacccaatgggcttttaacctaaactaaatgggtcgaaaataaagcccagttctaaaacctcacactttattgctctcttcccgtcttcttccccatttctctccatctctcacagttcatagtttcgcgtaaacactacgcgccgccgtaagcttgactatctagttcaagtcttccgtcatgtctacgacttcctccgtgcgtgttcgactagctttcgttgcgttactctcagcgacgactttttactgtatccataaatatcgtcgcttgaaacatctgaaaaacctctcgttaaaccctagctctacattgaaagccagcagaggaaagatcttcttcatctcccaaactggtacagctaaagccttagctcaacggcttcacgagctatgcgcatctaacgacatagcatttgatatcgtcgatccacatagctacgaacctgaagatctacctaaagaaaccctagttttattcatcgcgtcgacttgggatggcgggaagccgcctaagaacggagagtttcttgtgaactggcttggtgagagcgctgaagatttccgagtcggctcgcttcttctctccgattgcaaattcgctgttttcggtgtcgggagccgtgcgtatggtgaatcgtataatgctgtggcgaaggaattgtcgagtaggatgataggactgggtggactcgagatgattccggtgggagaaggcgatgttgatgatggagaattagatagagcatttcaagactggtgtgatggagttattagggttctgaaaggaggatctgctcaagaaacaaatggggtttcgcagcagattggtgctgttgaggatgatctggagtactacgattcaacagatgaggaagatgaagacaatgatgcagacggaggtattgttgatcttgaagatattgctggaaaagctccttcaaagagaaatggtgtagttaaagtgactaaagttgatggaaagaaggaaatggtgacccctgtgattagagcaagcttaacgaagcaggtattgggttctgttacttgagctttgaagcagtgttttcattttctcgtctttacttgaatgagcatgacttttatctcttgcagggctataaaattatcgggtcgcatagtggggttaagatatgtagatggacaaagtcacaacttagaggcaggggaggttgctacaagcactccttttatggcattgagagtcacaggtttgattgaaagttctgattttgtttcctctagtcttatgttggtaggtcgtgattcttatgttaaggtattcggtatttgattttcgaataaactaggtgcatggagacaacacctagtttggcttgtgcaaacaaatgtgtgttttgttggaggcatcacacaaatcctgtgggaaagagctggcagtggaagatggatgagccttcagtgattgtgaaaggcgctcttgatcttcataaaaatatgattaagcaaatgaaaggagttccaggttagtttatatctttctccttattttaacttgcagatgatgaaagctcagaactcacgcaggtctcttatagtttatgaatgtctttgcatgagttgtagcctggaacctatttaaaaatctcatagtttatgaaactgaacttgattgatgccttttggaagtcaaatatgctctgggtgttttgtttatatgattgatttgtttccaccattttaatgtcagatgctgacttgtattggctggctatattcttcaggtgtaactccagagaaattacaagaaggtcttaacccaagacattgtgcgttatcacttgttggtgagccgattatgtatccggagatcaatgcccttgtagatgagctacatggaaggcgtatttctacgtttttggttacaaatgcacaattccccgaaaagattttgatgatgaagcctatcacccaggtatgtggtgtctgttttgtagctttaaaagttcactaaacggaaccaaatttgcctaattcattttctttgatatctacagttgtacgtaagtgtagatgctgccaccaaagagagcttgaaggccattgatagacctctctttgctgacttttgggaacggttcattgtgagtattttaaataacctcctcctctatgtaatgggaatttgaaatgaaatgtgaattaagacccataataatctcggaccatttggttcccaggactccttgaaagctctccaagagaagcagcagcgaaccgtctaccgtttaacacttgtcaaaggatggaacacagaggagctagatgcttatttcaacctattcagcattgggaaacctgattttatcgagatcaaaggcgtcacatactgcggatcgtaagtgtgctctacttgttattctctctctctccactcttgttacacatatcattactgatattaatcttctggaaacaaaacaaaaacagctctgcaacgtcaaagttgacaatggagaatgtaccgtggcacacagatgttaaagcattctcagaagctctgtctctgaagagcaatggggagtacgaggttgcttgcgagcacgcccactcttgctgtgttcttctagggagaacggaaaagttcaaagtggatggaaagtggttcacttggattgactatgaaaagttccacgatctggttagttaacccaaacacaaaatatgatcgtctcaaaataaaaattcatgctaactttaagttaacgaaacttttgaatgaattcgcgtaggttgcttctggagaaccgttcacgagcacagactatatggctcaaacaccatcgtgggcggtttatggagcgcaggaaggtgggtttgatccagggcagttgcgttacaagaaggaaaggaatcatcctcctaaaccacaggcggttttagcttaagaaaggagtaggctaaagcttttttgtttttcattgtcgtcttcatatcctaaaccacaggcgattttagcttaagacaggaccaagctaaagctattttgttagcctttaaagcttcttcttcttggtctaaagcttttttgttttttgttgtcatctaacagtgttaacttgtggaaagatgttaaagtttcgaaatcatatcaaaactttagacagtttcaatcctttgataggtttcgatgttttgggaatgtttttgaagatgagttcgcacgtgaaggccttgcagggccaacaatgtcttgtattaaaatagtatatcaacgtggactcgtcgagtctctttctctcactgctccaagattaattagttgtacaactttaatcgacaattacagctatttggttaaaagattttaataatagacaggtttcttctttcaccagcaatatccattagtttcttaacttatccgttccaccatgtgcgatggtaccttttatcatttatcgtataaaaattcgaaagggacgtaaccatccatcaactacgcaaccaataaattaaacaacctactacaactaaaacaataaccctaaacagctttctcatgaaacaattcatttaatttagtcttcaccatcatatatgttttaaagttattttgatgcaccaaaataacactaagatcaacaagatttgtttcttgttttgaactaacaaatccaaaaatcaattgtttttttttcttcccatgagagtttcaattaatttataatccaacaatagttaaatccaaaaacacacacaaaaacaaaaactccattaattaatgatacggtaattaaagtttaccagctcttcaccggcgtgcttttcctcctcgaccgtctagacgacggcggtggaaccactaccttgaccgtcatctccggcttctcctcctcctctaactcttcatgtttcatcttttgctccttttccatactaccactactgctcctaactttcttcttcagcttctctctgttaataaccacctcagcttcttcgtcttcttcttcttcgtcctcgtactcttcgtaatcctcgtcttcctcagattcttccttcttgaaatcttctgggttctcaagattcttccttggccttcctcttcgtctccttgtagcctgagactccgtcggagatgaagcttctgctactgacgacgtttcctttgctttctgaaaccttctcttccccatcagtttactttattcaacagaataatatttttcttgaacagcttgtctgatttttaatatcttcaagagcaataaaattttcttttatgttttacagacagaaacaaaaacaacagtctttaaaaaccaaaagccgcccatttctttggtgtttagataaaatatcagaagaaaaagtagattttatttttgtccgttggttatctcttctctattatccaccaatataatacaagtatgacatatatatccttggagttagggttcatatacagtctacgttctagacattatagaagaagtatatctttaaatctagtatgcaagactattgccaccacggcaccacctaaccacgacccggttggtagctacaatctgtgtgtgaggtttgaggtcttgacataaacttcatttcacaacaaacccataatgatgacattcatataagatgaatttatataattcgatactaattgaaaaccgacctatatcgatcatgtgaggttcgaaccgtgacattctctatactgttgaacaatgaatagttgaattttgaatacaatgaataagatcacaatgtgagagtgagatcaattaacagaaaaacggcacgatgttcactaatccttaagaaatggagtaaatttaaaagcccaataaaggcccaatacttactgtttagaaaaaccaacaacaaaatgagcgtcgttttagatgaacacaaccgacgcggtgtgtctcgtaaacagcgaatggttttgttttgttggtaaagggataagatcacgtgatcagaaagtcagaagagcccatcttcttcttcctcttggttcttgcctctctcttctcgttggatatcataaaaagacaattctatcgagttcccatcactattcccgatttctgatttatttttccctttcactgtagatccttttttccgactcacacactttcgatattttcttttgttttcttcaaaaaagacatattttttttgctgggactatcaattggggtccgtcgccacgccacgcgccgagctcgcaatatatcgaaagcaacgatctaggaaggatcttaaaaatcctacttggccacaaatttttgctatttttattattttccgtgtttaatttctgattcagacaggaagattaatattaagcactagttgtgcaaattcacaatttttttttgtggatggaaacaaatttctgggtgagcttccctttccttttttttgctttctttctctcctttcttctctccggatttttctaggttttcaatttttgttttaccttcaaaggttgttcctttgtgatataaaaatatagttttcaccttctttcaatctctgcggtttctaaatagaacattggagagatttgtttctgcatctgtaaattttgatttctttgaccatctctctgtttttgtggcaagtgagtaaagtttcaatcttgacctttctttctttctttcattagttatgatttttgcttcttttattgccttaaatttccccattttgggaatgaatgtttctcacgttattctcattgattccaatttttctgcagcacacgtattccaatccaaatcgacaatatacgcgtctctgatggatatgttttggattcagtgagaaacagagattgattttggttttctttaatcatggtggagccttatgagacacgtaacaacggtgaagcatcccagatgatcagatatcagagttataaccatcacaattccagactaccatcttcattatcatcgccattgcttgatttgagagtgttctatgtcagaatcagtaatttcaaggtggatcattcgacacctgaggttctcaccattactcatattcctttggatccagattcacttctggagattaatggtgttagaatgagcatgtactctgaaggagtttcttctcagcttaggcgtgatcgtgttgataagaaatctgaagttgctacttttatcagcacggataatatcaggttatctggtagtgtgaagtttgaggtttatgataaagatgagctggttttgtctggaacgcttgagatgtctggtagtaatggtttcactggtgaatctaagcatagcgtgaagcggtggaacatgaattgtgaagctgagatcactgcagagtctggtttcttgaaggagaaacatattggtggttcggagttatcttctccattgccaactattgaagtctatgtcactggctgcttttctggaactcctatcatcctaacgaagactctacagcttggtttcagaaagaagcacggtagagtgactgcattagattcgattcccgagtatgaaactgatgagcctcataaaggaaactcatctgagcttgattatcaggtaacttttaattgcttggtacttcattttttcaagattattataatgcttccgaatagttttatattgattgaatgctttgaatgcttttcctaagatatgagtcttcatggtcactattggctgtatgagcattaagtttttcatggttttgagatttcatagtttgagtctttgagacatgtttcttggtagttggtactctaaggaagataattcctttagatattgaagtggaccaacttcgttataaatgatcatgtgaggtatggggccagccacattttacaagtcaatagatagctctcgccctctctctctctatctctcactcacactctctctctcccatttgcctcttgtcttgtgatcttaatatctgaattcttatccttttgcctgctacagtcagttctaaggtgacttattggttggaatatcgtggttttcacatgtaatgctacagtatattatctttaatttatgcatagactgatttgggaaacgttgccctgtttaagagtcaatgttaagaatagcttatgcttgaagttttaattggaggctcttgcagttgacagtgtcaatacctattggagatagatcttcatactcaccgtagattatttaactatagtgcaatgtctatatcttcgaccattagcctctattctacatttgaaagagtttataagattggaacaaaaagaccattagcgtaattgcatgacgattgtattctttctctgactatcgctatgaatgtctcttaattatttttctttgttaagtatgggagttaatttctgtgcaggttactgaatatggaagttataaacaagaatatgaaggagaacacagcgacatgtactggaatagagagtacgcagatggtgaagatggtgagatgtcgtggttcaacgctggtgtgagggttggtgtgggaattggtcttggtgtctgtgtaggtcttggcattggggttggccttctggtgcgtacctatcaatcgaccaccagaaacttcagaaggaggattatctagtttcattcaaattgcctcaagcttcatctactctctccctctaactccaatccgttgcacatcacttttgactgcagaactctaagctatatagtctaagctaatactgctgtgtagtataatttttgttttatgtactttttaatctctttgtgccttcaaattttgaaagaaatcattttcccttcttcttgtgtttggtgagattcagattgaaagaaacaaagcttgttgctggtaatgcgaatcttgttttctgcttcctgtaaataaaatgcttatgagtgtaaagagtttttggattcgcttacaagccttgcaagagttactaatacacacaaaccctctttattttaatcaaatgctatgtctaaatcatacaacctctctacttagcatcaagagctaaggttagtccatttcaaaagggttggttttaataatacattgccttcagaaccagtcaagggtggttttggattggctcaggggcaatctcagctccagaaaacccgttgctcgcgtgcagctggttattgttactgtgacccaatccccaaaagttagcagttttaacatcgtcttggttcatttgcttggagaactcttcatagttatactgcaacaaagctttccctccaaattcggttgggagattttcctcgtcgaaaaatgtgctcataagctccacgctttccgagttctttgggtaaacaaacttcaccttgacgaatgtctttgcatcaatgaagtacttcacaatctgtggaacaacacataattaaagaaaaaatgaaaatgccatcatgttcctgcacatacagacgaacaaaacacaaacaaagttgtcttgttgtctaactatgagatagaagtattgttttgtctaaccttccagaacgcctcaaagagtcttggaggattatagaggaaagctacagctagtctctcagggtagtgattttgcagaatattaatagtttctctggcagatttaataggcacactagtgctcattgaccaacccgtgaagtcaataagccaagacatctgttcttgatcctctggcagattcagaatagcattctcaatgagatacaccagatgtttcatctggttctccaacgattttgtgttctacaaaagttgtcaatgaaaatggaagtttcagcttgtgacctgaagttaactcattaactaagaaaaatgatgaatagaaacctgcaagccgggtctcagtataagaaccgttcttccatgcctgtcatggaatccagctttgtaaaccttaccagtctcaccttcacctgaaacttcattctaatagaaaccaagaattataagttttggttggataggaattctctaagatttagtagcatgatgcagttatgatacatacccatcggatttcctcgggtttaaaactcgatctccatttgagcgtctcctcgagcatcttcttggctttgcctacattccaattcctagcttccagatatctcttcagacatgcatctgaacaatacagtgaattccttccagaaagctgacctatgagagtcttaagctctttcatctataatcataaaaatcagaaggcattatagcttctacgaatcaactaggtaattaagtgaaatgaaaatcatcaacaaggccttgaaatatttgacctttgcctctctgagagctgcctctttctgctcttgttcggtttgagaagaattcttccagcgaaacatttttgaaaattgcactttgggtccaatgtatcaaaatctctttactctgtgaaaattaactacaatgaacaaaagccatgttaataattagcctaatactaacaacggccgttaaatccaaagccaaggttcatgtgatgcgtgtgacaggacatcacagaccaaacatgactcaaccacctactgcttcattcaactgcttacacaaaacctcagaaattcaaaatctagtaaattttcaattcccaaacatatcgatcaacaagatttgcaaagttgttcaagatctactcaaattttggaacactagacaaaggaatttcctataaactcactacaaacccagaaagattcataatctacctacttttctagtcgtcagatgtaaaataaaaatcaagagtatgaaatcaaatgaaagacccaaactttaaaaagaagaacgagggtagtaccgaaacagagaacgaggaataaagagagaactttgcagtgatgagacaagtcggagaagagtcagctgaagaaaagttgaaactgatttcatgaaaagagttgcgagaagaaaagtaaagacattcacctaacgcttgcagttcagacaagtggacaacaacagagacagcgattaaaattatattttaaggtaactgaacggtacggcacgccacgtgagattcacgtatacttgattctgcatactccacgtgtcaattgccttagaggccatagaattttgaaagcaaggcccaaggaatcaaaaatacatgtttatttcgaaatctatccaagtccaattcacacataaatattggtatggccacaattatatgattatttagagcaccactattggtgtatttagatgtatctttggctaatatctaaaaaataaattttgaaaaataaatcaaaacagattaaaaactaagatttgcttcttagctaagaagtttttatgaatgaaaaaaatactagattcttaagtaaaactaaaattttgaaaaaattttaaaaactaagatttgctttttagtttaagtaattgttaagatacaagattaagaaccaatggattcttaacctttggggacggtcttatacactatgagaaatatgcgattacaacaaatggaaggtacgaaagataaacacaacttacaatagaaaactaaattattacattccaaactatctcttaacattcaactggagtttgaagagaaacaatctaaagcgacatctaaaccatggccatgaagacacgctgtgcacaacgatgaatcgaaagagtcgaaaacacctttcctccaaatcttgagaagtacgacccctttaaaatactacaatctggcaaaactcgaatgcaacttatttaacgacaataaaagttggaaggaggtgttgcgactttcttttgtagttaacacgaggattcctaaagttctaagtcaacagtttacaatgaaaccgacatgtcccaattttcagataatttcaagaattccgcaatctccattgtgttatagaaatggttgtcaagtaattggaaggattggttgaaattttgattgaaaaaaaggtgtcattcaacataaaatcctaccaatacctgcaaatattaaacttccgatcttttgatggttactaatacatgatataaaaaaacaggttcttaatattgatagtaagctcagaaggttgcacaatcatttcaaagattgaataatctcataagtccagacatatatattagcaacatcatcatcgcaaccaaagagaaaatgtaataagatcaaatactcagagaagctacatagtagcgatggcagacaatctacacggcatcaattcagaccgcccgtctgctaatatctcatcattgttttgataaacaacaacaacaaaaaaaaactaagattcgaattatggcatcagataataagcggagatgttttgtcaacactgttcatcagtggttaagcataaattaatcaattcttcatttgccaataatcaaaaattaaaaaacaagaagaaactaaaacaatataggtcgattcatttgacgccaaagctacagaaaaaagcaatgggttggtaagataacctaattcgatataagcatccgttctaactcctctaccatactttgtgatttttactctacaagtaatagaggagtgggtaaatcaaacagatgcatctactaaacccaatcaaaatcgaaatcaaaaccaaaacagagcataacaaactacaagagtcaatcgatattcgaacaaattctagataccagaggcgatgcaaacgaagaagaataactgcggaggaatagatcggttgttgtttatgaattgagatttgtcaggatttatatagcggagcatgtttttgttatctcgcaatctagggtttccctcttaacggacttacgtcggtattatcttagtgggctatgtagtgaaatgattggcccattttcggttggtccattgggattattttttcaaaaaaaattttgaactaatgaaactcataaaatcattatggaaatttccaattgagtcacaaaaataaataaaaacgaaagtgctaatgacaattgaaatatatttaaaacattagtttacagtacaccaccatctcaaaattacatatttactccttttgttacaaatccacggtaggtgtgtataagagacctatttaaacctcaacaaaaaaaaaaaacatctagaagaaaaagatagactattgtaacgatttctccatcgtgcctaatgatcattgttgatatccgacggtggtaaaaagctctccaaacacaatccacaaatattgaaatccacctcctcgatacgccatttctcctctattcttctccggtgattaacagctccaccgtagcggtagagtgtggtcacggtttgaccaccatgagcaatgttgactgcgtcaacgaatatgtaatcgtcgatgatggactccatacttgtctcccaaaaaacgccgtcgtttttgcctcttccggatttgactctcacgagttttgtgtcaccgaactttacgagaagtccggttcgttggctgaagtaaccccataccgtgtggtggatcacctccgtgtttggtgagcattgtgctttgagaatatctgacggtgtttctacttttaagacgaaacagtcttcaccgttaacgggttgttcaccgatgcaaacggcgtctaagaacaaactcgctgtgcatctcgggtctagtccctgccacgtcattcaacagatgaaaaatgtcaaaaggtcaatctttagtcatggtaagtttatatttttttaaggcaaaaattgctaataatatgagataggatttattagcaatcgagattttgtaacaatgttaatcaaaatttgctaataacaattttgtaacaattaaaatttgctaacaatcaaaattttgtatttcttggtgtatatcattgctaggatttatttttttaatggtgttatgaacattttgactggtttcctctctggcttagttctaatttactactaaattagtactttataagtttataactcacaagagtgctcccatgtttgaacatggaatatgatagggcgatcaaaaccactatactacaaattttgtcatttttgttaagtttaatcgtaaaatagtcgataatatgcattgaaaggttaaaaatgcatgggcacctgaaaaaatcggcggagaggacgaggaggaccacggtgggcctgagaaggttgagtagaggattggttccaagccactttgccgtcactaccagcgctaatcttgaaaccggaaaccactagctccaagaaccaaagatttggattcttttgccataaaacaaaacctccgacctcgaaactgcctttaccaagtcgcaccggcgtacccgtcccttcgtcctctccagcaaccatctcggagccttgcatccttacttgccccaccgcgtacatacttttcactgcgttcaaagccgttggacctccgcacgctgccacgtactgttgcactatgtatttagccgtcgacgcctccttcaaatacaccattactatcaacattccacataataggtttgctttctacttagacgaacgtaaattgtatgataacttgtttcatacgaacaaaaaaaagaagataaaatgtttatcctataaaactttttttatttttgaactatttgttttgatcaaaaaaaaaagaactatttgttatctcataaagaaattgagggctaataatcgctacacattccatctctatacatttttctctttttgaaattggaaaattttagtagtcttctaatcctcccatggtttatagaatcattgaaaattgtgccattcaaaacattaagaataacgaaccaaaattaaaactgcaagtgaaagacttgaattctaacctataaccccacttcatcaaaaggttaaacaaaaatcaatagattgaattaatgataagatacgtacgatggaagtgtcgttgattggtcgggatagacaaaactcgagcgggacatgaaaaggaataagaggacttcctacgattttcaacaaggccacaaactcgttgtctgattttgactgcaaatgcatgttgacattactcatcgatgacgatgacgccggcgttcttacatcagtcgccaccgcggtcacaacggcgtgtgccttcatgagagcgtgcatattcctccaccgcccttgggcgttgcttcccatctttgtaaacatttcttccggcaccggaacctctaacaccgtctctaacccgtcttctctgtccaaatttggacaaagcttcctcattttcatttataatttttttttttttcttgttgatgatccgagagaaagaggggattagggttttcctctttctccgaaattttattacgggagagagatcgatagattttagagaatcatgaggattaactacgaaaaaaaaaaaactattcttgtttttttcttctcaattttctgttagccggctcttattaactagggtgctccttgctcgtagctatcgtgagaacacgatttcaggaggatccatctaatctatctcatctctctatgtgtaatttatataatcttatatatactgatgtgacataatcatggatttacacttagaaatatctataaaacgttgacaaaatatgtatattaatttgcatacgaatatttggatacgttacattgtggtcgtgtactacatatatacgtggaacacttatagtagtagtactcgaggaatcatatctaatatatacaatcggagtggttaggtgggagaccaactgtgtaaccgagtctcctacgcaattagctctagttgttattgtttttttgtttatagtcagcaacacatattatacaagtttaaatttttatgtgctataaatcaaacgatattagtaatatgtgctaaatttgttattatatcatcaattatccgtgttcgaaattatgatttattcaaaatggctttagcttttatatttgaatcataatggtataaataatcattttacgatatttttacaaaattgtaaattaacgaaacaattatcccctatcatattgcatatatatatttttaatcttagtttctaatttttgtttttgacggaattgcatagcgaagaaagctcacctttttttttcaacgtaaaatagaggcgccaaaattcgaattgtttggcgcgtaaatcctcaagcaaattattcattttcacccttttggcactgacttgtcttcttccaaacgaacagaaacattgggcaccgtaagattctctccaattttgtccggcgattacaatcgaagatgatgaacgatgatcagctttctcctattggagaatcgagtgtcccagttcctaacaggatgctaagacgattgaagaaagctaaattgatctccgattcatgtcctggatctgaaaccttcgattccgaaaaccccgacggcgaggatctgggtaagtctgaattgcagtctgcgaagggttgcgatgggattgaggaagaagatggggttccatctgatctcgacggtttgggtgtagaggatggagttaccgcgaggaaggtacttgattttgattatgtgcctgagtttaatcagacgatcgaagatctgggcgagaaaagtggaagcgaaatctctgattcggaaacaagagatgaaattagggtttctgaaacgacggaatctgaaaaggaggatccggatttcgagacgactgtgcatgaatttgattccccaatggaggaattgggtgagaaaggtgaagacgaagaggaaattagggttccggaaacgaaggaagctggaaagaagcgaccaattgtggagacacgtgatggagagggaaaggagagaaagagagataagaagaggaagaagaagagtgatgactttgatgagctgccagtctctactgcttccatgaacatgactaagaaggtagctctctctatttcttactagtttcattttgagttaacattattcgtttgtgtgtttccttctcctgtgtttaattggtgttactgttcttcgttcgtctgtaggaaagaagggaatatcttgatcagcttcgtgcagaaaaccagagactcttgcgaggtatgatactctcaaaacactcttcagtgctcatttcaacgttttgcagggaactgaaaattgtttgtgtttttcttttcatgatagaaacgagagatgctgcctttgaagcagcccctcttgtccgaaagccgatttcatctgtcttggagaaaattcgcagaagaaaagaagagatttcaaaacagtgagtttgctatattcccttactactttcccttataatctcttttcttagtaaccgtgtttgtgtgttatcatttgtgttgttggcagattccttagtaggaagaagtccaaatctattgacatatgcgaccgggatgattttgaagatgttgtagctgaagagatgaatgaagatatgaatttaacaagcaagcaaaattctgcaggacagcattgctcggaggactctgcaggtccgtcggagaactcagacagtccctctaaaagagaagctgaaagtaaccctactcatcaggtgagccaactcatgtgttgatactttagatctttgcacaataggaagttgttttctgtttttgttgatttagttttggattttgaggtccttaatcaaagttttgtgatatttgaattcttctcgagagtccagacttagtataaagttcaaacatttgaagattaaaacctgtaactatatatacctacatttccattatgttaaccccatctgcagataatttgaatggctcatttcgtttccacgttacaaatgctaaatttatgctgtggttcaaaggctagtttgtaaattcaggtttcaagctgactctctcagtttttttccttttttggttaggatccatccgtgtgtccacaaacgattaactctggagatgaacttcttgagaagatgtcaagcagatctttggaagaagtaatgacaccgtcggtagttgccatgaacctcaaactaaacctgtctcctgtgcctgacaagtgagtctatctttagatgtggttacatgcgaaaactgaattgactataactttgatttgctcgtctatctaatattggcaagcttctcaaaacgcagtctttacatgttcataagaatattatggacagatgttactttcagtatatgaatagcttgtgttctgtgatatgaccagaagagccaattgtttctgtaatgttaagttatactgtgtatactttgctttccatgcaataactaatccacatctgcagatcttccgaagaagcagagtacataaagggaaattctgatccggagatccatgattctcctggcgaccctgttagaaaatttattgatgaggatgctgaagaggaagatgacagtgacaatgatttactccgatttgaggatgaggatgatgacgaagatgaagacgatgatgatctcagggatatgattgtcagtcaatttaaggaagatccaactgataaagatagacgtaatgaactgcatcagaagtggctcgagcaacaagatgctgcagggacagagaaactcttacagaagcttaaacgtggtgtgcagcatgatgaaacattattgtctgaagatgaagatgacgatgttgatgatgatgatgaagagaggcctgaaggtgctgatggtgaagaagtgcaaaaacctgaagccaatgaagatgaagatgaagatgaagatgaagaagatccaagtcatgcaaattccatgcgaatgaccataaagaaaataaaggaaatgatccctttaatgttcacagatgaagatgatgtttatgtgtcatcagacgatgaggaaatggaaaagaagcttctgcaacagcgactgtacaagaaaatggtaagtgatcccggttcaatagccctgtctgctccatattttatcatttgatccaccatacctctctatatagtaaagattgaaaagcttgtttgatgtttcgcttgtgctgccccattaatatggatcattgttgtttggaacaggagctaaaggccaagtcttcatcatccactgcggatgaaaactctgaagaaattcttcgccacatcaagaagcctgagatcaagaagaaagcaaaaccttcttgtaagataccacccaagtttctccctgtatttgtaatcatcagctgagtttatacacacattgctgattgcttctaaccattttgtttaaattgttttcagcttttaaagagagggcactcatggaaataaacaaaaaccctgcagcatccaaggtataagccttcttcagttactttcgtataccaataaagttcgtagatactagataggtcacactttgagacttcttaaaaataggacaatgaattgcaactttactaatgccgtgaatcttttgcagtcatcgttcttgggtagacttacaaagagttccatatcagaaggatctcgcaagcgcggttcaaatgttgtacgtggctatatattcgaacgcgatgacagtaacagcaaaagctcaaattcagtggcagaggaaccttcagttccagagacggtaaagctcttccctatataaacatacacatttctggtacacatatttaaataccttcttaataacctatgcagattattcaagaaaaaagccgaccaaaaagagctccagcaaaattcactgcctcacagtcacaagagagatcaacaacattacaggcgacggtggtggagaaggagacgagcacgaggcaacgatcaaccttgtacgagattctaaagatgtcatcaaagaaaacttccttcaattcacgcgagacaatgataagcagcaaccacactgagtctatatttgctgctttcaaactggataagaaaccagttaagacaaatccacaagtaaactccctcttcctctaattgaatgttattcttgtataatcagatctccatttctccaagtaaaatggaatatttaacaggaaaagagatgaattcagagattttgtcttgcacagttgcaatgcaacggcacgtgtggtgaatgaacgtgaatcactggatcgtgaccctttttgttaacatgtggccaccaaaacggcgtaggaccgcgcgttttggcctttatctgatcagactcagtctcgattctcaagtacataggttggttgctgtaactacagagactttagcgagagattagatcgtccgtcttagtcattcgaatcttttcttagagattgagatcagaattttctattcaaagttttgttttatatattcaatgtctacactatactatttctttataatggataggattctattcaagaatcattcaactaacatccattaaagcaaacagtttttatcacatgttgtaatttactgaataaatatcttaacctggtgacttttctttcatcccaaagattaaaatcgtaaggatatatctcctttcttccccttaagcttcgttgagactgaagaagaagaccagagactatagagtttcggacacaaaaagatctcaaatcagacaactttattttattactcttagctcaacgttgtttgacttacaaaagaaaatctcagatagattctgaccggataaatcgtcttccttccagatccgaatttctccatctcctgtagatctgcataaatggcggttactgattgacttcaggaaaataaaagggagacctttctgcttcttttcttaccatcttgaatggcggattctcaaaacggcaagtccgcatttttcttcttctttgtctcgcttattttgcttttcctttcgccgtcttattcggatgtcaccgcttccgagtccgatccgattccgtacgagaactcagatgcttctcctggagtagtgaccagcagtgaatccgacaggcaaggtgtttcattgcatagacttgaggaactcgttaggaatcttacggaactagttgctagattagacgctaagttatctgaaactccgtttaaggtaaagaaagagatcactcgtgatgagatcgaagagaaagctaaggctttttccgttacaaagtatagtcctttctggtctgagagattcgaattcacatcagctgtgaaattagactctgaagcgacttgtatcaacgtgttaccgtttcgagatcacgaaggtttaagcaagtatttcgcagttggagattcaagtggtagggtttttgtcttcttgagaaatggcgatgttttggttgagtttttcaccacctgcgattcaccaatcacggcaatggtgtcttacatgtctgtgtataagaatgagagctttgtggtgacgggacaccaaagcggagtcatcttgttgcatagactccgagagggctcgatcggggaagatttgaattccgctgtgatggaaaatgttggcaagtttgatggcacggaggatggtttgcaagtgactctattggaagtgcatcatgtgggtcgggttaggtatatattggcgacagatcttagcggaaagcttacggttttcactgagaacagaacggtttatggctctgttagcccaacgagtagaccgcttgtgttcttgaagcagaggcttttgtttctcactgagactggtgctggttcattggacttaagaagcatgaagatcagggaatctgagtgtgaaggtcttaaccattctctagcaagaagttatgtttttgatgcgtccgaacgggctaaagcttatggattcacatccgaaggcgaaatcattcacgtgttgcttctcggagacattatgaacttcaaatgtagagtgagatcaaagaagaaggtacaaatggaggagcctgtagcgttacaagccatcaaaggctatctacttatagtcaaccaagagaaagtctttgtatacaatgtatcgactcaacactacgtccgaaccacgggtcctcggcttctttttccggctgcattagaagatatcaggtcaacgttcttgagccatcgagaatcaactaaaaccacagatcaccagaagctagaaaaggtaactcctttaatagcaagcgaccgcgaaaagctgcttgtgatgggtttaggagacggatacgtagctacatacaaatcaaagcttccaatctccaaagcagaattcaacacaatgctttggagcagtcctgtcttcttcttcatacttttcttattcggcgcttggcattttttctctaagaagaaagaatctctcacagcttggggacctgacgatcctttctcctccacgacaatgtcttcttcttctacaacaactgcacaaaatagttccgcattctctgaatcaactaggagaaacgacgaccacatggatcttcggagaagatacgtttcgccatctcggtatcctcctggagcagcaacaggtgcttaccgttcagtagggtctaacgacccgagctcaagagctccagtggaaactactaactacagaacaaccgcacaggagatgaagtatcgtggtgggtcaggtcttgattctggcggatttggtaaaagaagagagagtttgtttggtaataacaaagctttagacgacgaaagttagttcctttttttttcatagttcgttatgttctttttttaccggtcaacgcttgaaaattttctaatgtgtaaaactccggcgaagaaataaaatttttaccggttgctttgtttcttctccggtcacttattgttagtttaatgcttcttaactgtaattttcacaatctcaagattaagaacagattaaaaaaaattcaagatcaaataaatgaaactgaaccagagagagacttgaggttaacacgtcaagatatggcagtgttcttcatcttggtcttggtctttttcttccttgtcttcagattcatctacagtaatatatgggttccgtggagaatccaatctcacttcaagaagcagagcgtgacgggtcctagttaccggatattcagtggaaactccggcgaggttagccggctaacggcggaggcgaagtcaaagccgattccttccgggagaaatcctcatgagttcgtccaccgtgtggcgcctcactaccacgaatggtcacgtgtctacgggaagacgttcctctactggttcgggtcgaaacctgtggtggctacgtcggatccaagactaatccgggaagctttgacgacgggtgggtcgtttgaccgaattgggcataaccctttgtctaagctgctttatgctcaaggtcttcctggtcttagaggtgatcaatgggctttccatagaagaatcgccaaacaagcttttacaatggagaaactcaaggtaacactaacacacatcaatgtagaagctaagatctgtaattcagacaacattgtgctatttggaatctcagtctagtttagtttaaaaattaccaaatccggagtgctttataggattgtggctaaagctaagatctttttttcttttatagaggtgggtgccacaaatggtaacaagtactatgatgttgatggagaagtgggaagatatgagaaacggaggagaagagattgagttagaggtacacaaagagatgcacaatttgtctgcagaaatgttatcaagaacagcttttgggaacagcgtggaagaagggaaaggaatctttgaattgcaggagcgtatgatgcgtcttttttatctggttcgatggagcgtttatatcccaggattcaggtaagtcttatgggaaattttcctagttttgagaacaagtttggaactagaaccttattgctcactttttgagttttgaatggtggttttagattctttccttcgaagacgaatagagagatatggagaattgagaagcaaatccgtgtttctatcttgaaactgatcgaaaacaataaaacagctgttgagaaatcaggaactctgcttcaggcttttatgtctccttacacaaatcagaatggtcaagaagagaagcttgggatagaagaagttacagatgaatgcaaaacgttctactttgcagctaaggaaacaactgctaaccttatgacgtttgttttagtcctcttagctatgaaccaagaatggcaaaacattgctcgggaagaagtcatatgcgttctcggacaaaccgggcttcctactctagacatcttacaagacctcaagactgtaagtcctcaagccccactcaaaaatggtttcaggaaacactgtttcttagcaatttcttgtttttgttaacagctaagtatgataatcaatgagactctccggctctaccctccagcaatgacattaaaccgtgacactcttaaaagagctaagctaggagaccttgacatccctgcaggaactcaactctatttatcagtagtcgcgatgcaccacgataaagaaacatggggagacgacgcagaggagtttaatccgcgtaggtttgaagatcctaagaaacaatcagctctgcttgtaccgtttgggttagggcctaggacttgtgtgggacagaatcttgctgtgaatgaggctaaaactgttctggctacgatcttgaagtattacagtttcaggttgtctccaagttatgctcatgctcctgttttatttgtgacgttgcagcctcaaaatggtgctcatcttctctttactaggatatcaagttaaaaaataccaagattggctggtattatggtttccggttttctccggttttaatgtaattcggttcggtatttgaatgaaaaggctaaaatggtcaaagcaaacaattatttttatattatcaaaccctgttatcttcttcctccactctctcagctctcatgagtctgcaactcctaaatcactgattttgtgttcatatattgggcgggaaacaaactgattcatttccccctttaattcccttttcttgttcttgtaatctgagatatactgtaattggaaaaagtcggataggaaagataagcatcaacggaaatacgcgctcaaggtgttcgacgaaattccgcacagagacaataactctataagagatgccactagaaccgattcgattcttgagaaccaccgcaggcgttgctgttggtgggtttgtgataataaccgcggtttcttcagcagctttaggagcatttcgatatacaattgaagagaaacggaagaaaagcggaatggcttgtagagtgtgtcgtggaaaagggttttacatatgcaaattatgcaaaggaaacgcaacgattaaatggtcaccattgtatgatcccgtttgtatcaatccatgtctttgccctacttgcgatggtcacaggttttttttcctccttttaactcttaatcagagaacaaaactctgagaagacatttggatatggtatctaataattttcttttagactaaaatttggaaactttgttttaacattgcagggtacaaaaatgtctcaactgcttaggaaaggagtactggtagactccttaggtttatgatttgatcatctttatgcttctgagaactcgaaaacggtttggtttttgtatacagcttttactaatattaaaccctagaataagctcttttattcctttataaatttcctatttttataaaggggacacctaaaatatctcataaatgtttgggaaacgttctccatcacgttttttgcttgccgtccctctgtttcatgaaacgtttagaggatgtttccctgttgtccccgtgaagtaccagcccccatcacgtttcaggtacgtgagacgcgtgcatcataggttaatagtgttgaatggtgtggatttgaggggaatataataaataatcggtcctgctttgtaataaatatggttgtgctgagttcggtaattctgcctaaacctctctacctagttagatgttattgttaatatggcctttgaccaagaacaacttcagccgtgttaaaaaacattgaaaccaaaatcaatggttatataagattaacttgcactactaggatttgatcacagaagaaagaaaggggtttattaatttggttactgtatcttactctttttactttcggataacttcaattggcaatggcggttcgtaaagagaaagtccaaccattccgcgaatgtggaattgcgatcgccgtcctggttggaatctttatcgggtgcgtctgcactattttgatacccaatgatttcgtcaacttcagatcatcaaaggtaaacttagttcttatactctaatcatgtacagtcggtttgttttttgaaattctgtggtctagagctctagagttgtgttctgaattataagatgtcctctggaagctagccattatggcatttgagttgatttataatgctggacatggtgt

SEQ ID NO: 1253 - DNA, 94487 bp, Arabidopsis thaliana
gaattcatataagagaaactttgagatccattggagaagtcaaatttcaggaggtgaggagccaatagcttgagttgatcggttacacaagccgacaaaaacagagctaagagacacaaatctaaagggtatgctttgtgtgttaaaccctaactcgctttagggcaagagaggagagattcttcacccgagacggtgtcgtattaattgatgtgaaagaattctagggaagcttcaaattaattcatgtgctgagactgagagtgagtgactctgcaagtactttttttgaacgaggaaagggaaaaaaaaagcaatagacacaccgaaaatttagctgaatatcattcctttcgcattaaaaaataaaatacgcataggggcatatattaatatacgaataattgcatattaataatatacttgaaatccatgaaaagacaagggtttcgagtttttcttctctggatatatgcgtttccctttttggcatatagcttcaaaccaagaaaataaaggaaaacttttaagagttaaaatttaaagaaaaaggaaattaagaaatttacaatttaaaagccaaaggtatatgaataggagatggaagaaacatgctgatattaaattgttggaatttttttttattttttttgataaagttgttggaaattattatatagaaaacaaacgagaagtctaaatataaattattgtataagtttttgaaagttacatatcaaatttgtccgcataataatgcagtattccctagaaacaaatgtaatactcccaccatttatcattatatgctgtttaaagttaattaacatatagtattaaaatttaattaaagtttcacttctatctttcattaatacacaattatatttctttcatcagttaatacgttagaaaaacatagattttttttttgtcaatctgttagaaaaacatagataagacatgaaattttaacaaaaaaaaatatttgcattgaaaatataaaataaaatttatcctgaaacaaaattaaagtcttaaaacgacacttaattgaaacagaataaacagatgacaaaaagtaaaataaaagtgaatcaaaaatgttagccatgaatcgaattgccttgaagcgtgtgcatgtaacgccttccattatgaatttcatcattttctttaaaaccgagattctacctattcaaaactaaattcagtttcaaaatgtttttggtcttggtcatatattctaaaactaattaaaaactattaccatgagtgagtgcacttcaatttttattaaactaattataaattattattgatagtaaaaaaaatatagaccaaactatttattatcaatgtatattaactttctaagttagaaattcatgaaattcgatataatctacataaggtaccccaaaaaagtgtatacagattttaagtgggatttgtttaaaataaacatataaaaagcatcatctctccagtgacatgtgttaagtttctacattgaaaatttcatatttacatcaaaagtttgaaaatatcaatattatatagggtaatattagaaagtaaccatggaattgaaaagaattgagagaatagccttgtgtcaggaaacttaggtaaataacattttctatggtggataaaatactaaaatatccttagattttcttgtttttacaaaaatatcggtggttgtagttataaagtttttatgtatttgtctaaaataatatgatatatttacaaaagagcatgcaattctttaaaatacatacagaatatatatacacgatatatatgtttctctgaaataatgtgtttttcagaaatagcacgaaatatttataaaaagcatgcaattctcttatagattgcgaaatttaaaaaattacaatattacatgggtttttattggataacatgacaaatatttatttatttcatgagtttttgttggatagcatgacaaatattaatatattagtgttaataacatgttttgttcttaaaatacatgcattttaaaatcagatatttgttttaaaatcaaatttaatctcttatatcacaacgacattgacggagaattcaggtaaaaagagaaaataaagaatgagagatagagagatttctatggaaaaagaaagagagaacatgtgggtgaacaaaaataaagagatatgatgatatattttatgagaggtggtgaagattattttaggagagggagagagaaatagaaaaagaaaatgacatggtgaatctgaagaagatgaattgtgttaaagatgaaaagagaaagagaactctatggctaaagtctcgtaaagaacatgaaaaagaaataaaagaaggaagaagaaagagaaaggctaaaatagactaaatattgccaaaatttctgtaaccgacaagtactatttggttctaagttattttgtgtattcttttcaactcaaaggttatttcttacatataaatatgagtcaaaccattctttgctttttttgcaatttatgaaacacatttttagtatgttaataattataatctaaatgtcttttaaattttatcaagtatagaaaaaattaagacgttttttttttctctttttttcctgtcaacgatgttcattggacctcctctctcagtcttttgctaagaggtggaacttaacatttattacactatgcgataatgtattgcaaattaaatgtcttttcagtattctaacatagaagaaaataatgatcgagattcattagttttgtaatcgaactctcgtgtttagaacaccacttattttaacagatttgagctaatatgttcattctttcaaacgttgaatatgaactatatttagaaaactattgttatacataattgctttcaacgtttagaatacttttaattatttaaccatacattagttggttaattaattaacagcatttaatattaattcgcacacatattccctcctctatgctactacttgatcttggtagtaccaagctatatatattaaagaaattgaaattcttaccaaagtttccccacttgtttgataggtattagtattaattatccacttttactgtaccagctagaagggggtcggacataagtaagaataatttagacgataagaacgaataatcaacgataactattttcttaggatactaaatgaatattttagtgtattaattttttattttacgatcatcttatggttgtctaatgtgtatgtaaggtataagtatgtgcatatctaaatccatttgtgtgcacgcattattcgatgatctaaacaggttagtattttaattatttacagtttgcacgaaaggattcatgtgaaagcttataaaatatgcagacggacaaacaataagaattgaaaatgagtttagcactttcgattgagatatttttattttgatcatagtatatattacaatggaatgatatatcatatatttgtggacaaatgatgcattagaaaaaaactttcgatataagttgatctatctagatgtagaaatgaagtgtggatcttgttggaacgaaaaggagaaattgtaaagatgtgcggatttagttacctttgaagcagtctctttaacgtggatgcatgtgcctcacttaaccaagtagtctcaatcagaaccgttcatttacatgaccggtgacaatcggacgattcatgacgtgacgatgcaatcgcacagtctgcttgatacacacgtgcacggagcaaaagtcacgtgcggtcaaaatgtcagagcagaagctgagctgttgttaccacgtggaggtggtcggaagcatcggtacttgttccacgtggaggtttcccccaatctatcttaccacacaaaggtatttaatacctcgagttacgtttttcacatatttatataatttaatttctcatatcctaaccatcaaaattccattacgtttttttttaatcataagttttgttaagacacctacggaagttgagttctttctaatctggatcggcgctgataaattttttattttatttttattttaggttttgaatatgggccataatattttttagtacaattggcgggtctgtatctattatttattaatgttttgtttttcttgaaaatgattgactacatggttataacatgatacacgacataccaatatatcatcaagttctattataatagtaaaaacaggatttaagtctgaattaactgattgagaatcgagaccataactatattggtcgaatctaccaaactacaataaaattctattagtgtcatattcagtggttttagagattagtgaatcgtaatacatgatctccagttctccaccatatatagtttcatacaaaagtatcatcaacctagctacatcactggactacaacacatttgtgaccaaatcatgaataatatatagtattttattaatatacaattgaaaccaaacatgtgacctccgaatctattatagtcgttggattgaacctcaagtagcataatgcattgcatctgttagtagtgattagtaaagtactaggaattatcacccatacaaaaattgaattcctttccatccttactttcgacgtggcacataacgattgattagattttgaactgagatcatctcgggaccgtacataaatactctcgtcgtcggtccatgtattgttgttcttattacaagatggaagttcggtctttatcaaaaaaagaaaaatgtttggccaagaggggatgaatccaaaacttgaattctacggctattagcttcacaatgtatgtatgtatatataaaccaaatatatgaatgtaaattatgtaatctgcatagtaaatgttttataaagttaaagaataatcaaaaacaaaagttatatggttaaattaatgggttatggactaatgtaattatttgccaacaatcctgtggagcgactaataatgtaattagttatcacaaatcattttaaattgctgacaaacgaagatgatcataattcaaaatcattgaattttatgatatactataactttaacaaaaagttaattagtaaaagaagaaaaaaagatgattatattacgggtcaacattttaacaatacctttcctcattttcataaatctttggcgactagttatctgccactataacccggtaaccccatccaccaattatcatgtcttttcattattatattatgacctttaatgccgaaaaagtcgacaaaaccaaaactaaagtccattcgaattttagtgcttttccaaatgtattatgagcatatcttttctttctttctttgttttaatatgtcttagtcattcagatttgaacaagtacctttatgaacgatgaagtaaactagaaaaaacaccgaataaatacagatacgggtttacacatattctgttgtaaagaactagcctcaaaatgacaatgatcacttacattttgttggtaccaaattcgttatgtaagttgaaggagtagagttcaaatcttttcaatgggatttcaatcataagtagataatttgcatacattaaatggtgaaaatgctcgatgggctgtactatggattctgaacttagtttgtacttcggttagagttaccttgttattgaaaaagaagatgacattttgaattacgaactatacaatatcacaatgggcgcgaattaccaaaaaaggctcgagaagataaacgcccacatgtttcctaacctttatggactttgtgagttattgtcgaggatttgggcccaagtagagacccacccacgtgaataagaaaaaatttcgacaggatgacgtgaacaaaacagcgtttgtggcccatgaaatttaaaattactgttaacagtttatttggagattttgtgtaagtacagcttaagaatagcccaataacaaatgggctgagtctcaattcaatttgatagatgttttgtctgcatttgataaacaccatttaaaatgaaacataggggaatactgaatgaaaacttgttaagaatctaccaactctggtttatccatcccaaagtggaaacacttttcactagtgagtagtgtctaactacaattgattggaatgtttgttacatcaagtttagtgtcaagaaacacaaactaatagagtttttttttctttgtttttttttttaatagaacaacgactctaacacaacaaaacactgtacaaattctgataaaaaaaactactttttcgactcgagttttgtcaaaattataaacatcatcggacaatggacatctacatatgtgtcgatattttagcaattgaagttggagtaaaccgattcaaagtctacaagtcgatagaaaatttttgtttattgtgaattgttttcgaggattcaagtccaaagagatttttatttgttgttagaaaaaaaaaatattagtaaatgagttagcccgtttcttatactccatatataagtgttggtttggtttgaatttcattttcaatgtgagatttctaacaaactgaagaccagtatataatatatataattctgtaatttgaatcccaatcatgcaaacatataagtctcgaaagctattgatcacttgacctagtgaacaaaagatttgtttttttctcttttccattaaaatatagtccaagtctagtagaacacatagatggtaatattatatagatggattcttctggaggaaagaagatccgtatcttttaccaacaacaactaaagagagagagatgttccaacatacagagaaatattttatatgtaacaaacaataaaaacgaagagaggaaacaaaacagagaaaaaatctcaaaaatgtccccaaacgcaactgcaccatacacaaatttttcgttcatatagaccacttcctaacaaacaaagacaaaccttagacaaatcaaagagacacgaattatccatgagaaagagagaaagagagaaagagagaaagtttgtaaaatctctctatctctctcaatcctcaatcccaaaaaaagatatcaagtcaaacaaacaaaacaaatagtttttttatttaacaaaagggcaaacgcatacgcacatggctaaaatctgtccaccagcgagttttgagtgaatgcgttgtaaaaagcctgcccttgttttggattgttgtccttctttgagaggatgatgattcagattcagatcatgttgttgttgttgtcgttgtcgttgctccagagatgtctcggctggatctattgtatttcatgtgacttctcacaagctgtccagctgcaattgctgacattaaagataactctccagctaaaactgctccggctacgatcgtcgctagcctccttgcgttcattcccggcgactctgtgcttgctcctttaactccgagcaggtttaaacacgctgattgagatgcaagctgtgttcctcctcccactgtccccacctgataaatccaaacccaaaaaccataatcaagatctcttgaattcagaaactttataagtgagctcagagaaagaggtttgatcaactacctcgatagatggcatagtgactgagatatggatatctttgccgtcattaatagcttccatcatggtgatgcattgagaactctccacgttttgagctggatcttggccagtagctatgaatacagcagacactatgttactggcatgagcgttgaatccacctagagagcctgcaacagcagagccagctaggttcttgagcatgttgagctcgactaaagcagccacgctcgttttcaagaccttgttcacgatctctcctctgattacagcctcgcaaacaactgatttaccacgtccctcaatccagttcacagcagcaggtttcttgtccgaacagaagttacctgaagaattatgataagaatatattagcaactgtgcggttctcagaatttcacaagatagcatcaaaaatatcaactagagttttaagtctcaagatgacactaagcttgatatagggaagtttttaaatcagatcaatcacacaaagaaggaaactaaccagagattccaatcacatccatgtcagggaaatcatcggtaagatactcaagaacattctgcacacctttagaaaccatattcatccccatagcatcaccagtactacaacagaaccttacataagcattcttccccgcgattgtgcatttaacactttgcagtcttgcaaatctactcgacctgcatccaaaaattcactcttcttcagtaaaatccccttgcaaaattctccatcttaaatcaaaacacttcacaaatactttcaatgcaaattttcaacacaaacttgatgtaaaagcttcctatcaaatttagttgaacaagtctcctcactgggaaatatatcttaaatcaaaagtcaacaaaatcaaatccaacgggaaaatattggttaaaaagatgaacctgttgaagactactgccaaagtatcaaagttctctggattctccaagaaaaacttaagctccgaagctcgtctcgccgaagcgaaccgaacaacaggtgctcgggtcataccgtccttaagaacggtactggtggcgccaccagagataaacatagccttgcagcctctgttagtgctagcaaccaaacaaccttcggttgtagccataggaacagagtactcataaccatcaagcaacaatggaccagcaatcccaacaggaatctgaatgtatccaacaggcatctcacagcattgccccaaaatcgattcataatcaaatccatccaacggtaacccttcaatcgatctcccggtgactctctgcaacgcctcacgacgaatcgacgccgctcttttgcaatcaccgagacgagattcaagcgagtacgatggaataactccgtcgataaccgatttcacaatctcctcgtcttcctcaggaagcgattcggtaacaataggttccggattaggtaatttagcaacggaaacgatcggagtcggtggagagcacgtgacaaggcggtggtcatcatcatcgatcgtatcggcgagatcccaagcatcaccagaggcacgtgagataaatgactgaacaaagtcaataccaaaaaaccctaggagatagataaacgaagcgatgagagcaataatggcgccgagttctgtgatagtgacgacgtgaagaggcgtattgtaacggatcttgtcacgccaccggtggaggaggtaatacgcgacggagaagaagagcgtgaagaaaacggcgtttgtgagatataacggaagaggaagcgcgtcggatgctttcggtggaggagcaattgttgtagcccggcgacgatgatcgtcatcggaagtgcgaggctgataagaacggaaagatccgttggagttgttgttgttggtaaccggtggtttaggaggcctccgacggagatccattggagggaatgaataatctctccaggggggagagagaggagagaggagagaggtggtgaggtggcgtgataagtgtgaaggagagattaacaaagttttataggagacgaactcgcatgtctgttggggaccagcttgctttttcttcattttttcgttttcattttgttttgtaatactatgatttagtttatttatttttgcctaattttcgtaactcatctaattttaggttttcacgttgttgttttttttttgaggtacgaaattagacaattatacgaggatgtgaatgatgatgattgattcataaaagcctgcattaattatagatatttgtgtccttacaattaatttgatatgctttctaatgagccaacctgtcttacattatcgtttattcaaaattatgaagttatggtttgcaaatgtatactaagatttttattgataaactttgattcatatcactaggagatctgtttttttttgaatgattcaacgaaaaacggtattgaagagtagacaagattcaagacaaagtaaaaaataaaacgattcaaccaaaaacggtattttcatctactgtcgtgacatatatatttgaccaaaaacagtattaattgccaattagtttgtactattatcctttatcgtttttgtttaccgttacaaattaatttttaccgcctattgattggacctcttctaagttctaactatgtgtggaatgtatttttcccttctgatattacaattcttttgggaaattaagaaaaaagaatgtcatgatcatttgtctaattttcatccataatttggctatacacctaattaactctactttatatatgagtcaaaatgaataattttcaaatagcatagttatagtatggatatttctgactttctgttgcaaattaggccgcaaagaccaatggtcgtaagagatacttgatacatctccatacattatgatgagtgttgaagagtatataacgtttggaaaaagacggttaacatatccgatccttttacgatgtgatcaaacaagaaggtactatcttatctaaaacaattagtatagaagtggttgcaagtacaaaatgcagcatgtaaaactaccaaaccaaaaaaatgcagcatgtatatcattttctttataaagataatgtcctgtttacaagtaattgataaagataacctctttataacattttcttggggtaatgggaccaaattgttgaattagaggatgcatggctttgtttactttacaaggatcaagttaacatagttttggctatccaactcgtttacacaatccttttaaacaactaccattcagtcactatacgttgaacaatatataaaaaatatagtgtatgtatcaaactgagcctctaagataataattttaatgtggaaatcccaagaagagaatcaaatctataaaaaaaatagactttctttcacgaaagaaacattgaattttcttagggcaaccaattttaatacacacgatttgatttggctcatataatacatatgagttcttataacgagatacacgttacgaagaaaaaaaaatgcatatccagacaaacttccattactaatcactctttttcgtcaaccatatcaataaaaatcaaaagtaaaataattttaaattattaatatgtttagttttattaaacgtgagaaattttaaaatttataccagtaaataataatatcacaaaatctttttaaaatataaatgataccaacgtagaagctagagtgctatagacacaagatagtcgtaagaataaataagggtatttttgtttaatatccttaacacctattcacgaaaaaaacatagaatatctttagggcaaaccatttttaatatacatgattgattttgttcatataatacatatgagttcttaacgagatgatacacgttacaaaaaaaaaattgcatatccggacaaacttcctacactaacaactctttttcgtcaactatatcaatcaaattcaaaaatgaataatttcaaattaataatttttattaaacgtgaaaagtttgatattatatactagtaaataataatatcacgatgttttttacaaatgtaaatgatagcaaaagacaagatagtcgtaagaaagaataaataaggataaattgttataatagtaattttgtgacgtaggttcatatttgatttgtcctgaagcagtggaagtcacattgtcacgttctggtggatctcgaccttactcgaagtaagcagacaaataaaacctacctccccttaagtaaattaactattaaaaaacccattgattgattgaattgctcctccaattatattcttttggttttatgttttcagattccttcacacaaacgcacaaatccttcattttatttattaaaaaaaaatgaaaaatgtttagaagataaaagtttcaagttaaaaaaaaaaaaaaaaaagtttcaagtaaccaaattaggctaaaccgggctatgtcgataagcttgatgatatgttggatctaattttgaaacagctactgaataacaggtttcattagggccaaggtctaagcaataatgtggtcctgtctgtccactaggatgttttctcgtacgacgtaattaaagaatctgtatcttagtttgctttggttctcattggtgtaaggtactgtggagcctaaaatcgattgtacttgttggaatctacgatttcagggttgctgattacaagattggaatcagaaaagaatcgtattttccattaaacaggacactctgctacttactattatgtcttgtagtcttggtaaatggtttgccttgtctctgccacgataacatgttagtgttcttgaaactttctcaatcttcaattgtgattttttttgtctccccacaagctgagactaagttattgtgtgattcttgttttgttgttaggtttgatgtgaaagctttatatgttgggaaggaactgtggagagaaactctgccattgcaatcgggttctcgcgtttacaagttacaaggactgaagtcgaattcctggtatgaagtgaagatatcataccctgcttctgtgtgtaaaaactctgttttttgcttcttttaatctattttcttttcaaagattttgtgctgttgaatcgtaatatgttattgttctttgcttttaacagataccagctcgggtctcgctgcaactactaaagaaccatgaaatggaattgaagctaaaccaaatgaggagattactaaacactgagaagctgatcttcaaggcagaaagtctcaaagaagttaacaataaggtattgccatcatcaaaactcaagagtatagcttcgtttaatttcctgagtttttaatctgttttaggctggattgaatgttttggtgaccttggaacccgaggggattgtggcaataccaaattctagagaaagatattttatcatttacaacataggcaagtatacattatctatccttctttttcatctttgtgcctacttctaagtctaaaaaacatttggtaacaaaaacagtttgtgaagaacaactcatggggataccttattcaagctggtcagtggttctgttagtagctttgtgtctcgtggtgtcgttcatagttcctcgatctttaccatcgtctcttcttacaaaagatcaaggtttacgttcttctcatcgcagccatgggaaagattcttgaggtcatacatgtttcttactgctatatgtcttgtccattatctattcatcatttttatcatatctagtgttcttttgtttttaatttttaggttaagaagaaaactccaattttagtacaaactgacaaagctctagttgtctaaatctttcttttaaattcactttaaatctgtcttgctgttgatttactccgatactctgaatctgttcttgcacaatccaacattgtcttttcttcttatgtttcttttaacattcgagacttttctgcccaatagcgtgtgagaaaaaagtgtgactgtgttagactattgttcatgataaaaattcaaagttctttctctgtatccttcatatttttcttcacttgtgtaaaattcacatgtggaaatcattgtagatcgatttctaagaaagttctaattaggctgtgacagtgacttatgctatgtgcatgataagagttttcttgagtacatgatatatgaattaagatcaggaaaaaaaaaaaaaaaaacaaacaaatcttatgaattgcttaacaaaacttgaatttcttttctttaatttccttcgatataaaaattcatgaaatatttcaatgtctgtaaaatctgaacttgcaatctttatccaagcttaattccctcaaatttatacgctatttaagttaaagatgagttgttaaaatcagatgagacttgtgtataaatactttgagatctgtgttctctttcgttcactccaaagagcatcctattaagttgctaaagagagagacgccaatggctgtaaagcaaaaggtctgtgttactggtgcaggagggtttattgcttcatggctcgtcaagtttcttctctctcgtggctacactgtccatggaaccgttcgagatccttgtaagggataagatagaaaacaaatcctctcttttttgtgaacttttgaatattctctgtttcttgagtttgaaaaagttgcatgcattgatcccattgttctcaggtgatgaaaagaatgaccatttgaggaaactggataatgcttcaaaaaatctgaaacttttcaaggcagatttgtttgatgatgaaggtcttttctcagccattgatggttgctctggcgttttccatatcgcttctcctgtgccttttgaaggagttcctctcacagaggcaagttcttacatagattcttcttttgtttgtttcttgaatcactaacaaagtctttaaaacattcaggaagaactgattaaaccagctctcactggcaccaagaatgttctagaagcatgcacagaaaccaaagtgcagaaagttgtggttgtatcatcaatcgctgcagttgtttacaatccaaaatggcctcaagatgttgctaaggacgaggattgttggtcagacactcaataccttcactcacttgaggtaatattgtatctttgaagctaccatgttggtcagttgtctctgtgttatacatatacaccaagacagtaatagaattgagtgtttaatgtgatgcaaaaaatctgaggatctcagggttattggcgttattactatcttgccaaaacattaacggaacgtgaagctttagagtggagtaagagaaactttgctgatgttgttacgctctgtccgtctgtcattataggccctaggcttcaatccacgcttaactctagtagtttgggacttctcaagttcataaaaggtgatgtaaacatataatgtgtgttctcttacctcctattgcatattttggttaagtgattgattcattcttgataatttgatgaattggtgtgtctcttcttaggtggtataaagtccttgttgagcgatgaactgtatcttgtggatgtgcgtgatgttgcggatgcgcttttgttggtgtatgaaaatcgagaagcaacaggaagatacatatgtaattctcattcactttacactgattctcttatggagaagctcaagaatatgtatcctaaacgcaacttccctgaaaggtaagaagagtaagaacaaacgcttgatttcaaactttgagatttcggtctgatctgatggaatgtttattggcagtttcacggaggtaaaagagaaggaagtgaggcctctaagtgcagagaagttgaaaaacttggggtggaagtttaggccattagaagaaaccattgatgattctgttgtgagctttgaagcagctggtgatcttccaaaggcataagcttacagagtcgtcacagtgactgtttcttcacttttatcactcctgaaataaagtggtttttgttagaatcatttcattctcaaatccattatctattactatcatattagtgttgttctttgtaacagtcagttatttgtcactttcaccaacatgaataatttgatggaacatgtcagattctcacggtttctttttcacaaaacaaaactggttttgaatccgaccactagactaaagtgtccatagtccgcggcaaaatgaaaaccaatttaaatgtcgttatacaagctttgtagtctagtagagatatacaaatttaattgtcgttgttagttttgtagtctagtagatatgattagtcattagttacggtttcttaataacattgacatttagaccacaatgtggacttgtggggttaaatgagtcacgagctcatgaacccctagccatttatttgggattttccgaggacgaggcttaatctacaccgtccgaattcgttaatgacggcaaattgcttccatgagtagatttttctttgtctcattagtcattatacaatttcaattctaaggataaaataatcaacaaagtttgatttcagttttttacattatttgtgtaacgttactacaacggatagatttgattcagacaaaacaaaaagatcgatgattacgacgttaattacagaattagaggtataaatatatgggtcccacgtcatttacaatggccagaaacaaaagtatctctttctctctctcttcatcttcaacaaatcacgcaccatcataatcatcatcatcttcatcgtcatcaccaacttcttcatcatcaccatcaatggaattccccaaaccaaaccacccttcaccctaaaaatcgtttcatcttttttccttcttctaattttttttaggtttttaattaacttttgcttcaagttttcttctatagatttcttactcagaaaagtttcgaattcgaccctgtagcttagttgttgtttataatttcttgtgatcattcacagtacaaaaaaactaattcacccaccgacttcttcttcttcttctcttctctgtggcccatccttaaacccacactgcttttgcttttcctttttttttccgggaaatttgatctctttacctttcgtcattattagtagggaatgatcttttagttttttttttgtttcccccaaatctcactttttctcacttcctctccatctcaaatttcacacaaccgagtaaaccctagaatctccgcttctcattcaattggtttcatcactggtcttaatcattgctagggtttactcggttacctttatcatcatcaattgatccttgttcataattcatcctcttttctttctgtctttggcataaagtttcaatttttcttcttcttctctttctcactcaatcatggcgtatcagcctgttccgggttctgggtttcactacttgaactctcctttcggtgatacaactttcacaaaggtgttcgtcggtggtcttgcttgggaaactcaaagtgaaactcttcgccagcatttcgaacagtacggtgaaatccttgaagctgttgtcattgctgataagaacactggtcgatccaaaggatatggctttgtgagtcctctcttctccttcaatctttgtttctcttcaatgtctgatagagatgctaattgttgctttggagatacaattacaatctagtgtcatataacacttatggatcgtgtgaattaatcacagaacaaagaaagtcattaattttggggtaattctgttgcagttgttttgtgaatgattcagtgctctgtttctatttcatatggaggatttataggtgacattccgagatccagaagctgctaggagagcttgtgctgaccctactccgattatagacggtagacgtgcaaactgtaatcttgcttcccttgggagacctcggcctccattgccctatgcagtgatacctaacatgcctggtcagtcttatttagactggcttaactctggtttaatattctatgttgttgtagaatactcgtaatttagtgtattggtgggtttctttgtgtggataggacgcttaagacctgcttccccgtacattggaaatgtgcagggtcctcgaggttcacttattggaaattatccgtatcagcaaccacttccatataactaccagcaaggagttgtctatccttatgggtaaagtcttgcaattcttatatcacacagtacacactgatgtctttgcgcaagtgtctaatgtttgtttttattttctatctcagagtaaccgcttatggacccgagtacatgtactcgcaatcacaggttgacaatggctatgaacacttgctattatttctcttcgtcattaaactctcttctaactttggctatgtcttttcttgtttcatggtctagggtttatatagtccatacatgggtcagcaataccttcaggtctatggagtacctggagcagtgaattcacccgtttatcaatacgggcaactaagtcagactattcctaatggccatggttatacagcagttcaaggctattcggttccaggaagccatattctgcagcttggtggacccactgtcagtacgatgaccacttcatctatgcctgctcttcaagctccttacccttcaggtacattttactgtcttacgcaccataatgttattctctgactgttatctcaaatgtctcggctactaatggtttagatgctattagttatgtctcctttgaattatgtttgtcaggtataccaggccctgctcccgtacagtcgcatatcattgtccactcccctcaatttatgcagagtaccgcttctgaccaaacaacaaggtgagaatcaatacaacgctttctttactttgggtgtagtagtgatgaattatgcacatttgtctttgttccactgctaatatgatactaatggtttcagttattcttgaagactgaagagaaaaggaagttaagttagtgaaactgctactggaggtgttgcagaagaggcttcctgttttattaagtcttgcacgttatttatcttgcatccttaaggtatgcgtttcttattcggcgttattgtaaaagcaaaacagaggatggtcatcatcgtaatgcgttgatctcgttaaccttgggatcttattgctgtataggttatgtaaaatagtcttgctcactgggaaggcgcagcgcagaaggaaaaaaaaaaagcaaaggaaattggagtgtcagggtttatgcttccgttttcttacccatccatcaatgtgtataaaacacagccacaaaaaagctgctggctcgagcttgggttgagtttgaaggcaccatagctggtttcccttggaggggaagaccagtagtaataagttggtgtacaatatgcatatatttatacacacatacacaagcatatacatatggtagaatcaaaatctgattcttttcaagtctgaagtcgtaataccactacacttccttcaggtgcaggagtgtagtgagtaacattgataggtatatagcctttgtctttaagtcctgcattgtaagtaaaacatgttcatcatgtccttttctgtgattgtgcatatttagggttctctcttcttccatctgaacacactgggattgtttactgaagcttacttcaaagtatggagtaggctcttttctcagaatttcattgcaaaaaagtaattgttcagtaaacaaattgtttgatcaattctataatttagttccgctgatagatatgaatgacattctcagatgaatctgaaagacttgactgtctgcaaaaacaaagaaaaaggtcataagcaacaggttttggtgatctattttattgttgtagtgtcgtatgtctaccttctggatcttagagctttgttcagcagattcttcatctgtaaactgtaatacccaaaagagagtcgttgtgttagacataagatactaataagataggttattgtggcaatagactagagttacctgtcctgtgacagtgtataaacggttgtaccatccgtttgttgccattccaattgcagagtacaaatgcttgcgagcttctccagggttttgtaaggtgtactcgatgtaatagaatcctgatcatagattgtgtcaacgaaacaatgccaagatactgcagagattctcattgagttgagatttttgtatttacccttagaagctctgctatcgattagctttgcagtcactcctactggtttttgccagcttctatccaatccactgacctatacataaatgtcatgttgacatttgtaaggaaatctttttgcagagagtttgtttgtttgtttcaattgcatgtagagagactaaccaatgtttcggcgaaagcttcgacctttccgaatgattccatcctggtgaagtctggacctagtccagtgatcgctatactcactgagacgatccatatacatcacctatcggttagctcatgacttctgtctgatccagagagtaaacaaaaagaaacaaattttgataaattttaccattggaagttgaagtttcttgtgggtaaaaagctgtgattgacttgaatccattaggttctgcttgcccgacttgccaatctttatgtgaatgcagatcaaattcattcatcactcataatgatttcgccactatcataagtatctgaaaacagagtttgattagattaccttgtgggattgatatctcgaatttgttcgtttcatctgtgtacacacggaaagcttctgatgcatctgagattcaaaagaagttgttattagaaattctcaaggaatcaatatcatcaaaaacacatagaatcaacaatacttgtctctgcaaatgcaggtgaaatggccaatggaaggaagaaaacagaggaagctatctgtaacatgacgtctcttctcttcatcccaacatgatctctagacctgtttactttaacagattcagaacaaacccagataaagaaaggtagtgaatttcactgggacattgatagactttacgaaattcgatgttgttcctcgttggagctgtcaagaacagagattgccgcagaaattgatgaacatcttctggaatctggaaagaattagctccaagaatatgaattttgtaaactacgatgaatcagtgaagactgtgagagtgagagagattgagaggacctgtaatggtaacgcggggattcgaaaagctctgaggagaagataaccatggagaaatcgctgccatgtgtttcaagatatgtccgcttctctgttttcacgaaatctatcgctactttgctgtttcaacttttattattttttagtcctaaaataatgtttttattaagtgactgaggattaaaattcaatatttataattttcgaataaatgctctaacaattaaaaacatatataaaataaaattatgtaatgcatacatccaagtcgacacataatgacacaacatttacacaattctgtttttgataaaatgtagaaaattataaaataatgaatatctttgagcaattgacgaccccaaatttttaaaattatttgtattaattagaatgatgaatactgaacaatgtacaccttcctagttagttgttaaatattactgtacttggagacactttcatagtttttttcaatcccaaacaataataaaactacccaaccatcatattaaaagtatctattttcctaaataagccacatatatcttttaatttcatcatttctaacttaaaatttttagtactttatctaatacttttgtaaatatttcgagtgatattaacttttagttttaccttagtcatagaataaattatgccagcagtagttggtcatccacatcttttacctgctggcatagaatagtttaccttagttttcaactaaaaaaacataagttaccatagtcatatttcaactttagtatacagttgaaatatgacagagcatgtaaaaatgtggatgtttttggttacaaggtttctttagtcagaatggtcaacaaagtttctgacacgtgtcttattcagagtggttactttgaccagctgctagttatatttttgactcatcaaattcaccggcaaatccagtgagtaacgacggtcacgctgttccacgaagcttcgctgtcaacaccatcatcggaacttaccggagttcgttacggtaccttaaacccaaacccttctccgttttcgctttgttgattatcttcttgagtgacttcgttttgagaatttttctgggtttcggcattgtggaatcgaaattagtttttttttttctgttttgggtctcctctgtctcctttaactccattttcctacgaatctgtttctttaaccctaggaagacgaaaattatcgcttcatcgccacttattctagggttttgaatgcaaagaagaactaatttcataaacctgattgagcttagatttcaaatgatttcgactgattcgtactatgaaactcatcttccacatttagtttctcaaatcatttgagaaatctagctcaaacgattcgagtttcagaacttttgttcatcaaaattaagaatttggtcatgatctagcttagtttgtttcttcccttgtactttcaatttgatgttcttggaatcttccttcagagagattagatccttttactcataaagttttaacctttgctctgtttgtatagaaaaatcttataggtctctttgcttttacatcttcaaacttgacttgtgcttgtgatttgattgttgtcttcttcttttgctttcttaattgtgatattattaacaggtaggtttggattctatctcttgtgaaaaaaacagaaacacaaagatgaacgctgagaataatcagactactactactcactcgaaagtgatctcacatgtattctgcactggtactgctaagctaggctctgttgggccacccattggtcttgttgatattggcgtcagcgaagttgcttacatcttccgagtctctcttcctggcattgagaaaaatcaaggtaagccttcacatttcttttctccttatgtcctgttgttggataatgaaaataacaacctgttaataccggaatggattcctcatgttttgggttagataatgaccaatgacgtgaaaagaaagctgctttcttttacgctatccgtgtatgaaagcaactttgacccaaaatgctatcttctgttctgttaatagataagatcaaatgtgaaattcagagggaggggagagtttgcatccaaggagttatacctgagattgcgattccaagtgacacgggatgcttatacagaatgcaagtgcaacagctctgtccgcctggtccattctcaatcacgtttaatcttccgggacaagtggatcctcgcttgttttctcctaattttagatctgatgggatctttgaagtcgtcgtagtcaagctcggagtgcgcatcccaacttcatagttccggttttcattcaaccacgatatcctccatgcttaatcagcatttagttgcagtggccgacctgtaagtctttggtcggatttagcagaggttagagactcaagaatgttctagtttcttttgtgtagaaccatgtccaatgatccggttccttaagatgttcttagactctgaaaaaaagcaccttgatgtgaaacggaactgttttaaccaagattttggcaatcacatcttacaactaaaactctttgtaccaaagagggaaatttaaaacttataatccaaattttataaataaagttgtcaaagtcaactaaagaagtggactcgatccagggaggtgttgtgttcctcacagtcaaaccaaagcatattccatatttgtctccaataagaaaaaatctccaaaaacacattcaaatgaaaaatacaaagacttctattgttctcattctccgtatcttgaaaaaattcttaaaaaatcgacgaaacgatgccggagttaagtttattatcggcgttagacgcagcgaggatacagtggtaccatttcaaagcgataatagtcgccggaatgggacttttcaccgacgcatacgatcttttctgtatagctccgatcatgaaaatgataagtcaaatatattaccacaaagactcaatcggaaccgctcttctctcaacttcttacgcaatcgctcttcttggcaccgcgttaggtcagctcatctttggttacttaggtgaccgagtcggacgtcgtaaagtctatggacttagtctcttgatcatggtgtttagctcctttggttgtggcttctctgtttgcacgactcgacgttcttgtgttatggttagtcttggattctttagattcgttcttggacttggaatcggtggagattatcctctttcggccacgattatgtcggagtttgctaacaaaaggacgcgtggagcttttatcgctgccgtgttctcgatgcaagggttagggattttgatgagctctgctgtgactatggttgtgtgcttggcgttcaagaacgctggagaggggagttcggagaagacgaacgtggcggggttagagactttggctccgccggaatcggatatagcgtggaggttgattcttatgatcggagctcttcccgccgcgttaacgttttactggcgaatgctcatgcctgaaaccgccaggttcgtatttctttttgtctttttgttcaccaatttttatcctttaaatctttaatattaccattgtatagactataattatatatacatatatatatatatatatgcactatatcttgtgtgactttgcttcatatcatcccacatacaaaccttggaaaatttctagactattaaataactctctcctaaaattttgtttttagaaatattttccaagattaaaaatattgagatttgaaacggtaagcattttcaccatggattgcttctatcgcaaactagatcgttagagcatattaatccacaacaatagttattacttgtcatcaccattcaaacttttctgtatataaacccttattttatgtatatcttgcgtgactttgttagctattcaatgtagaaattataaattaaatcactaaaaagtttagtcgtgtgcaaaacaaaagttctactcatacgtctccgtacgaaacaatgttggagaacctgaaatttaacataaattcgatctgatgttgatcagatgataaacataaaataatatatgtgagcgataatgtaaagagtggcaacttcgtggtttgttactaggaagtacgttgacttgtgagttgggagggagatataccaaacacagtggcatatacctttctatgctacctcttttgataacatatttcaatagtatttctttttatatgtataatatatagttctggtatgttttcctgtattaattattcctcccagatataaactccagctaactaacagagttttatttcattattataaataaccacgtactctcttcctaacaagttctcccactttagtttaatgctctaacttcatacgaaaaagtcttaagagattggaatttttacattccgtgtattgtatgagttatgacttattatgactaattgttagcagtgacatctctcactaataataaaccttatctatgttgacaaaaaaacctaatttggcagaaaaaattgttttaagtagctaatttgttagaaatctcacatctaatgtcaaccaactacagctattgttacatattttttacaaaattataaatatttgaaccttcctacaaaacttaaatatgataactactacattttatgacaattcatgcagatacacagcattggttgagaacaatgtagtccaagcagcaaaagacatgcaaagagtcatgtccgtatcaatgatatctcaaataaccgaagattcatcatcggagctagaacaaccaccgtcttcttcctcatacaaactcttctctcgccgtttcctcagtctccacggtcgagacctcttcgcagcctcagccaattggttcctagtggacgtcgtcttctatacaagcaatctccttctctctcaaatctttaacttctccaacaaacccctcaactccacaaacgtctacgactctgcctttgaagtagctaagcttgcagccattgtagccgcttgctccaccatccctggttactggttcacggtctatttcatcgataaaatcggtagagtcaagattcagatgatggggtttttccttatggcggtcgtttacttagtcgctgggattccgtatagttggtattggtctaagcatgagaagactaataaaggctttatggttctctacggattgattttcttctttagcaactttggccctaacacgacgacgtttatcatcccggcggagctttttccggctaggtttaggtccacgtgtcacgggatatctggagctgcagggaagtttggtgcgattgttggcactgtcggtttcttgtgggccacgagacaccatgaagaggacggttttccagatgtgaaacgtgtgagaatcgcgtttttgatccttggcggcgtttgtatcgcgggaatgatcgtaacgtatttgttcacgcgtgaaactatgggaagatcgttagaagagaacgaagacgagattgtttccacgtcagcagggtcgtctcctgcgaatgagttacttcggagacaatactaatttcaagatcacgacaaaagcaatcgtgctttgatttattactctctaattaactctaaatggtccttgggtttttgattgttgatactaaagtttcttttttgtttttgttttctctcagtctcatgtttacataaatttttgattccgtgcatatatttgcaagaactcttcactatgatccttacctttgcaagaattcttcacttaagcccatttgggcccatatagaaagaaagaaaaatagatacacgcagggccggcccgtggcataagccacataagcgacggcttagggtcttgaaattttaaaccttttttagtcaatttaattttaattaatcaataaagctgagtaaaaactgcaataagtagggagacttttatagaaacattaactctttccaaatcattacattagttgcagattccattttaattactagggagtactttacaagagattttttgtgattcgtgaggaataagtgactaaaaaaaggtggatgtgattattaaggtcatataatattgttttcatatgtggagattgattttgagtttacatataccaaaaattttagccatgcatgttagtctatcacccactctcataattctcaaacaactatgtctgcaagttgccgagcaagtgttgcagactgcaattgtttaggatttcataagttatttaattgcaaattcttaaccaattagtgttcttaagcttgtgcttgaaacttatcatttatgatttatgtaacgttttctatatttcttggtttattttttgtttgcttttgatgttttatgtttcttgtatttttgaactatgggtcgtttaaaggaaaaaacacttatgtgagattttaagtagtaatttaaaagaagaaaaaaaattaatctcgaatagggccctcaaaaatgttggaccggcactggatacacgaacagagtaataaagcttttgtagttcaacacacgagtaataaaattaagtcttcttacgttaatttaatagtttccctaacaggaatataatttagtaacaaagaaaggaatgtaactaaaatagaaaacagagcatcaaaataaaacaaatgtggaaagactccttttccctccctctaacctacgccgtcgccggatacgtctgtctctctctacatgctcacattcgagttacatttatggattaacctaccatatcgtccttaataccacctttatataactcattatgaattagtagtacctttttttttactatataacttcattatagaagaaactgatttgagattcttaagatctagctaatagaaaggtttttttgtctaatgttattttctatatagaatttatataccgtcttttaacaaccaactttattctttagtcgcatctttatgagtttttttattattatacgaattttatagcgacgaaaaaagttactaacagtaggaaaatttcacataaaattctagatatttaggaaaataaagtattgttaagaactttggggaaaatctgaaaacacaaccatgatcatcaattagatatttcaccttttggatctttgtgacatgaatatgcatagtcgtgccaattactaattagagatacaatacaaactatacaagcataagtttgaaaaagctttatccagaaactcaataatactatatgatatatgtgcacggttttattggtcccccggccccaaatatgcaacttttcgcccatatttatgaaggcttcgtctgtcccagtatcctcaaaacctttcacatttattgccatccactgtacggacgtcttataaatgtaataacactaatctccataacctcatactcgcatcatattatcactataagctggaccaaacttattcattagccaaaagataattcataaatatacttacatcacttaacattacaaaatttatactctacgaagcagactactcgcttaacattattgtatataggctatgattgctaccccaaaacgaatgatgaaatgattattacattttgtaagatctatcaatcatataatgatacggaaaatatagggattaatttatagtattaagtcaagcttcacattttgatcatttaatgatttggaaaaaaaaaaaaaaagtggtagaaattaaagaagcaaaatttggaggaagaaaagatagcttgtgaagggaaatgagtgagaggtcgttctctggtggagcaggtcggtgctgccattgtcctttcctcttcgtccttcatttattgtttctccaccttctccttcttcttcctcttcttctttccttttttttttttattgcaatttttcttataagttagtgatggagggtgacttaattagagtttgtatctagtcgaattccaaaaaaaaaaaacagtaaaaattggtgggtcaatccacttgtgttctgaaattttttaaactaaaatatctatttcgatgtgtaatatatatttttgcagtttaactttaacatttataattgatattactcattgtttttggtattttctctacaggtaaactttatttttgttgtcatttttctaaaataaaatattgtaaaagctttttaaaatggactttgatacagacattttaaatacaaacagacaaagacgagcaagagaataggggaccctctttgtcatttgattgacatatacaggtatatactataaaagaaatgtgacaaacagtcatctatattcattttagtgatttttgtttcacctaatctcttaaagtttaagtgtcacattatactgtatattactagccctgtaattctgaaacaaattggactattattttatacactagttctgtttacacagaccagtaccgtttctgctccttaactggattaactttaatttttactatatcaataaataactgaaatagtgcatgttactgaaatgacgtacgagtacaaaagatttccaaattattataccagatacacatattctgccaagtttaatgatattattatcgcagacagattagttttaaaggatgaaaaaaaatatactttgacaggggccaataatattgttttgtgacgcaggtgaacagcactataatatatatagcagaccgatggtatcacttgggcaataattaaactgaaatagaaaaaaataacaattttgaaaaggataaaaaaagagagtcacagaaatattatcagagctataaagattatagatcccctgacgaaaaataatttagattgtaaatagtacagaaactatatataataagcatttaataatggataggcttaggtaagcctatgcaagtacagcaggttttgaattattggatgaaacatttgtttcaaatattagattttaatttttataaatctatttgtgtaatacttatatatatatatatatttaaaaatgaatattatagggttgtgtaggggttagggtaaaagaatgacttgggagatttaacataagatcgtgtgggcagttaatatttagtgagatagatagatagtgtagtacgtttgcatttattatctttttacctgattcttttgtatcattctacacacacgtgccaccgccgacacctgctatctttctactgtttcattttaatttttatcttacatttttgtcaaacatttaatatcgacaatatgaattaaaagtttttgtttccaattatttttctcacaataattttttaaatagttgtgttgagacacttgacgaaactcatgctttatgtattgttggtttactataaaccgaacatgtttgcttcgttttttttttttttgaaaaaatgatagtaaaaatatgtgtcaaaaccgaaacacaaacaaccttatattccattttttattatgaggaagagtatagaatcaaccgaaccaacaaaagaaacaaagtgtaatacacagaattgagttaaccgttggagaaagtggttaaaggaaaaataaggaaacgatcgaaaggaattggtatatatctgaggggagaatgtgtataaaataaaagaaaaaaaggtctgactcatgaatgtataatgatatgcttacacccgcacgcataaacctctgccatctttttactgcacactcttttccttttctcttctttaaagtcaattttatttgctgataaccacaaaatgtagcaattttagattacattatttgtttcacatttcttgaaatctgaaaacttttaactgcgactgcaattgttttggttgagaaatcgatcgacttggagtatgagattaccttcttatcagtgtctttagtataacggttgcattgcatatatatttcctctcaaactttaatgatatcagttcaactagtctggatcaaatgtaatattgatactttccttgaaaacacattatttggtgcgtgggaagaatgatcttaaagagatgataaagggcactagagttttggttttctttgtaaaatagtgtatttatgcaaaactcaacattatatggatgtttgcattatggtatttttcaactaatatacacccaaaacagtatccttattaaacagctctctctctcgttttgttcaaactaacaagagaaaaatgtcagcttttgttgaaaaatagataaaaattatgacataaaacccaaaaccaaaacgtcaacaccatttatcataaattacatttgtagttagctaaagtacaaaaacaacactgtaaatgatccattgaccaatcgagtagtcattaacgaaagatcacaacttaacatcacccagtctaatcaaaactccaagaccataagaattttgctaaagcagcagtatagtgataaacacacaaaacgggaaaagttgttttacaatttagaatgtcatatactttaattattatttgcatagggaaaaatagaaagagactcactccccaggtgagggcaaatagaagcccctgctccctgaatttcacagcctttatcatcaatgctcctctaacctcaaacactcaaaatccacacatctatacacatacctctacatacacactccattttctctctctatctctattatatcttcgatttatgtgccattttggtatataaatatataatcttgcacacaataaggttatacttcccatcaccttttgtatcattgctatctttgttcttccttctggtgtctcttcagtgtaacaaaaagtctctttttcagttatattaagtaaaagatgatgcttgcggtggaagatgtgttaagcgaactcgccggagaagaaaggaacgagagaggattgccacctggcttccggtttcacccgacggacgaagagctcattaccttctacttagcttccaaaatcttccatggtggtctctccggcattcacatttccgaagttgatctcaaccgctgtgaaccttgggagctaccaggtaatatattatacattttgtctcttctttacctcataagttttattttggaatcttgtttttagttgaatattttgataaatcttttaacaagaaaaaagtgtaacgttttgaaattgttgttatatgaagaaatggcgaagatgggagagagagagtggtacttttatagtctaagggacaggaaatatccgacaggtttgaggactaacagagcaactactgctggatactggaaagctaccggcaaagataaggaagtcttctccggcggaggaggacagcttgttgggatgaagaagacgttggtgttctacaaaggtagggctccacgtggcctcaagactaagtgggtcatgcatgagtatcgcctcgaaaacgaccattcacaccgccacacgtgtaaggtaaattaacactcttttactctcactcgtgcgtctcactctcactcgtgcatctctttctttaaaaaaatttgtattttttctcttgtcaatttatgagttgactttttgaaaccaaaaattttatactactagtgtgtgaaactagtaatttaaaccctgttacttttattcccacacgtccatttcttataacattaaattctttttaactttgcgaatgtaatagaaatttgatgtttttgttctccattaatgtgttaactttttaaatccacaagttgaaaagaaaggtttaacgaaatatttaactttttttttcccatttcatgtgttttgtttcaatagtattgtcactatgttgtttggcttagtatggggaggacaggggagagagcagtttagatgtgatagatttgatataaacctgtacgtgtggtgtggatgtcaacaccaaacacaccttgccgttttctgttcaccgatacactgttgtgtcgttttccatcactattgctttcttttgtatcccacctttctaattacatttatcattatcagaaatcaatttgtcaggctcacatttcaaacaagatcttaaggtgtaggcattatataatgtgtaataacatgttttggtttttcatttctttttggtggaaattcacaggaggaatgggtgatttgcagagtgttcaataaaacaggagacagaaaaaatgttggattaatccataaccaaatcagctaccttcataaccattcactctcaacaacacatcatcatcatcatgaagccttacctttgcttatagaaccttccaacaaaaccctaaccaacttcccatcactactctacgatgatccacaccaaaactacaataataacaacttccttcatggatcatcaggccacaacatcgacgagctcaaagccttaatcaaccctgtcgtctctcagctcaacggtatcatctttccttcagggaacaacaacaacgacgaagacgacttcgactttaacctcggcgtgaaaacagagcagtcttcgaacggtaacgaaattgacgtacgagattacttggagaaccctctgtttcaggaagcgagttatggtctgttgggtttttcgtcttctcctggacctcttcacatgctactagattctccatgtcctttaggattccagctgtagaatcttggcccttggattttatatttggtcttttcttattttcaccttctgtaaaatacaaattatataaattattattcctaagatccaaaatcttttgtcgaacaaatttcttaaaagttatgtggctgattgctgtagccttgcaggtaaaagctattattgtgttacaacttttgatgaactgtattttgtgggcgtttcactattcgatgtgatctcataaataccaataatatttgcaactattctgacgtcattcttgtttatttattcttttttgcttttgatagactatccctcatattcatttttttttgtttcttgttttgaagattttttttttttgtatgaattgtgttcataattttgggactgcaaaaatgacattttctgttacaatgctaaattggaccggttaagcgggctacaatgtctttgtcagtttggtttacctgctttagcaagtttggtcatagtttcggactatgaagcccatcaccagcgaggcccagaagttgactttaactaaatattaaacaccagcgaggcccgctgataaaataatatataacgaattatgaaaactaatttaagtttgaaaatagatggtaaacgcctaaacgagtaacaattgttatgtggtcttattcttgatatatgaatgatcgataaatcaagattttcagctttaaaatataatataaattcatgatgcattcacatataaattccctaacataaaatacttagtttattagatatgtagtcttattcaagcgtgaaagttctaaaagaaattggtttctgctcgtcaaatttgaatttgaacattacgttgccttcagatattgtcaaccgatgatgatttttatttaactgtaacaccactacctaggtaataaagcattcatggaaaaaaaaaaactaatgtgtggcttacttttttttttttttttttttgtcaataactaatgtgtagcttactaataatgcaaaaacaggaatgtgggaatcttcggccagattgggaattttggtctcatcatttttctatgagaatttatagttcttccttttaacaaacaaaaagcatgccttcactttcgacttcctactctttatttgtgattctacagaaataaatatccattactataataatatgataagagagccacgcaatataatgctatcatctatccatgatccatggagataaaagccaagagatatataatagatcatgctcatgcatcacacgtacaatttacaactaaccatatgtaatagtacttttaaaataaacataaatagctcaattttttttttttttgaagaacagtaatgcttggacattcaacctctttgggttaatggttatagcttgcttttagctcgataattttttttttttttttttttttgttggagcattagctcgataatttatttgttggagcattagtgaattactaccattacgagctatatcatcaaaactatagtcgttagatgaaaattaagatggatatttttgtggtagatctatattcaatgtcaattatgcaatctaatggagaacatggacgcactttccatagtggagaaactcgtgatgaatgatgatatctcgcggtggtggaccatcactattcatatgtgttatactcaatggttagacggcgaaagagaaataatccataatcagttattttttcgtatgcgtgattatctacatcttggctaattattattaaactacgttcaagttgtcgtatctcgcactttagttgtattctttaagattttggcgatcttttgttaggtcattgttcgaagacaaaataagctcatcttcatggtcattttcgaagttctaataatttaaagtcgtgtctgatgatttagtgggatacagtctcgtgttcccaatatttaaatacttttaacataaaacatgaacaaattaaatatacaaaacccgacaattagtttgctgctttattaatggaaaagggaaaaagaaatctcacacaaaacacattacaccatctgttctacgtatactggtccatctgtctacttttcccattaattatggaatattccattagttaaatcgaatttgtagcaacgaacaaccaacattttaggtagactagagtcccttgatggtttttgtcaaagaatatactatgtatttttatttatttctttgacaaaaccatctaaggcaaatttttactccggataattaggattgtagttacgtataaatggtgtggtccaacgtcttagtttcaagttctggtaactatttcttggtctctagctatataaagtttacataatacattgacaaaaacaaataaagggttaaatgacataaagtttccattccatgatagatttacaatagataattaaatatatacatgacagagtaacattatcctttaaaatgataaagaacactttttaattaatattatatctttgtttaatcgaattccctttataaaaaataaaatgggatatgtctaaagaaaagaatcaaggcaagttatcaggaccatcttcacgttgtttgattcgggtatcgggttcgggtcctgaacttgagctaccgggtaacccgccacatttatgacacctggtaaccaccaagatttgacggcaagaaggacaagaagagtgtgatccaagccacgtgtcgatacacgatacgtggaaaccatgtccacactgcggcaacaccctaagctcgtctccggcggcgaattccgttaaacagatagcacactccacgagtttctccgccggcggagaatccggcgagtaggtgagtttcggtaacgaccggaggactttctttttcaatcctttgttggctgcagctaccggcggtggatgagtttgatccgatctgtttcttgaggcgatacggcggagccaagcgcatcgagagacggctattaagccgatgatacatgtcagtgcacaaagaagaaccgcaaggatgaggacgaggtcggagttgaaaggcggagaagcttcagccggagatgtagaattggcttcttggagaagacggaagagaaggcgcgccattgttaaagacttagagaaagagaaagagagagtggtttgaaaaatgggagggattaggagtgtgagcgttttttggggaggcaaagaggaaagggatttatagtgagtgagatcttcgtcttgggtatttttgctttatattataaagtttattgtatcactttcagttataaggatgttttcgtaaaatttcaattgttattagttcgaaatcggttgcatttagttaatgactgaaaactcgaaagctagctcatgtaaactctatgagtccttttcttcgatattttgtatcttaacgttctcaagtttttacggatgggtcggcaagaaagaaaggttattactataagataaatgcgtagataagaatatgactgttttaataacaccatatatatataaatataaatatatatatagagaataatatatatggtgtttctatagttagatagtttatctcattttttccaaattatgagatgtctttagtttacctaacatctttatacctgaaaattaatcattcgttataattaagaaaatggtctgatttttattttggacaatcgatactagattgaaaatctggtcaaaatcaaacgttctaatctacttgttaatttgtttagatgggatattaatagttttggtggactgaaaacattaaaatttgacggatgtaatgaaatggtgcgtgtgggggcatagacatgatggaagtggaagaagcgtgtgtgcgcgatgcgaccattgaacatgcaccaaaccacgatataaattgataacgtgtatcgcttatcctttttttgtgtgtatatatcgcttaccctaacattcattcttctcgtataaattgtcctaactttttattatttgtcagttggtcatgcacagcagcaactaatcaggcggaatctactattttaattagtagctagctattccaaatactgtattgggttgttaatttattcgaatattttaagtgtttgcctcagttgatgattatacacatgttcaaagaaacttaatgacgttttgaactagtggagaaatgtgattctctctactctacgtactgacctttgaaatcacgaaaagaacattttaactcagtggctgctggacaaaatatataattggaatacacaatttaaatttttttaaaaatgttatgttaggacttgggacaagatacaaaaaatctaaataacacccattctttatatttatagtgtaggacatagatgatttacgtacgttttgtgaactattgaactcgtcgcaacttaaaagtactaaaacatagttataacttacaaaaggttatgagtcaaattaaaatgctcagaatgtagccatgtaggttataaaaacgaatgcttgatttgaaatccttataaaaaaaaaatctggtcgaggacttgcagtcaatcaagctgacatggcaattggtgttgggataacgactaattcattaaggaaaactttttaatgtttaagataagatcaatatccttcaaaacaaaaattatgaactttttttctgtacatgggatacatcgtcgttttgtaataatgaccgtgggatttcagcacatataccacctctaagtgatcgaagaaaatatatgaatcacataaatagacgattagttttttgtagatttttcaaactatatgttctatttgtcatgttatataccgagaaagtgtaatattttatctgatcatttggctaaaaaaactaggaaattgtatctgcgaacccgcgaaccaaaatctcatggtattctgtaactttaaagaatgaataaaaaaccaggacaatgacaaaacaatttctctcattttttttgtactatctcgttgaaatttgaatatttatcaaacaaacctatatcagaaccattcaaattatttaaaatacgccgcgtttttaatgtagctacaattagtagaaaaactaagttacagtcacagatgcatgcatattcaaaataattttaatatcaaaagtctcgcactataacacttgacaaaagtttgtggctctgaagtctcaaaccataatcccaaaattccatttttggctttacagtgttctctaaacactcttagccatgagaataatgccacgtacacatagaaggaacaactgatctaacctacgaaaacgaagttagggtgcagacacaacacaaattaatttcttaattatttttgtgtaaagaacgtatatatataatcctaacgaaatcattcatatggcaagtaaatagagttataagatattgtatatgtaaacaattaaacaaagaaataaaggttattttgaaattttaatcaacaaaattattcacatagatggaaatgtttataatttctcctggcaggtaaaaagaggtataaaacatatgtggagaacagtcacctcatcggcctaatatgtacagaaggaaatgaaggttcatgtgaaacttttggcctcaatggtcatcatagtttgtgcgaaagatgataataacaactaactaaaaaacatgcatcaacactcgcaaagaatttggcaaagagggacgcctgtccatttcttattcataatctttttccctttacttatcactcagtttatatacactctagattgtttaatatatattcaggccatagctttttttaatacattttcaaccatttgtactataccaatcctcaccttaacaataacaacaatatatagagctttattatagtcaggaaaatatcactataacctattagaagttaaattctgtatacagaaggaccataagcttgtatacattttgatattataactgtcggctctcttttctgtcttgaacgttactactcgtttattgtattgttgcatggaaattagacgtactaaatgattaaaagacaactaaacaaatgaaaaatttgagaagaataatacatgaaacaatgtgtggtaagaaaaagaaggaggaaacgtgtgaaattatgagtgtctaaatagagttacatgacaaaaactaaatacataaaaaaagagagaccattacatatttttgttgactctttcccttctagtgaacttatcactttccgatttctcaccacccactcttgctttccgtcacatgctccccctttttatttattttattgagtttagacactataaaattacacaactcgttacagaaatattgtctaaaaaataaaacatttttttgtcaccattaacttgaaacatttaaaatcatgactagaaaaatgaaacatcataattttttgactacttcataatatctataaaaaaaaaatcataaaagaattcgtgtagagttgtagttataaactgcttttaccagttgatgcagttttaggctaacaatatcaatctaattagttttaaaacgttggttaagagttcgtgtacgtaattttggagtactcttattataacattttggatatataccggcggaattatatatatgcaataatctgctctctgcgggtcacatgtgaacatgtaaagcacattttactttttgttatttttatatataaaccctttttggaccgtatatattattccaagttttttatactatgcatgatcatatagtattcatttaaagatttgagtatgcgtaagtgtttgctttttaaaatcatcggagtagggaaacctgaaccatattaaaggatttcaagaaaattcattgaatgtgaccaaattaatttaatgccaaccatgatattttctctattccacattagtggcttatagagactgcctaattaagaaatttgtttctacgttatcattcaaaagctgacatataatatagccctctttcaactgaagaagtgtggcttgcctaatgccttgtgatcagccttaccagtttcaccaaacagaattcaaatgaattattcttccatccatttcattgtagttatcaaaagaatataaaatttcaataaaagcataaccaaaaatatatggtatattttcgaaacaagatgatataaattgttggattagggaatagggattgaagaacatcattattgatacataaaacttaaatcatgattacgtaacaagatatatacagatatcggctttcttgtcttttagacattgatatttgtagacgatcatcgctttatcatatacagatagaatcagatattataatcgcaatgggtagatagacttttacgtataattaattgaaattaagtttagatgctaaaacgagttctattacctgacatcatttacatacaaagatgatgtctttctttctttctttttgtgaaaacacaaagatgatgtctaaaagactaaaaagtagaatgagatgcatgaatgaatagaagataattgcaattactttcaaaaatatctttacaagttggggaattaaatttaaaagtatgtaacaaagatttgggataaaacttgtcacatctagtgcagtttaattaacaaaatttcttttgggataataaaaccaaaagcgacctcatcacttaagagctttcacatatcgccgcctctaataaaaacattattgtagatattataattaatcatacatagagatcacgtggaattttgtaaaagtcactaacaaatctaacgataaaattggtgacttgtctcagtctctttttcagtttttcttttaccatttgaaaacgatctttgatcttttcattttccctctttttgagtgatgatgatcagtaagcaaatcttgagcataccccatcttcggattctgaagatcaacactctttttaactcagattttggtactgatgttgatgttccgagcagcaccatctcaatttcaactaaaccaaaccgctctgagttagtttgtttttcgatggtccgggtttggaattggttagtgaaatcatgacgaatttcggcttgatggtttagcatgtttttaccggttaagttatgtacggttcatgatcaatggatctctgagggatctaggagtgtttaagtctacttataaagtcaaactacatattgctacgaaccctattatccgacataggaacaacgacatttcctttaagagatgatgatttggaagatctctgaatttgattaattggtagaattaaaatgtgttcatcagcagtggtatcaatacatttctcagatgatgattgaaaaaaatgcagttacaggtcataccgcaagttccattttcccttcatgttcgcgttgagagtccaattgttttctctaatctgcatataagggacctgaaaggaagaggcaaacattgttctgaagaattaaaaaaaaatggaaagcatttttcgagttttacaaatgatataaagcctgaaaacgatgacaatcgatttcaagagtgttggcttaggcaatcatataagagtcctctaagcaaatagatggattatcaatgatactatgaaatgaaaagaactttggtttcaacaaacactctgctttgtgaacttagagattaaaagagcaaattttggaagagtcaacacacttccaggtacgagagagataccttatcaaacatttcgtagccaactttgatccgtacatcctgatcttccttgaaatccattatgttccaggcaaattctgctgctcctttggggttcttctgttagcacaaaatgatgacagttccgttagggataatacacaaggaagaaacataacttcaaagaaagttcccgagaccaagaaaaaaacatcgaacctgatttaagtcctgatcaatatcacaccgccctttaatattaaaggttacacgcttatcagctcttacaggaaactctttttttccgcgtacaagacaccgaagcttttggcgcttatcataatgcaatcctaccccaaggcctgttgaagcctaagggaaatttgtaacactatattagtattagtctacagcagaaaatgtttcacggtgacaaaatagaagaaacagcagaaaatgaaatcaaacctcaggaaaaaagtgtctaatcatcgcacagaagtaactcggagccccagttccagtatctaactctccatgaagctagcaccaaacaaaaaaccatcaaggaaattaagaaatcagaaacatgtttgcaagaaacgaaacataatccggctatactgtagccaaagccaaacaactataccacaacaaccaagctgggaacatacactgacaaataataaatcaagattcccggaagcatatggatgtttctttgctaataaccattataaagaagttcaagacacaatttttttcttatgcctaacacaagaagtctagaacctagataacattctcaaaacccaaaaccctaacagcaaaaatgatgatacagaatcctacgagaattccaagcagagagcaagtgtgtaagacacaaactactcctcaatttggctcctgcaacagctcaatgctagaaatttgaacaaaacctaggtcacaatttctctcagattaggtttcataactccaagagctcctttaaagtaatcttatcttcttaatcaaaagttcaagacaacacagttcacttatgtaaaatgcacacaacattctccgaaacacccaaaataaaaccctacatatcctcaaaagcttaaactttgcaaatcccaagagacttttgggcattaaactccagagtaaagaaacttcccaagaaattgaatagagttaaagtcctccatagcaacaagaatacgaagcagacaacaaaaaacaaaattttcacctgtaaatgggtttttgagttcaccggaaccttctctttggcatgaatcttcatagacttggaattgctggtatacctcatagaagtctccattttcctcaaacgattttctcgagaaaatcgcctagaaaatcctcactgagtcaacaaaaccaaaacctcacctagtttttgcacacttcgactactgtatcatcctctgcaccaaggttcaccataatccaaccaataactcaccgccagctgtcctattagtaaaagagccaatctagtcccttaagcccatgtttagggcccaatatatatgggcttcgactagatccgacccggggaaatagccaatattttgttaaggtctctggttctctgagtgagtaagctagttcgaagactggtccgaaaaatctgacaaggatgaagcaatcaagtgtcgtcgatctgttacttcttctcctggcgatcgctcttcttgcgacgccggcgttctccgatctggttttatccaaagtcgaacgtcgtgtaagtctctcaatctctcaccacataatatcttcgatctggttttggattcatgaggttcctgaatcaagtcccacaatttgcatttgttgatctgtgctttaacacttcgaaatcagttcaaaagatataacctttatatggaattcttataatctcgttagaattgaaatcattttcgagagtcttttagcttcatttcatgctttattcatcaaagtttgttgcttttttgcagatcgatgtgacttcacagattgctcgtgttactaagacccttaaggtaatttctatgagactatcttagtcacgaagttatatgttgtgttggtgtctctaagtcctggtttcaaatttggtattaggttgtaaattctggctctgaatcagtttctgagtttgctttgacattcccaaagtttcttggtaacaacttggcttatctatcggttgctcctagtgagggaaaggggaaatctaaacgaactttagtgaatctctctgtgagagaagctgatcagaaaggtttacctgattcaattagtgtttactcagttgcattacccaaaccactgagtaaaggcgatactttgacgctggaggtagttgctgcattcaccaatgtacttcagccatttcctgaaaagataactcagggtgaaatccatcttgttatgctccaagaaagcgcacaatatctctctccttacgcggttgagtctcagtcattgtctatcaaactaccgaatgccagaatcgaatcttacaccaaattcgagaatacaaagctccagggatcagagctcaaatatggtccttacaagaatctccagtcgtattcatactctccaattgttgtccactttgaaagcaaggctgcatttgctgtggctgagaagcttgtgcgagagatagaagtgtctcattgggggaatgtgcaggtcacggagaattacaatgttgtccaccgtggggctcaactcaagggcgagttttcaaggttaatattcgtactaaagctttaatcttcgttttaatcactattctaacgcacaaattgattgcttcattctcattatattccaaccgcaggttagattttcaagccagacctaatccccgtggagcatctgcctttaggcatttacttgctagattaccccccagagcccattccatatattacagggatgatattggaaatatctccacgtctgagatgaaaagtgattcgaaaaaggttggtatttttggattaacgagatttggtcttccaaatattctgttgtatgtgttttgatctttttgctggtttggttgcagacagagctactaattgagcctaggtttcctttgtttggtgggtggaaaacttttttcacgataggttatggtttgccacttaccgacttcttgtttgcttcggaaggaaagcgattccttaatatctcctttggctcccctatacttgaccttgtcactgaaaaacttattgtacaggtcggtcttatacactttcaacttataagtgtgtttacctttcttagtttgattttctttagctttagaatgatgtggaatcaaatcaatcgaagcagtatccttttatcgtgactggattgaccaaatgataaaccaatatggatgatctcatgcgccaacattgagtgaaagtttccttgtcgtagcttgatgttcttttgtgtgttcttcttccattgtaggtggttttacctgaggggtcaaaggatatatcagttaccactccattcgccgtcaagcagtctcaagaggtaacaaagtcttggctttatctgttcctgatttatcctgtctggatactatctctggtgattataagtctttccctgattttgattctgatattttaattcttcatgttgcaatcctgttcatttgcagatcaaatattcacatttagatatagctggtagaccagttgttgtgctcgaaaagaacaacgttgtccctgatcacaatcagcatatccaggtaattatattatacgtcagaaatgctgtcattctacatccacaatattcctactttaattgattatgatatttgttttctgtacaggtctactataagttcagcaacatcaatctgctgagtgagccattgatgttaatctctggatttttcattttgttcatcacttgcatcatatacacacgggctgacatctcaatctccaagtcctctccgagttatttggcgaaacttcaatgggatgaggtacattggaaccttttctcatgtatattttcaagcgatttactgatattctctttctctgaatggttgatatttaaacggctccatttgtttatcaggtcctagcaacactccaggaagtccaaagcatcgtccaaaaatgcttagccacacatgataagcttgaagcatcgctgcgtgatctctcaagaactggtgacattcaaacctgcaaagcagctcgcaaatccactgacagtttactgaaagatctttcgaaagaactgaaaccgttgctgggtttcttacagtctttcccatcagcctctcacatatctccaaaggttctaaatttctccctctacctctcttagtctcagctctacttaaccgtcacttttgtcaaaatcattccattaatgcaggtcgaggagctagttgtgaaagagaaagaacttcaagagaagttaatggccaaacataccactgttgttgaagggtacgaaaagaaatcctcagggcgtgatatcgaaaaccggatcgcttctcagcagcaaaagatcatagctttgaggcaagaaattgaagatcttctagaattcattgatgagatctagaaaagttaaatgtagcaaatcctcttacgcttaaataccagacttttgaactcactcccattagaaaaattttgttcctcaatgagcagtgtttatcaactttgaaagacagctctagtttctctgagtttaacaaatgaatcatattatcttaaaatcatttacaagaatgtatatagatctaaccaatgttggtgaatataccagagaagtttgggattttgtcgatgtgcctcaacgccttctctgcaatctgtcgtgtcctaaaatcggcgttttgaaaggcgtccacaagtgctgcagttacattttgttcttctcccacttctctagctatttcttcaatacgtaagatcctctcgaccatccacacagctctaatccttaaattctctgttcgattctccaaaagaacatttaatataggcgtaatcccgtctgcttcatcaattaatctcactccttgtacaacatctaaaccgtcctctaacaatgtagagagagctgcaagtgctggtccaaccaccttgtcattttcatggtctaagagatcaaccaacttatctactgcttgtccttcaacgagacaaaagctttctcttactgaacatatcccttgatggatcttgcaaatccctagaacaacaggcggtttgctcagacatgaaaagatggatacacagtaagtaggaggaggcagttcaggtatctttgtaagatttttggattcaagtgaaagattctccaatgctgttgcagaagccctctggatgttatcttgactgttggattgaaggagatcaaggaaaagtgaaggaagatttttctcacagcagaacaaagtggcgtcagtctccttggtgagtgcgaaggtgatccgagcgagaatactaacaagtccttcgagaaatgttctctcgaaccggattcctctgatttctccttggcgaataccaactatcttggagatgattttctcaaaagcaccttctcttaacaatctcattgtcagaaccaaatctctctcaggaagttcagctaaaagtccagcagctgcagcttgttcctcagtgattgttggtgtattctctgatatgatcgaaacaaggcttccgagctgtccaacagtgctacgcaacgcattggctagttcttcactcatgtgtggggaaatgttatgaagaagcttgatagaagctaaccgcaaatcatcgttctcatgtatctcaacaaactgaaccaagcttatgatggcagctgagtttctgatggcagaaacaacattaataaccgagtttggacagctagtgagtccaacaagaaccgccaacagctttccttggatttctggaccagtgttgcttgttagttggagaaggttctccactatttcctctgaaacaagagtttggtgatgaggtccaacaggaactttgtcgaagtcgtacccaatgttcactatattggcaagaatagttgcagagacttctttaagtcggattggaagctggtttggcccaacatagaacaagtctttgataagcggtgggagaattccggtgttgattaagagtttagcactcccttcaaaggatgagatgttgttaagagctcccaaagcagcttcccgttggctcatgtcgcgagttctcataagatcgataagagaagaacccacagtctgagccacaataactttcacatcgttatttaaagcaagaaccccaagatagaaagccatggaaacttttgtttccggtgaacctgtagatgcagatcatgttacatagttatagtttcattcaaaccaatcagtgaaaatcagtttattggtaatgaaaggttagtggtttggtgaaataatcaccttcaagaagtttagcaagaagaggctgcagtctaccattgatagccatctgtcgaacattttcctctgacctctccaaatttgtcaaagttttatcagctttctcaacagttgaaacattctctgatttgctgcttgtcagaccaaccaataagatgattgctccatggattgatccaatcttctcgcataatgcttcagatttagagagctcaaacaacacggaaacagctgcttccctcccctttgatggctcttgagacaagaacttaactatagtacgcacagtgtctccttcagctactattgcctgaaacacactaaaaatcacttacaaaggaatcaaagacaaacagagagacaaacaaaaacacaaacagagagataaccttgctctcttcatctccttcaacgactacttgaagagtttgtagagccttacaccgcacttcatgactactactctttagcatatcggtaatcaaccgaacaagctgaggattgcacacacgttgcctaattttacgtatattcctacaaatctctctgacattcttcaaagccagcaaaatattagtctcagcatttcccaaataaagtgactgacgagcaatatcaagcttcaaagcatcattccttgctctccactcttcaatagtgttacgtaaagctatacttggacttagatcagtgatactcaactccttagaagttataggacaagatagaggttgaccgttttcacgacattcttgaaaccatttctcaatagcttcacgctcaaatgtctgaccattctctaaagtgacaggattatgcataacttgctttgtcaatggacagataaaagcttcgtatatgttatcaatccctggctcgaattgtgagctgttatccgattggcttccatcccaacttccacttccagccatctgatgaattgattcttctacaccataataagactataatgtaatcaaagatcttatataccaaattaagctaagttcttctaccttttatgaggaacaacattcagtagctaaaatcaaaactataccctaataataaaggcaactaatttgcttctaacaatcatcattcgtttaaccctaatataggaaatattaccaaatatagaattttgtttattctcaggatagtaattactaattagtactagtatataacaaacacacgaaaaaggaagattaacacacgtaccagttcaaaacaaaagaagccctgaagaagctgtcttaaccaagaacaaaggtctttagcttcttcttctgctagcttgagaaattgagaacgatctctggttaaattcaaaacctttgaaaagaaaacgggtgaaatcgagtcaaatccatgtaacacaacatcggtgtagtcaagtatgaatccgccagagatatttttgtgcctgaatcgagaccggaggaagaaagatggaaactagaagagagtttcagtcatctaagcaaaagatgggaaagaaaaaacacacaccgacaaaaaatagaaaatagacatataccaaaaagctttgacaattattgagaagtcgtcatgggaaaacacatgtgaacaccgagactacccaaaataaaacgttttttgtgtcattttaaatgatgttaatagtcaaaaaaaaaaatcttctttatcgtattttcaatgtactaaacattcgctgttggtttcattgtttctatattaaaagcttaattcttcgatctttcttggttaaaaagtcaattatctaattattggtctcatgactctcatcaataaagttaaatagttaatgtagatgttttgcaattttataaacaccactggccaaaaaaaaagaaagtagactagttactgtagttgtatgcaacaagatgttataaaaaaaggaatgatatagtgattagtgagtaacaacatcaaaacaaaccattaaactacatggtcttattacatctaatctataatcttcaaaatcatgatctaatcaccctagagattttatgtagtggcccaaaaaataaacatttgcagacaatccagacatctatatggaattaaggcccaattggcccaactcaaaaacgttatcccaaaatgatccatagaatgtaaaccacgtgtattgcagtcacgcacgagtaacccgtgtccaattttggtctgcacgtacgaactcactcacacatgtgtaagcaaaaaatgaataaacacgaaacgactgtttattagaaagaagagaaaggcggagaacaatagagagagagagagacaagagaagagagagaatgggtgaggtagctgataataatacattgatgaagaggaagaagaaaggtaggccatcacttcttgacctccaaaagcgagctctcaaacagcaacaattgcttcagagaagaaatcccaatgaagaaaacgaagaagagcttagatccagttccagaaaccctaatttcagcaaccgatcaaatcgccggaggaattcaaattctgaagacgacgacgatgagaggagagacaaaaagcatcggcttttacacggattgaattcacacgagggtcgtgattcttctaattccaaatctggcggcggcgatttggactccgatgcacgcaaccgccggaaaattgacggatctgacaatacggtagttatagagtataaaaattcaatctttatttgaaaattcatttggggaaaaaaagttttaattttaggtttttttttttggatattttggcgcgttaattgaggttcgtctgcaagcttaaatatggttattgagtgagagtgatgagttttgactatttcccttttttttgttggtgggaaatgggaaattcataatttcagctttttctgtatatttatttttatttttcggttcctcttttttttttttgtcttggtcgagaaaatcttggtgttaatcttttcttcttttttgtctgaatattatataatattcttctgattctggtattaattcatagttatcagaaaaattaaagccggtttctgcactgaagagacaatcatatgtctctgagacaagttctgattttgtcttttactatcagtttagtttcttaagtttccttaaaaaattgtacttgttctcacttttgtcataaatacagacacctgttatgatttgatctttttaacttgaggttgttgatgatactctgttttgtgtatttcttctgcagggagaaaaggcttcgaaagcgacagacattcttcttcaaagtatatatcttttttcttgtttttttgttttgaagttatgaaaaggcagaaacttgggatttgttttgtggtaattaattaaatagattgtggtattttaacttgtggacaggagggtcacttgtggagtctacacctttgccagacaaaaagttgttgttcttcattcttgatagagttcaaaagtatgtcaatttttatggcttctgacatatcttccttctccatgtaccatgttcttctatttttgattgattgttgttttactatacttgcaggaaggatacttatggagtgtactctgatccagctgatccagaggaggtgaagttttctttatttgtttaagcttgtttgatgttaaagtatgttgttttgccttttatcttatctgtgaatgttttgtttacagcttcctgattattatgagattatcaagaatccgatggatttcaccacattgcggaagaaattagaatccggggcatacaccaccttagaacaatttgaggcaagtcttgtaattgaatccctctatacatttctgcgctttgctttagctaaaatggagtgttcacctttcatagttttggttcttcatattgttaagtcttgttcaagagtttctctggtagtaacaacatcgtgtttgcctacaagcgtgtaaggttttcttagttttcctagccacaatgtgttaattctaccatgagaaggtgcagatatactgttaaaagtgaaagccttgtggggtctgaattgtttcgttttgttgcagcaagacgtatttttaatatgtacgaatgcgatggagtacaattcagcagatacagtatactaccgacaggtttgtcttggcttatataaacttgctattttacttccttttgttataatccattctctgatagtatatctatggcatgacaggcaagagctatgcttgagttggcgaaaaaggactttggaaatttgagacaagaaagtgatggagaagaaccagtgtcactgtcacaacagccgaaagtagtcaaaagaggccgtcctccaggctcaggccttaagaaacagcttgagcaatctttgattgatcgcacgacttctgatatttctgctgatgcagcagcattcacttatgctggagatagctctagattatccggttcttacaatctaagaaaaaatcctccttcatatggattccgtcatgcagaaacttcggttagaatcaaccataatagcgagaaccaaagtggcttgttgatagattgggagaaggagtttccacgtaaagatctacttttctaatactaccttcttcagaccattataccaaatacgtttttgttgacataaaccattttgtgtagcttctgttgtgaaggctgtcaataaatacgggatgaaaaatgtcgacgagaacaggcgagatacctacaaccagaactctgcttccttgcaagattcttcgatttttacactgcttgatgataatttaaaacaattaactccagtacgtgcttagcaacttaaaagttaaaatatttctccttttgttctaagcaacaaagaatctgaccattgtttcgttattttaccaggttggactgaaagctgaatatgggtatgctaggagtctagcacggtatgcagcaaatattggtcctgttgcttggacatttgccaatgtaaggattgaaaaactgttaccaactggaaccgaatttggtcccgggtgggttggagagaaccctgagaatcctcctcaacagcaaaacttaatgtcgggaaagcaaaagtgttcgaatgactatgcatctgatgatcatcatcagtcaagtagaatcatgtctccatcaacctctgtctcaagctccatcataggaaacatacattcttcccatgaaagcaaagagtctgttcaggtattgaatcaagaaaccgagataaatggtctagtccgtggttccagcggatttaaccataaaccaaaccagatgctggaaacagctggctcgcagcaaggcaacataaaacaggaatttcagcggttgccaccagatctcaatgctaggctttcctcaccaaactcaccaggctctaaccaccaggcaggttcatcgcagcatccggatttggcgttacaactctaagtaattcctactaatattgaaagccttaccgatatatgagggagaagaagaggcaaaggcatgtgattcttgctacaaggttgaatatatagggaaagtcttatgtacagattgttgcaattttctgatttttttagggtaaaaagaaaaagaaaactgatcgataagagtactctcacaagatgtatgactgtaaaaaaatttgtacaatttcctagtccatcaaactagagtgtaatgaatgtactcgggattgtatatcatgtacgtttttgtttggtcttgtgaatctgtgcataatatataatactaatatttataaatatcgaaacttaacaggataagtagaaaaaatgattacaaagaaaagtagaaaaatattttgaaaactccgtttgaaaagattatgatagctccctgtgattaatcaaaagtcaaaacacagttattaggatatgtttgggggattatgagaaaccgtgtctcttaaatagtcagtcttacattttgataatgttatatacgttacagtatataataagtagacagcttaaattagttccaacggaaaaaaaaagaaacaaacgttgaagaaacagaaggaaggaaggaagaaagaaagaaaacgacgcgcagttccaaaattaggatcatattggctcctttaatttctcttccgttgccatttcaaatattttcacagttgcttcctttcaccactctttttaatatttctctcaacatttttccattagcatataagagagtaaaaaagcctgtttcttcttcctcttttagtatatatataaacaaaccattcttcaccattcaaaatgccatttgtataattttagtttttctccacttttcagattcttccttaaggaatcattttcccatttttctggaattttaagagagaaagagaaaagctctctttcccatttataatcccaaagacacaaatcctaggttttttcttctttcttttattacaagaaaccttggttttttgtttttgtttgttctgtttcgtgtgtagggttccgggagctgcgtttgatgataatgttggacatcatctcaaaccagctccgtctctgaatccattttcttcaaccattgttgttgtctttacgttaaataatatcatctttcacgagtttattaaggaaaatgaggtgtttctcttgtctcaacacgcaaactaatgacatgagaatcaacattgataccctctccgacctaaccgattatgcctcaggttttaagaaaatctctctgtttttatctgaaacatctccaaaaattttgttttcttcatcatttgtgattatttttttgtgtttgcagttgccacaaaaatcgatccaagaggaacaggctcaaaatctggcattttaggttaggacattatggattattatttaaaatccttcttttttatgaagactatgatgtaaacaatgtcttctggttttggttagttaatgggaaagtgaatagccctaaaccgggtggtggcgcacggagtttcacgttcaaggagttagcagccgccacgaagaatttccgggaggggaatattataggaaaaggaggctttgggagtgtctacaagggacgtttagattcaggacaagtaagaaatgctctgttttcactcaaaagtcaaaacgttttcagaatgttgtaaaaagatttgatgggaattgaatttgagcaggtggtggcgatcaagcaattaaatccagatggacatcaaggaaatcaagaattcatagttgaagtctgtatgcttagcgtcttccatcatccaaatctagtaactttaatcggttactgtacttctggtgctcagagacttcttgtttatgaatacatgccaatgggtagcttagaagatcatctttttggtaagtgtgtgtttcctaatcaccccaaaatcaaagagtttgtattaataaaccgctctcattcttgttgttgtttgaaacagatcttgagcctgatcagactccactaagctggtatactcggatgaaaatcgcggttggtgcagctcgtgggatagagtatctccactgtaaaataagcccgtctgtgatttaccgtgatttgaaatccgcaaacattttgttagataaagaatttagcgtcaagctctctgattttggactcgctaaggttggtcctgtggggaaccggacacatgtgtcgactcgagtcatgggtacttacggatactgtgctccagaatacgcaatgagcggaagattgactataaaatcggatatctatagctttggtgtagtgttgcttgagcttatttctggcaggaaggccattgatttgagtaaaccaaacggagagcagtaccttgttgcttgggtaagtaagattaacaattgtaaccagattaaaccggaacttaatctctcgtttaatttaaccgtgttttttttttcattttcgcgttaatgcaggctagaccgtatctcaaagatcctaagaaatttggacttctagttgacccgttgctacggggaaagttctcgaagaggtgtcttaactacgcgatttctataaccgagatgtgcctaaacgacgaagcgaatcaccggccaaaaataggagatgtggtggtggcatttgagtacatagcctctcagagcaaatcttatgaagatcgaagaacggctcgcaagtctacggactctaaccggttaagacgggaaacaaaacagagttattaattaaattgtatgagtcctaagtgaaacctctgctagaatcagaaggttcctgataaggccgcataattaatgtttgtactttttttccgggtgtttttgtttagtcagatttaagaatgggatttggtcggataaagaggtttttttttttggcttgaggtaaatggtgctttgtaaaaaaacttaaaaataaaaatgaactcttacgtttaaatatatattataggtatatactatatacgatgttattggtgggtcattaatacaaatacatatgcgtacactgtacacaagtgatagttttgataaataatatttcaagtgagctagttagattttaatacaaataatttcaaaatatatcttcaaattttaaacgtcgatttcagagtagatcaagattgtgacatcgtcaagggctaatcttttgattctttcttgcaaagaagaggacatgaaatcataaatgcaagtaggtgactaactgatttacgcggacgtcgaattatcgattatactatatatttatgtcaacttgcattataccacttaatccgatttacacatactatttcccatgtctacattacatagatatataatattcgcatattgcaggtttatgattgaagaagaataaaataacatctccccacgttttacatcggtctacgttatacatcggtctagtattactactataatatgcaatgtttcaaactttacgtggaccgttagtaaatgtgtttgtgaaagaaagaaagtcacacacatgtgtaatcgactgtttttttgtcttttgctacaaatgttaatattcattggaatgaaagttgaggtgctacaaaacagttagacctatgtatatttgttttttggcaaaaaaaacaaacaataaaacaatggagttgggacaaataaagttgttttcatcggagagccaaaaagccattaaagttgtaatcgactgttaaacgaaatgttttgttttaaccaaatatcaacatatcttatcttgctcagtgaattcacatatatagttgttagcaaaacaaaagatcataagataccacatacttttgaattttcttagatttatcatatatttttaaaattttctaataaagtttccatatgctgtcacgtttatatactcggacccgccattgctaaacactgttcttcttgtttgacctcttcccactgatatttttttagtttcttctaataaatgataccgtatatcatgataataaagattttcatatatttccgatactatttactgttttgtttttccacacaagataagaaagaaatttgttcactattatcttgcatcactcgatatctacatttttgtgagttctcttgttacgtcattgaggtgacgtatatgatcgttataatagtctatattgatcatgaacgaatgtgaatggtaatttggtatacgaggaaaaagaagtatggtacgaccgtacgagcacaagttgtaactttttttttgtttaaaaagaaacaatacagtagttacctacgaacataactttaatgttatgatactttttatttgtaaaaacagttaaaggaacttaaaaactatggttcatcgtatatattttcgatctgccacccaatgagtgagcacggcctttgactctggactaaaattatattgaatattcatatacttgatatccaagtaaatatgaaattatatacatgtcaagaaaattgtttatcgtttttggattatttatgttatcatctagtagttttattgaaatagtaaaactcgagatacacaaatgagaaaatgtaaataagtagtctgaatcaaggactaattgacgttgaaatttttggaaataaatgtatatttcaacatcaaccaatcaataatcacgacgatatcaaatacacatatccttttataaaattaataatgaatatttccccaaataaagagttttgcttggtctttcctctcttcttctcagcttcttcctcctcaatctttcaattaaaatccccagaaaagaaagaaaaaagggacagttggagaaaaagattctctcaatcttatgatcgttaagggtgaaacaaagattactaaaaacagaggaaaaacagagtaaagattactcaagagtcaagagctggtttgatcttaatgggaaacatctgtcctggctctggatcttccactgttaaccacgaacctgtctccaccaaacccctcccaggttcatacacacatctctctgcttttttctttttttttggggccgaatccaaatactttagatctatttaccttttttttttctttggtatttttgacgattcttgagtttctttaagttcttgcattaaccccccaaaaaaaaaaaacgctttcctggatttttttgtttgtttcattgtgccttttcaattatgaaaatgtcaatgcttgctctgttttaacttttctgttaaagtctcaatgtttttattttcattaaatcaaactttcgtgtgtatcaatctatacagtgagacgtgtgcagaccccagagaataaaaagtttcctccgccgctggtggcgatgccggcgttacatcccacgtttccactgccggaaacaggacataaactgagacccgccgctaccccgcctcgtgaaaaaccgcaacataggacgacgagatccgtcgagaacccacctcgtgaaaaaccgcaggagaagacaagatccgtcgagaacccgcctcgtgaaaaaccgcaggagaaaacaagatccgttgaaaccccacctcaggagaagacgagacccgtcgataatccgccgtcaaagccggtagaaaaattgggtttaggaaggaaagcagtgccaccgagtgggaagatagtgacacctaatctaaagatgtttacattagtggagcttaagacggctacaaagaactttcgaccagaatctgtgatcggagaaggtggattcggacaggtttttaaaggatgggtggatgagaaaacattagctccgtcgagagctggcgtcggaataccagtcgccgtcaagaaatcaaaccctgatagtgagcaaggcttacatgaatggcaggcaagtaactcctaactttcctttttttaatttcgttaaaatcattaaaagatactaattggagggaaaatatcattgaaagatctaattgtagcaaaaatttattttggtttgtctctgtttcttcaacataaggaataatggcatgagtatttggtttaaatagttatataacctacgtatatgtgcaaattaggaaaattttcagcttattgaatttaatgacagaaaaacgaatatactagactggtcattttaataacagtttttactttaaaacacaacacgccaaaaaacagtaagcacaaatttgggtaaaaacagaattatgcatactctttaaatattttcttgtcacaatttttgtcgtttttttgctccataaagtgagtatatgaactggtcttcaatgaattttagtaacccttactaaaagtttgacaatatatccttcttcactctagattttgtagtgtttatgattagttttcaaaataatggtatatttgaaagttttttttttaaaggtgataatttagagcatttctttacttaaaatggaataacgttgtatcaccgccggtctcgctagaattcgaacgtatttatagttggaaattattcttgttatttaccatttattttcttagtacctactaataaaagaagaagaggtcaacttgacattattaagccgagagaagaagacgaagtcaagggaattatcacgtaacaaacataattagtcaatcggaaagaaacaatacacaacaaaatagtcaacgataagtatttaatgacagaaacaaatttaatggtatagttggatattttcttgtatttcagctagaaattccgttctagctaataatatctaatataaaaaaattgtgaacgaacattcacagccatatgttttcttataaaataaaataattattaacaaccataaattgtgtcggcagatcatagaatttattatatgaaatcagtatctctacaaaaacaagtaatcttgagtttttgaccaggtttttgacaaggaacgacgagaaatagatatcagcttgtgaatgatctacgaaacatctaactatataaaataaactgtgaaatatatttaaagaaaagcatcagtgcttaactatatatggaatataactgttaatgtgtgttgatatatattataaaattgcagtgtgaagtgagattcttagggaagtttcatcatccaaatttggtgaagctcttgggttattgctgggaagagaaccagttccttttggtctatgagtatttgcctaaaggaagccttgaaaatcacctcttctcaagtatgattctactcgatcaatccattacaaaattacttaatctcttatacatctatatctaaagatatatgtgcatgtaatgttaatgcagaaggagcagaggcattaccttgggatacacgtttgaagatagccattgaagcagctcaaggacttacctttttgcataactccgagaagagtgttatctatagagacttcaaagcttccaatattcttctcgattccgtacggtgtcgtttttcatctctagctccttcccacgtttaaagcaaaaaaaatgctgtttctagaagatatgtcctgctttttagtaacatgttctttgccatttttatagaacttccacgccaagctttcagacttcggactagctaaaaatgggcccattaatggattctcacacgtgaccacacgtgtcatgggcacacaaggctatgcagctcccgagtacatggctacaggtaaataaaacgtgctaattatattaagaaacatgttttaattgttatcggtattttcctttgtctattggattaacttaaagtgatgttataggtcatctatatgtgaggagtgatgtttacgggtttggagtggtactcttagagctcttaaccggtttaagagcattagacccaaaccgaccatctgcgcaacaaaatcttgtggaatgggctaaaccggggttgaaccagaagaagaaggttcagaaaatgatggatccacggctcgagcagaagtatccacttttggcggtgaccaaaaccgcggagctcattcttcggtgtctggaggctgacccgaaaaaccgaccgccaatggatgatgtgcttagagaattagaagtcgtaaggactatcagagaccaaccccaagaagagaggcgtaaaaggagcagtggtccagatactaaccgggttcgtggaaatgattcaccatatggccgtagaaccggtcgaaccggatagtcaaagagttcttttggatcagtcatacgtatattacacagtatatacagacgaacaacctttaaagaaaaaaaaatgtaatactttttctctggtagtgaatatatgttattaatttctagacctagtgaaatatttgttgtacacttcaaaataaagccataatttattggaagacatgtaaataaaaattgtgtatctacattagcaaaccaactacacattacaaaagtagtaaacaaagaaaacttgaatcattttttctagaagaaaggctctttacacgttttctctttctttgatacgttttaaaacaaaagccaaataaagcaccacctaataatcttgaaaatagtgaagaaaaactatgaacaatgcttacacaacacaaactatatgtagtctttgtctcttaatcttcatgtcatgaaagacatccactgacagaagaacgttctggaagataagaagaagagagctgaagcaaaagcttaatcgtttgtcctggaaaagatctgcaaacatctacacactcttctacatcatcgtcacatctcaacaaaacccattcattgtcttcatctaagtatttcagatcgtatctgctcacatcttctatactaaatcgttttgctatttcccacagtaaatcttttaacctatgcgagtttctcatcttaaaccggatcttctcctcctcatagcttacctttaccctcagaaaatcatcctcttgtgatgatggtgataagtgtgtggtttgcgtttctttaaaagatcttgagactagtctagtcttatccgtgggatcttccttgattacttgtgtttcactggaacagcttgagctgtgactacacgaggaaccaggggactttgcaggtggtgaatgtgaataggacaagaatgtagtaatcttggattgctgttgtagggatgatgcttctggtgaagcagctagatttgggaaactcgcgtagaaggagcctataggaagatgatgacccgaaacaccttcaaccgagtcgatgaccctttggattttctgaagcgaatgaccaactttcttgatttttcttgaaggccatctctgtatcccatgctgtctgcatatcctcttcaatgtcgttggacaaactgaaacaaattccaagatcaataacagaatctctgatgaattcaaattccaagaatgagaatgtcaatgttttacttaccaccaatactcttggcagcatctttgagactccctgcgaaatattggcgaagaacatccaaagttatgtttttttcggccttcgttcgctttttctcagtcactctattgaaaccactagcactagagaaagtgttgttctcattcacactcacacctttgccatattcagaacctaactcgcccatctccgttgttcctccatcgaatactaatcctacattttgaggagtgctaatactctgatgtacttctgttgtattctctatctttggcaatgtcactcctttctctatgacctcgctcaccattgaatctccctcttcttctagttccttctgcgtgactgtccttaagcttctaggtacatgcgccattatagtcgaaagagcattcaacattttcctctgttcctctatatcccgacaatttttaggcaaaaagaactccaagacgaaatcaactgagccagtgtggatacagcgtaagcgtatcgcgactgtaccatgtaagccaaacatagtcgcgtggtgagagagagggtactcagatttcttgtagctagaaacatcagatgaaaagcaagggccattggtcaaaaaggcttctccaacaactccttgacctttcaagagatggtgctcagagcaagcttcgtggaattcacggactgtaggatcaccaacatagcaagcatcatcgattgtggatacacaatggatatagttctcatcattgtgacggcaaccagttttgctttgtttgagacatgagacccatgtttgagctaatggtagtttatgcgtctcgcaagcacatctcaagaggtttctgatttcaggtaatgcagcttggtaagagaaatctggtccctgatttcagaagcatttggcttaatgttaagtaagctaaacgaagataaacaaaaagcgaaattttttaaaacttcattacctttagagaaggcggtattggaatctctgtgcttctaagatcaactgcctgtgaagatgattaaacaatgcctaaaaggttccaagaaagcttatttcaaagacaaaggcgacaaaagcaaaagaaacaaaaacctgaagtgctctgcagatgctttcaaggtcaggacttagtttaaccatttgtgtagtcatcacaacctcaataacacctaagcaaatctgactaccttgttcaaacacaggaatagctaacgtgcctcgaacatcacagtcttgagcatgttgaactctcggatactcctcattcttgaaaaacctcacatcaggagtccattcaggaaccttccccaagaaaactcttccaggcaaaccaaccaagtccctggaactagaatctgaatcctcctgttcagtagagaactgataattctcagagatctctctgtaatgagcaagcctttgacacattggatcatgactaaaaggttgttcctttgtggtcaaaactcgcttaccacctctatccacaggcacccacaactgtataagagagcctctctcactagtgaaatctttaatgtgtgtcactgcttgaaccaatctttccataacagaaaagccatgatgaccacttggtccaatccaccaacgtctgttaaaggtagagagatctctcccttggttttgatcctcaagacttgatctttctggacaatcttgaccatacatctgagataagctattagatgtgtcttgcgttggagaccacatgaaggaagaaggatcaaaaggggctacagaagttgaaggactaaaattaaggaactcggatgcatctgttgtctctaaccagcaaccttctagaagtaatccgtccatgaatgaagaatccatagctggatccataggaagagaattgttttccatagctcactcaaatcaatgaagccacatctgaaaaaacaaagtatccatttttcaccaaaccccaaacaaattaagatgaaacagaacagaacagaaaaagaaccacacatttcaggaagagaatcaaatcaaagcaaaaatcttgtaatagaaaagaaactgagaatcaagattagtgaaaagccctaacttttctttttaaggttgattcttacaagttggttaaatataccctaatctcttgtgggttaagagatactgatttaacaccaatcaaagaaggaatattttttaacactaatctgattcctgattaacaaaaaagatgagacttttgaagttcagaaatgggaaaaaaaaaaaatagaaacgaaaactcacaaaaaaagacgtcagattctcggaagattcttgaagtaggttttaaatggttttatcctttttaattgaagattcccaaaagaccacttgtcttgtgagagacaggagaaacagttgaaagaagaaccccaaatctgagggaaaataaagctgtaaagatatgtctctttgatgggtatgttcctggtgaacaagtaaggtaatgtgtacctctcttcctcataaattaccatacaccaagaggaagaaaaaaaaatcatattttgaggcatcgttatctcatatatgcatcgggaaaaaaagaacccttcaattattacttttttttatttgtaaaactaataaattgtttggtttctttagagtatttcttcacaacagaacaaagactgtctctgttccaggctgcgtgggtgttggaggacggagattcccatattctagagtaagagaaaaagagattttattattttttccatttcttttttttttgagaattttgggcagcgaatttctcaacatgtagtctttaaaaaaaagatatttctatgtaagaagtcagaaaatatcagcaattagcactaatcattattaaaaaatgcctttgatttggaatcaatataatttattaggcagagttttggagccaataataaagggaccaagtagagttgacaaattaataagggttataaaaaaaatgaatataaaagttgaattttcgccgctgactttgttaattacttgcttttaatttgatacgttacattgtaaacccaacgatattggaaagagagggtgtattttctcccattgtttacataaaatgatctgattagtcctccatgtgtacaccctcgaaaggagaactatttgatagttgttaaatacaaagaaagattctaaacgcatagttaaagagaagatgtcaagtaataattacttaacttaaaagttgctaaagaaaaaagttttaagagaaaattaataattgatggagcaagttggggagtaggttttgcttttcccccattggtaaaataaaaatcaataggagttcaatttttttgtttgtccctattggttttttttttttttggtcagcgtttgtcctattggattaaaagatactttgtaatagaaatggtgggcaatgtgtgtcccactcagccccgtggagatgtgtgactcttttagtcatcttcaagaaacttgtaaaatcattcacgtatatgtagtagaagaagtgtcaaaactgattaatccgtttcgtagtggtctacaatgttttgaggttttggtcactgtctagaaaaacataaagagttgaagaaaaaagggcttagtgttcaccattttataacaagccaaatgacatatgaatcttacctgtcaaatctttagcctctaaaaatgtggtttgcgagaggttaagatgattttttattgttgcaacttgcatttgcgaagaagcaaaatgcaactcgtcttagtttttgttcttccccctagacaatctttttttttcaattgttaccatcttactatttgtttatttagatgaactgaatttagaaaaacctttttttttagcaataaatagcagacgtaagtaagtttatgattgaatattgaaaggaacaataaactttgacataacatgtatggaagaagactccgactattaaaaaaaaaaaaaagttattcttccttgccatgggaatctcttctctgatttggtattaaccaataaagttttgtttaaaaagaaaaaagttagaagattggtcgaataatgaataatctttcagcaagttgtgataattccacacgtcataccttaggtaaagagtttctagttttgttgtcttgtcacacgcaaattgatatagctgacattatcttggttggtaaacctatggagtgattcactttcatcttcttctttttttttgtaatcggataaattacagacgaaaatctatattaggttttaatatcgtagaaaactagtgatcctttgccacttaagcgtttagcaatgaccaacatgaaagtatagtgaatggttattaactttaatcaatacacatcctaaaggttttccttgatatgtaatcaaagcgaagccaacttgatatagccatcattaatatgaattttcccaaagacggatctaagattttgtaaactacacccaaagctcatcaactgtacctataagcagattttatattcaccactagtcgattaattattaaaaattggctaattgtgcatagtttacaaacacaagacgtaagagcgtatcgcaaacacagacagtaacaacgcatagaagcaatgccaatcaatcaagcgattcaagcccgtaataagagaaaaaggactttttttattacgtttatataattaatctgttgaaatggaacactcatactcatagagcaatatttgaggaaacaacaacgctttttctaagtctctcttacctagttacctatgaccacttgaccagtaagagtgaaagagatcacaagatgctttggatctcgtgcgtgacagacacatggctctggtttagttaccacctcctcattcatgtgcaaaatccgactagcagaagccaagaaaccacttggtcaacatttaaaaggtccaatgtaattatttataattattgttatttaattgtctcttcaacttaaacttgtaccttgctcaacttgtgagtaactacttgtttgcataattgcatttaatatagagattagtacaatttgaatgatattcattaggtaaagtatatgcatacatatagtgagtgatacacacagcctaatgtatttgatgtgcttcatagaagagtggaaaactggatttgcacaaatttgtgatacatatcactcttttgttgtcactaatctcactatacttgcataataataacatcaataaatttattagcaaatccattgttttttgtttcctacgtttataatattctcttatatatacaagtaagtgaacactcttaaacagtttaaccctaaataatacagcttcacggtggatttaacttctaaagaagaagcttcgctctctgttcttcttccgcgacgcgtttcttctatctctcgcaatctcctaagaggtaagcttctttcattctcctcttagataattgtttcagcgattgatgaaccaccctcttgtagtcttgtaggaactttagctagatttatgagatctaatcgtaatcacccaggatctaattgttgcgatcgatttcatcgttttcatgtagaacccctaatttttacattcatgtgtgctcgcagagcttgaatacttccagaatcggctctaatttgaagcaattttgagtttcaagtcgaaagctaatgagtcactgagtgtaaaaatccgatctttcgtctgtgctttcatttgaaatgtcgacgaatgatgaggaaaatggaactgtaatcgaggttaagaatgttccagaaccaagcccagagacttggtatagtgtttttcttcgtcaagcttctgtctatggtgtagctgctggttactgtctctcagcttctcttctctcaatcatcaacaaatgggcaatcatgaagtttccttaccccggcgcattgaccgcgatgcagtactttacaagtgcagctggtgtcttgctttgtgctcagatgaagctaattgagcatgattcgcttaatctattgaccatgtggcggtttcttcccgcagctatgatattctacttgtctctgtttaccaacagtgagcttctcctccacgccaatgtcgatactttcatcgtgtttcgctctgctgttccgattttcgttgccattggggaaacgcttttcttgcatcagccatggccatctgttaaaacgtggggatctttggctactatatttggtggaagtttgctttacgttttcacggattatcagtttacaatcgcagcttatagctgggctcttgcgtatctggtgagtatgactatagactttgtttacatcaagcatgtggttatgacgattggcttgaacacttggggacttgttctctacaataaccttgaggctctgcttttgtttccccttgagctgcttataatgggagagttaaagaagataaagcatgaaatcactgacgagactgattggtactcgttgcaagtggttttacccgtgggtttatcgtgtctttttggcttggctatctctttcttcgggttctcatgtcgtcgggccatttctgcaacggggttcaccgttcttggaattgtgaacaagctgttgacagtggtgatcaatttgatggtgtgggataaacattcaacgtttgttggaaccttggggctcttggtttgtatgtttggtggagtcatgtatcaacagtctaccatcaagaaaccgaatgctacacaagaagctaaaccgcaagagcaagacgaggaacaagagaaacttcttgaaatgcaggagaacaaggagagtaacagcgtcgatataaaggaaactctgaaatcagaagagaaactatgatcatagtggttggagcttacagtggctggagtttcttcggtactgatacgatttagtttccaagtatagaactacattgtacttagtggttatgaaattcttttgtatttagaggtaagagtacttcgttcctgatccagtagttgaacaatatcgatttcttctttacattttgatgtgtttggatatttttcttgtacccgattcagatttatatgcgaatgaagaattcttatgtgtttcctctttgtgttgagatctgttaccaggtaaaagttaaggaagttcaaaaaaatatttgtttgagagtccatctaatcttggtaagtgctggtacgctaaactatgagagaaccaaaagtaagatgagagtattcgattttgagcctaaaaaatgaaaatttaaaaaaatatcgtcaacagcagggttcgaacctgcgcgggcgaagcccaatagatttcaagtctatctccttaaccactcggacatattgacaacttgttaaatctttgaaacatactcataatattagcaccaaacgtaaatttggaaaaagtcaaaaactaatcttaatcgttcgtagcttaagaagattgtaatatttcgttgaggccaatcacatagtagaagaatcacgaataatgatattagcaaatctaatgcgttgaagattgtcacaagtatcaataacaggctaattcaaattcattggatataaaagtcatagggatagttcggtcgagatcaccaaaaaattctctctctgcaaaaccagaagcctgttttttatgccttaagctaaaaaggaaaccctttacatgtttacatggaatctctcaatctcatgccaccatttctcttccttaaaggttcaaaagatcaggagaaaacagagcctgacaacacatagcagtagtaggtaagaacctgaagacatgacttgatgaagatagatagagtaatgagttgttgtttcaataatgttaagaattaaaatgcctctttgaaccggccagtcttgtttctacacccacactgatcatggcccttgaaattgttcatgagctttctcacactgcttgcattttccaagcatgaccaattagttagctttcaaacagatgccaaccatacctttacacggaatagtcaatcaaaagatacaccatttactctattaacttatcctaacaacaagtggaaccaaagaagaagcgataaattagttgagtaggagatccctaatatattacacacaaagaagttatcaagcttgttggcagtggtttttttaccgagttcacccagggggattgttctggtgcatatttgtagccggaatgttttggaagttcgtgttaattaagttttggaatactcctggcattgtgttgtgaaattgccctgccaataccgcctgtgactgtcttggatcagcctgtaattgacaacgatcagaacacttaaccatatgaaacgtacaagttcaccaaatgtcactgagtggtttgcattcgggatgcagatagaaaaatcaaacataccacatgttgaaatccttcttggcttccctcaccaacagtttcagattgagccacatgctgcacaagtgaagaaagatcaatcataaacaaagttacgcatcacatcatcaggctatgacagcttagcagagatggttgtttgtcttttggccatatgtatgatattatagcctattgagtacccataaaagattaatcgatgattttgacagcatagtagaaaatgctagtgaacctttgcctttttagatgtattgtttaggctacttctcttctcccttctggtttcagcttgccatggaacattgcctgcatgtatgttaggttcgggtccaatctgtgtcgatgtggatccatattgattttcttcctggacaggatctcctgcttgaattgcagcttcttcacacctggcgggatgtttgatggtattaatcgtaacagcacattgcttaaaagcttctttcattgcaaacatggcgatgtcataactttcttgggatagagatccttcttctcccaatataatggctcggcggcatagatcattgaaacggcggatattagactgcacaagttcaaggtttctgctgatctgatgtctgtttctagctgcatttgtccatctttgcaacacatagtttatcggaatggtgaaaacacccgacatttggaggacaacaattgcgtgtctacagagatatcccttgtactcaaaggaacggcaagagcagtaaatatctgacttaaattcatcccaatccaccaaatacttctgttcgtcgtcaaagtccttaacactgtaagttgttccttcctcactctccttcgtaaggtgacaagcagcagcacccagaacctcaagttggaatctcctgaatatttcatgggagtatacaagtaacatctgcttctcaaaaggtgatggagatttcaactcaggtgcttcatgccaagcatcaaaatctgctttagcttcctcttcatacctatcttctagcattagcccatatccttctaagaactccttaagtgaggtttcagggtgaacatacctatcaaacaaagaattcacactttctgaacgacaacgcatagataaccccgcaaatgttattcccctcataaaagtaggtgcccagaacttacgttcctcatacaaagaccgcatccacggaacatctctaagatgaaacttgtctatcagcttcaaccacctcctatcgaattcctcctcagaccatgacctgtatatacatttgaacaacttcttcataaaagtgtcttgccacatactccaatagtccagattcctaggaagctggtccaacacatgccacaagcaataacaatggcgagtttccggtaaaaccgcagcgattgcagctttaatagcattgttttggtcagtaagcataactttaggtttttgaccacccatagccactaaccaagattgcatcaaccaaacataagtgtaaacagtatcatctgcaagcaatccacacccaagcaacacaggttgtacatgatgattaactccaacaaaaagaactagtggtactttatacttactcacgaaataagacgtctcaaaagaaaccacatcactgaaacttttgtaatcttcaatccctttagcatcaacccagaacacattcctcagaagatgatcttcactgaaatcaacagcgaaaaaaaacttgggattctcttcttgcatacgcataagaaactcaagcaaaatctctgcatcaccagtatcaagaacaagtctccgtcctttatcatgttgattcctcatataaccatctataaaatcaagatcatgataagcactgagatgtttacaatcagtcaacggagtgttcttcttcctcctgagacgagaatcgttggatttcacaagctctgtgtttctatggctccggaaataatgagcttgctctggtaaaagatcgtgattatgctccttgacgaaactgtaaacgtaccatttcccatctggtcttcgttttacatgcatacttgctttgcatccgatcttaggagaagctctagggtttatcgcgtcatcggattgttgtttgcttccgtagcgtatgcaggagaatttggcatcgatgaattcctttgaagctcttgatcttcggctgcttaatttcgcagttccgaaaccaacggacttggcgtagtctttgtagaacaaatacgcatcttcgtgagtctcgaactccatttgagaagcttgatgaatccacaccaaaatttcgatacagatcggtgactataacatgagaaatcgattgagtaacataaatcacgaatcacagaactgattcatcttcaccggaattgtttttgaaagatccggagaaactctgaggagagtataacattcgacgagaagttgaaagagacttgcgattgcaaatctgatgatatattgggcctaactctctaatcaggatattgggccgtattgggtaattcagtttgtactttgacttattttcaacctttttggaaaatgtgttgactaacaaagctactggagaaaaagatgtaaagaggaaaaagcaaaaaggcgaagagccgttagtctaaggtttaaagatttaaatcatctactagcttgagtattaaaaatcagaatcgggtaaaattaaaatttatcagattgggttaataataatgtggtctaagttttgttttttgttttggggtcaaatcgactggtattaatatttagattggcttaataatgaggaagcggttggtggtcggtgacattgaaataaaacattgaccattggacctttgagacttgagcgtggtagtaataagtaataacgaagaaaataagccaaatttgaaaaacgcacatggttacaaatatagccgttgggctcctattctctttttccattaggttttttttctgaggttgtatccaacggttaagattaactagccgttgattctaaaaaggggaaaaaaagataacgattcgtaaaacaacattttttttttggtgtgttgcagacatatatccgctcttcacgtcttcgaaatctttgattactctctctacagtctcttttaccactttttcttcaattttgttttcgttgtgagagaaagaagataaagagagagactcttgaagatcattgaagagagccagaggttgatttgtgtttgctgttatgggattttgcttctgagttctgacagagagatagagatagagagaggttaatagtttcgttgaaagcttcaaggtaaatactttagtgttgatttcatatgggtttaagagagtacatcttgttcttgatcgtcgagtcttttagattctcaaatcggattcaagacccaatttttaattcggattgttaatatgcgagtgtttctgcgattctcagatacggaagataataatgggtggatcggatgagaacagacacggagtcattggaccgatgaatcgacaacaaggtagatcagaattaaaaacaagaagacccatttaatcaaaaatcaatcttttgtttgattaactaaaaagatgattttgccaatgttagggggtttacgtggaggaaaggtaattccgacgaatggacagacaagaagggcactgagtaatataaacaagaacatcatcggagctccggtctatccttgtgctgtcaagagaccattcactgagtaattatatttttattactttcttctttcaatgatcctttaataaaaacgttgcatagacttatcttagtaaccaattgttttctcaggaaaaatgggatttgtaacaagaagattccacctgttccagtgcatcgaccagttactaggtgagtgatttcatttgatttctgcttcgatttcaaaattgtagtatgagtttgtttaattctttatttaatttcaggaaatttgctgctcaattagctgagaacaatctccaaatccacaaggaggtacctttatattgattctatctgaatttagtatttgaaaacatgacatggtttaggttgtctaattccaagtggtttttttgtggttaggaaaccaagaaaccagacttgatttcaaacgaagcattagatagaatcataacagatgtggaagaaggagactttaatgaaccaatgtttgttcaacatactgaagcaatgcttgaagagattgacaaaatggtaataataataacatgttttatttaagccactattttttgttggttactcggatgaagaaacctgttgtctttattctgcaggaagggattgaaatgcaagattcaaatgatattgatgctgaagtagaagagtctgtgatggatatagacagctgtgacaagaacaatcctttatctgtagttgaatacattaatgacatatattgcttctacaagaaaaatgaggtaacttttagtgttctgtttctgtatcattatgatcattctagcttcaagattgaaactttttcaattattttgcagtgtcgtagctgtgtcccgcctaactacatggagaatcaacatgacattaacgagaggatgagaggaatcctttttgattggttgattgaggtatatatatatacacacacaaaaacatgaacataaaattgctctgttgttggtagttgtctcactgtaaagcttactgtgaatctttgttgcaggtacattacaagtttgagctgatggaggagacgctttacctgacaatcaatctcattgacagatttcttgcggttcatcaacatatcgcgaggaaaaagcttcagcttgtgggtgtaacagctatgttacttgcttgcaaatatgaagaagtttcagttccagttgttgatgatctaatcctgatctctgacaaggcttatactaggacagagattcttgatatggtaaaatccttcactaaatcttgtcctgattataaccatggatgctctgctttatatgtggatgatcattattgtgtcttgcaggagaagttaatggcgaataccttgcaattcaatttctgtctgccaactccatatgtgttcatgagacggtttctcaaagctgcacaatctgacaaaaaggtttgtgtaactttgatgataatcttctgtcttatgtgatatataaagaatcaaaacatgatcataaggtttggtttttcagcttgagcttttatcattcttcatgatcgagctttgtttagtggagtacgagatgcttcagtacactccttctcagttggctgcatcggcgatctacactgctcagagcacacttaaaggatacgaggattggagcaaaaccagtgagttccactcaggctacaccgaagaagcgcttctgtaagaacatcaaaactaagtagctttttctactgatataatttggaatttctaaaagtgttgttgagttttgatgatcaatctctcacagggaatgttcgagaaagatggttggtttgcatcacaaggcagggacagggaagctaacaggtgttcacaggaaatacaacacatccaaatttggttatgctgcaagaattgaaccagctgggtttcttctgctgtgattcaactgttaaaattaggtcacacggaatctataatgacttgacctaattttatcactgaagagagagcaacataagttgcatcatatgggggggaagtttctgaacacgtacgtatctctgtgtgggttcacttgtttgttttcgaaatatctgtggatggtttagtcttctcattttcgttgataagagaataacagaaagcgttttttaaaactcttaactttttagggttcttcatttcaacatatttttccgctcttctttccaaatgtccaagtcatatcttatcactcacaatcacaagttcacaacatttgtcgcgaaaataaattaggcttctggttttgtggacataatcactttgatctcttgacttggtcgttcaagtcgctaaatttcttgaaaaaaacaagaaccagtcgattttacaactacctatgctgaagccgctcgggccgcggtccagtcatggtggccgaaactaaaccatgaaatcgcggttgccgctttttaccattacctatgtcgaatgttttatttcctactacaactcaagtgtcttctccgtttttatccgaccatctttatcagattaataaacgaatgaatataataaatggataaaaacgaccgcttttagaaaaccatcattttatgatttctgatttctaccaagattaaaaagacgaatcattcattatagaaatttgaatcgtgctatattatacataagatgtgggaagtctctcaatgaccacattaacaaaacatgtcaatttttcaaacatcttagtaacccaaaacacagaactagttcctctttctctcttccctccatgtcttagagattttacttgctgtgtaccttaaatgcataagtgacgagctgaagatggcggattctcatggatactgcagagaatgtctcacgagccgaagctacattacgagggttaactaaactatctcctcacaggtggcacagcccctcttcctcctcctgttccacgcccagtaccctgagtatgacatcacaaaattcaattagttgctttgaattgtcaacattgtcttcttgagatgtaaatcagaaacattaaggacttaggcaaaggtgaacttactttggctcgcattgcagcacctctacctctgcctacacctagtgaagcgctctttccctgtattgatcaagtaaacaagatgtttattagcttccatgtttataaagcatagatgggattgatattctccatcacgttcaagaagtttaccttgcccctaacatccttgaacattggagcattctttaacatgtctggtatgactaaaaacctgtcaagattttacaaaatgtcacataacagtcagctaagttgaaaaagaatactccaacaaaagtaaataagtaggaaacaagcagagatgtcaaaaggagtttatatctagcagcacctgactaagctgcctcgaatgaagacatgctcaagctgtgataccttaccatcctgttccataaagagcccaaacgaaagtttagtaacaatcatgaatagaagatactaaatttctaatcacaatctacaaatgtgtaagagcatatatctgtagtaacaattcaagatcaattatatagtcttgtaatttgtttaatcgcaaacatgtcatgattctacatagtaacaacataagcaagacctgtaataacatttcttctctactactagcatatacaggaactaaacccaatcactactaggaacacaatttaagggtcaagaatttcacaaggattctcaattctcctccaaaattgaactactctcaacatcacaagaaagagacaacctaagaagctaaactgttcacagctcctacataggcaatggccaagaaacgaaaccctagtaacttagtaagacattaccttggccgtataggtgatgttctcgagctgacagttccaattatcctcacactcgatcatgcttcctctgtaaagctcaccgctcttcatctctacactcacgatatgaccggacgattcgtgaagaagcttcaccggaatccccaaactccgactcatcttcgtcgattcactaaaccctaattgaaccttcccttttcctttttagcagccaaaaagctttgaacaatttagcttctctcgttaaagctccacactcttatggacttcttatttagattttggatcggcccattagtttattgggcccattagttgaatgttgtgtgccttttttgttactttgtttttactcttaagttttattagtataagataagataagatttgtttagttgacccaaaaaaataaaaagataagaactgtttgtaaattaaagctcctctacacttgtgacaactagccgagtggtgattagattcaaaaaaaaaagttgtgacaactcagattctctaaacagatgttgcaatgtacaaatcttcttcacagattctgatttaattgccaatttggcttcttgtagtccatattaatcaaagattccatattaattgtttggagcgttacacaaaatagtttgcctataaatactccacaatttttatatgattttagtagctcaatagagaataacaatagaaaagaaatggaaggaacaatgaggtgctcagcgaattacgtcccgctttctccgatcagctttctcgagagagctgctgtcgtcttcggctccagaacctctgtcgtgtatggtgatattcagtacacgtggcaccaaacacgtgaccgttgcgtccgccttgcatctgctctctctgaccttggtctctctcgccatgacgttgtaagtggttaaacgacttttatatattggtcatacttttttcttttgtttaaactatttcttttatcaggtggctgctttagcgccaaatgttcctgcgttatgcgagctttattttggagctccgatggctggagcagtactttgcgtgttgaacacgacattcgattctcagatgcttgcgatggcgctggagaaaacgaagccaaaagtattcttcgttgactctgagttcctctctgtcgctgaagaatctctcagtctcctctcaaacattgaagaaaaacctctcatcatcacaatcacagaaaatccaacagagcaatcaaaatatgaacaatacgaggattttctctccactggaaaccctaatttcaaaccaatacgaccagttgacgaatgtgatccaatcgccctcaacttcacatctggaaccacatcgactcccaaatgtgtcgtctatagtcatcgcggtgcctatctgaacgcaactgctgttggtgttatgaatgagatgaaaccaatgccggtttatctatgtacagttcctatgtatcattgtagcgggtggtgctatatttggacagttacggcttttggaggagtcatcgtctgtctcagggaagtcaacgacgaagttatatttgatagtatcgtgaagcacaaggtaactaactttggtggctcgcctccggttctcaacatgattgctaatgcaagagactcggtcaagaagtcgtttccatggaccgtacaggttatgagcggaggatcctctcctcctgaggtaaaactaactatcacagagttttgaattacatgtttgttcaatcaggcttatttggttgaacttccatattttgaggttatatataatcaatcccttgctttatacgttagctccgtcacagtacattaatatttaacatagaatcatagtaaagatattaatttatttggacaggtcatgttgaaactcaagaagctaggattcaaagtgatgatggcttatggatgctcggaggtgtatggactaggaacagcttgtttgtggatgcccgagtgggagactctacctgaagaggagagtttaaggctcaaggcaagagatggtctcaaccatttcgccaaggaagctgtcgatgtattggacccaaccaccatgaaatcggttccacacgacggaaagactatcagggtaattgctctccggggaaatacagtcatgagcggttacttcaaggacaaggaagccactgaagcggcttttcgaggtggatggtactggagtcgcgacatgggtgttatagatcctgatgggtaagtaaatgaatcatgcattactttgaatgtattactttgaatttatttatgcttatgatgtttccacatgcgaagctacatacaatttaaagataggtcacaagatgttataacatgcggaggagaaatcgtgggatcaaaggagatcgaagggattctctatagtcacccggcggtttatgacgcaggggtcgtgggtcgaccggacgaaactttaggagaatcgatgtgtgctttcgtgaagctcaaagaaggagctgaagcgagagaggaagagatcattgagttctgcaagagaaagcttgggaataagaacatgaagatgattccaaagacagtagtcttctcggatgttcctaagactcccactgggaagattcgaaagaatgttctgagaaagatggccaaggatatgggttatgttcaattgagagctgtggagtaaatgaaatgataatttatcaatgcatctaataaagttataaaaaaaaaaaaaagtgtaaactttaagctttagtttatatgttctgatgttctatgttattttgacatttataaaaaataatgaagtctcatttctagtagactgatcttaacataagacaaaaatatatatatcagtagatgataatgggtatgactcggcaagtattattctcttgatactattatgtagtttcattgtttaagcacactgatagtttaatactattatgtcgtttcattgtttaagcacactgatagtttgatatttttgtatcaggtgctgttgattgaattatgtttttttttgttcttgatttactttttattggggtagtattcatgatgattaatggagactatgttatgtatataatgttagaaacctggaaatatctttcacaagttttcacctttaagcaattcattttgatagaaaaataaatattatgagattaatctttcttccatggatcaaggcaagctaatagctatcatacaaacttataccagcccagatcaaattaaaccggagagaaattggaatgcccaatcagaaatgcataaatgggccaaatgtgaagaatacggcccaataattgttttttccatcagaatgataaacctgaaatgttttcttttcggcaagcttctctcctcttctaacatggtcgcatctgctagaaccagatacacataattgaaacgagtttcgataaatggaaatgttcgcttactgatttagagtttagatttttagtttgtgaagtaagttttcgccttttctaatctcgaagaacctcagaatcgagcctggaaagccatgtacagagctctgtaagttgttttggcaatttttttttttttttttgtgttgcctactatttcaataaatgttcattgacttgcttcgtgtttgtgcaatgaagatggctttctccattgcgatttattgtgagctcgtcgtcgtcaaagttaacgccttacgtatctcgagttagttatctgttccctgtgtttcttcaattaaatttgaagacttattgcaatttgattaaatgggtatttgattatagggacgaggactaagtggaattgataatggggctggttgttcttgttctcgtagtgtcacgacaatgattggtatgtctgattttagcctcttcgtatggtctatttgtctcaatatctatttgatgttacttggattatgaaagacgagatttttttgacttaagagtgcatgtttccatatgcaggtaatgaattcattcgatgccaagatgagtcaaagatcttacagttgcagattgttgatgcccttcgttcaggagagaggcaaggagcgtcagcattgctttttaagttaatacaggggaattattcacttagtgctgatgattttcatgatattctatattattgtgctcgatcaccggatcctgtggtaagtttgatatatgacaaagtctccctttggctttgtttaatcttcgtttatctttcacaagttatatttcaatgaaattttggtagggctgagatgtaaatctgtaatttgtttctcataatacagtactcttgttgtctctgacctcaaggcagtaatttgttcctgtagtttgtcatggagacttacagtgtaatgtgcaagaaggaaattagtctggacagcagatctttgttgttcatagtaaaatccctttgtaatgggggacacttagataaggtataattattccactcgaaagccagtatttccttacataatgcgactaaaagagatgagtaaatagttttgggcatacttgttcaggcatcagagtttattcacgctgtcagagaagatgatcgtatatctcctcttctgcctatctataacttttttcttggagcctgtgcacgaacgagaagcgtatatcacgctagtaaatgtttggaattgatggatcaacggagagtggggaagaatggaataacttatgtagcacttctcaaggttagttaagaacatatcatttttcagtgccttaatctttttgtttttttcaagagctggtcgtatgccaactttaaaatttggagtgtagaagatctggagaggacttatctttttgttattgtctccatttctgtcttagctttgctgtcccttaaggactttcgtttgttccttgacatggaggtttcattttcattgatctgcataattatcttctttttctttgttatctgattaatattattttcagcttgcagtttttcagcgcaatctatcaactgtcaatgatatctggaaacactatgtcaaccactataacctggatatactttctctcagaagattcatatggtcctttacaaggctaggggatttgaaatcagcatatgaattattgcaacacatggtgtatctagctttaagaggagagttctttgttaaatccaacagaggaaaattgcattccacgagactgtatattcctgtaccatcaaaagatgaaacaggatcagagaaatttgcttttggagtaactgatcgcattgtggactgcaattcgtcttcaaaagtggctttgccgaaaggtcacaataaaatccttgctattagggtcctcaggtggtcgttcaatgatgtgattcatgcatgtggacaatctaaaaactctgagctagcggagcagctaatgcttcaggtatctcccacttctttcccattcatccatttcatgtccttatccactcgctatgctctgcgcgtgatactgtagagttatgagaagaaaaactctttgaacatttgtagaagacagttgcagcattaacgaatcttatagtgggaattttgatcttctgtctatgaccttgatttaaatttcgaagctttcatgatcattgatacgctctttacgtcctcgttgggctataaaagtctgttatatagtccgcttcccttttgtcctttaactggttcgggtcctgctttgtggtatttggtgaaacctcatttctttctttcttcttatctgcactaaaagatgcaaaatcttgggttgctaccatcaagtcacacatatgatggtttcattagagctgttgcatttccagaaggatatgaatatggcatgacactggtaggagtttgtataatgtacaagccatctctttcaacatttctttctttctgtagtttcggttttttttataacgatttctctttatatatcatatctctacgcagttgaaagtaatgcagcagcagaatctgaaaccatatgattcaactctagctacggttgcagcctattgcagtaaagcccttcaagttgatttagctgaacatctgctggatcaaatatctgaatgctcatactcatatcctttcaataaccttcttgctgcatatgactccttggtgagttagtttgattctacatattggaagctatataccgtagctacctcgtttacctttcgctgtttgtgtattctgttacaagtatatttcccgaaccctcaagttcattagtttgatcctagatgccatagaaatttcaaaagaccgtacttgtgactatgttgccactctaatcataggagagtcttggaacaaagggttaatgatctgttctattagttcgtactcgaaatattcgtacaaaaataatcggcattctaagtggttgtcttgttagtatgtgtccatttttagtacataatccttgaacctaaacaactttattctgtttatttacgggtgtaactgtgagattcagcttcttactattgctttgtaggatcaaccagagcgtgctgtccgagttttggctagaatgaaagagctaaaactgcgtccagatatgaggacctatgaactgctcttttccttatttggtaatgtaaatgcaccatatgaagagggcaacatgttgtcccaagtagactgttgtaaaaggattaacgctatagaaatggacatgatgagaaatggttttcagcacagtcctatctcaaggctgaatgtggttagtttctgctccatatagataggtcttgacctgttttaagcagattaatcaaatgtaatattaatctggaaaatcccttttaaggcgatactatcaatctttacttcttcattgtgtatgtttgtgttatatatcagaacaatggacttatcgtttacactttcctttttctttcccagcttagagctctcggagctgaaggtatggtgaatgagatgatccgacacctgcaaaaggctgagaacctcagtgctcacagcaatatgtatctaggaacgcctacatacaacatagtgcttcattcacttctcgaggcaaacgaagtaagttttcatggtctaatagctttatcaaatttccactggaccagcatatatagcaatattgatcgctacttaaattacatgcagactgacatggtgatcaatatattcaaacgtatgaaatcatgtggctgccctgcagacgttgctacctacaatataatgattgattgttgcagccttattcactcgtataaatcagcttgtgccctagtttccatgatgatccgtgacgggttttctccaaaagctgttacatttactgctctgatgaaggtaataacaaagtatctgattacaattttaaaagtttgctgccattgtttctcaagaacttgctacaagtaagtattcagttcaggatgaaagaattctacacacagtacagacacataccaaattttcttgaaccatcgctcacgctcagaacttccaattttttttttggaatctagcagcttattgctgttcatttaattttaattaactaaagctgtgtatcctcttagattttgttgaatgatgcgaatttcgaggaggcactcaatctcttggaccaagcggcattagaagagatacatcttgatgtcttatcatacaacaccattttgcgtaaagcgtttgagaaggtaaagatatttgttgtaaaaacgcttaaagtaatgaaagtgaataaactgctttagtatacacataacttttgtctgcagggaatgattgatgtgattgagtacatagtggagcaaatgcaccgagagaaagtgaatccagatccaacgacatgtcattatgttttcagttgttatgtggagaaagggtatcatgcaacagctatagaagctttgaatgttctgagcttaaggatgctcaacgaagaagacaaggagagtcttcaggacaagaaaatagagctagaggaaaatttcgtcatgagcgaagaccctgaagctgaaacaaagataatcgaactgttcagaaaatctgaggagcatcttgctgcagcacttctgaatctaagatggtgtgcaatgctcgggggccggataatatggtcggaagaccaaagcccctgggccagagcactctccaacaagtacggttaataggtagaatgggaagtgttttcctgaataagagctggtgttgattatctgccatttcactaagctgctccgttttggttttgtatcctatacaaactagttagtgacaacacagttttggaggtcaccaatcgattcggttagatgagacggatcaacaatacggttagaagcatttttaagcggctacgaaccacctaaatacaaggcgacttgcgaaccatcaaatgcgagttttgttatttactttagattcttactgtaacttttgtttatttttacctttcaacaactgtgtatcaaagaattagccaaagatattccaattgcacctggttatacaaagttataagtatgttttctgaatatggatttaaccacttttgaaataaaggtaacaagtgcaatgcatatgatattgaaacttgatcacttgaaacaaagaagagaatatttactgagaaaacataaaggacagatggaaacgacagaaacaaacttaataatgttacaacttgctcctgtttttcttttgtagtttactcatccaaatacaaatcactgtccatagatagaggaccaatcctttacttagctgatttcaaaccatagaataccaaatttctaactaaagtatattgtacaacaatgcaaaacaaaaaataatgatactttcctaaattttaaataaataaaaagaagaagatattttctcttttaaccaaaatgatttatgtttgttacttaattacattactcactaactattatcttttacttaataactgaggccaattctcttcttctttgtcaactattagggacatttgttttttttttggccgacttggggacatatatctttgagtgttatatgtatgtgtattccattgattcatataaaggccctgataataatgtttttatcaatgtgataacaactaaagttaggcaaatatgagtttaaccgaattacgtataagctaatactcaatttaagactagtaaaaaaaatcaatgctgccgactgccgtcattaaagattttgatattaatctttgctttattttaccctaaatgtataatgtaagctaatatatatcaaataattgttagtcaaaagtcatcaaaattaacagatttttattaaacagattgtaataagatggaaacctctctataagaagtgctcaaaaacaaaggaactcaatttctctctctctctgatgattttgtttgtttgaagaaaagagaatattgttgtttgtctctcgtgatcgaaacaatgctttgtgattctcaaatacagtaacattttcaacatgctttgattccaaaaatccaaactttcattctctctctcaatctctctatatctccgagcagcgaggtagttgcacggcggccgccatgaatttccatcggcggcgctacccttactacaaccgtctccgtcgtctccttcctctcgttatcgccgtctctctatctctcctcattctcttcgcttttctctctttccttgctccgcctcctggagattccgatcgccttcctccacgcgttcgctactcatccaatgatgcgatcaaagctacaggtttccatattccggttagtgggttttatcattcttcgctaaagtttgaaacttttccgacctatttgatgatttagttggatccataacagagagctggaggcagatcagatcgtgatatctggcgttcacgaaatgctgaattcttttttggatgcagcaatgcaagcagcaaattcgcaagtgcgtaacactcttaatcatattccattagttagtaacactgatcttacgaaaagtatgaaactttcgattagtatggaatcaaggcactgattatcaagtcatacaaaatccgattacttgtttgcagattcgaaagcagtgacgagaaatgatcgatacttggtaatagccactagtggtggtttgaaccaacaacgaactggagtgagttttgtttgacttctcttgttaatacctatcttcatggattatcaaaatacaagcatttgtttactattaatcagctgatgggtctaatccttctacagattgtagatgcagttgttgcggcaaggattctaaatgctactcttgttgttcccaagttagaccagaagtcttactggaaggatgccaggtctgagacagattaagcatacttagctttttcttatgagaaacgttatgcatctttgtaactttgtgaatttttgtgcagtgacttctcgcatattttcgatgttgattggtttatctcatttctgtctggagacgtcagaattataaagcaacttccactgaaaggagggcgtacatggagtacaagtagaatgcgtgtaccacggaaatgtaacgagagatgctatattaaccgtgttttacctgttcttctcaaaaggcatgtaagtttccttctttcgctgaaactttttacttattgcatttaaaatatgtctaagcaaattgtttgttgtctgtattgactatttgcttagggtggtccaaataattgtcttcacaagtctaaccatttaattgttttcacaagtctttggtactattcttttttttggcatgcccatttcgttgattgctacaatattgatgtttgcttcgaaacatgaacttgaagcagtggttgtcttttggattaagcatctcgatttattcttatatcacttttgtctgtattatgcttcaggcagttcaactgaacaaatttgactatagactttcaaacaagttgagtgatgacttgcaaaagctaagatgtagagtaaattaccatgctctaaagttcactgatcctatacttacaatgggtaatgaattggtccggcgcatgagattgaggagcaaacacttcattgctttacatttaaggtagcaccaccgctcatctctaaatcctagtatttcttttatttttttcacttcgtcactgaacaagggcattattctggggagaattaacatgtagcacagctgaaccatcctgtagtgaatgctcttagctttttctttttggtaaacctcagtactcatatctaatagaggagattgcatcgtgaaacgagtggaatcaaatacataaatatgtttatcctggagttcctctagtgactccatcacatttttgatattctagtcaacaattatgatattttacatttacctcttgaatctctataaatactagtgtttgacgcaagtgatattgattgtgttgcaggtatgaacctgatatgcttgcattctcgggatgctattatggtggtggtgataaggaaaggagagaacttgcagcaattagaaggagatggaaaacattacatgtaatgcctattctgtataatgtttcagaaattacatgcgattcattgtactctatattaacaaggtaccgatgactaattttgcaattttattgcagattaacaacccagagaaacagaggcgacaaggaagatgtccactcactccagaagaagtcggactgatgcttagagctttgggatatggcagtgatgttcatatatatgtcgcgtctggtgaagtatatggaggagaagaatcattggctcctttgaaagcactctttccacacttctattcaaaagacactatagctacaaaggaagagttagaacctttttcttcgtactcttctagaatggctgcactcgacttccttgtttgtgatgaaagcgacgtatttgtaaccaacaacaatggcaatatggcaaaaatattggctgggaggaggtactgaaacatcttcttcttcttcttctatgtttttttggctcatctctttgtttaagcatttttcagtttgtttctttgatggaattgcaaaggtttaagcttttggttatatgaaatttgcaggagatacttaggacataaacccactgttaggccgaatgcaaaaaagctttacagattattcatgaacaaagagaacacgacatgggaggagttttcatctaaagtccgttcgtttcagagagggttcatgggagagccaaaggaagtaagagctggtagaggtgaatttcacgaaaacccatccacgtgcatatgcgaagatacagaggctaaggcaaaggcgcaattagaatctagaaaacttggaaagaaaaacaaatccactaataaagacgcagcagtaactgtaaccaatgatgatcaaaccgaagaggatgacccagattggtcggagccagactatgaggaagaacagagtgatcttcaggacagaggattatacaacgggacaagtttagattacgatgatccatctacctctgatgagcctgagcttgaagcaatgctatcagattagttagatacgcatcagtgaccttcacatcactacactgaatctgtcctctgcttgggcacttcacagtgagttttccaaccttggtgctaagccttgttgtcaccattttgcatgtaatgtctcctgtacatagaaccacgcgatagagcattgttttgtttatcaggatctgaggacagatcaatttttttcagtcatattttagtactcggaattgtggctttaccagagaaagtagctatagaaaaagggaaaacaagtaggcatgtgtagcattatgacaccggtgattacttgatccgaatattttctttacaataaactgaattatagcagcaggttcattgactttgtaccaaagtattttcacgaggtttggttttacatctttgtgccttgtgctgagagatagagatgaacaaagacacgagtaaaagttgaagaactgtagaagaatagttttgatgttgtgattattataaaaacattcaaaatttgtcttaaatgatagcatatgaatgcagctttttctttgaagccttcttccatcgggacctatcttcttggcaggaaaggcttgacggattcgatcacaacctaacataagcaaacaccaaaattatgagatgaactctccaaactgctttcagaatttagaattgtttggggtaataaatcgtctatttcttagttctccatagttctttaggttgttgtcaaaagcaaagtcacttaccctaccgtcatatgacaatgatgcaaaaatccaaggctcacgcgagctccaagcaaggcctgtgacagcaattatatagtgacttcatgcagttttagtgggaaattgtggtaactaaactcagtttgttccaagagttaccgtagacactgtcttcgtagtcagtataagagtttagtaacgggttcacacgctgacgtgatgcttccaccgggctgcacagcatcggcattagaataaaagttcaaaacaaagttggaaaaattgttgtgtgcgataataaagagaattaacctttctgatgttttatgctcactagatgctgaagcaaaccacaagttgacagctgagtctgttccaacgctctgtgtttggttaatttatcagaaactgacactttaaatatacattgtgagtgacagaaattgttctagaatcatcgactagcagcttaaagctgtcagtagtgacaagcacaataacaatttagattcgttcgactgtgctaagagaaaaaaggtaagagaaaatgggtaccagaattagctcttcatactcagggttacacctgacagcccatgtcctgtaaagaaaattcagaaagaacagtcacgctagaaacaaaatttcaggtcgaaagcattagatttgtgtgcatatgaagcagaatcatggaagagaaaaaataataatccacaaaaatgagtttagaggtaaattaccagtgtgtatgaccagggagctcttgcacaggaaactttgtcttccgaagatcccagagatgtataccagattcatcatccgcagaaacctacacaatcgacagtccaatgcataaatagaaccatctgataccatttctgtaaataggggacctactacctttcagataaaaagttcttgctatgaagaaaaaattaaatcagaaatgacacaattacttccttgttcctacccatttgcaatctatataacagattgttttctaactttggagcactgtgtaattctttgttggaattgcttgacaagcatttaaaatatttgcatacagagagagaaatcttacgagtatatgttctctcttgagattgtagtcaacattacgtacatgggcacgttcaattgaattattcttcctgtaaatatgcaaacatatcaagctcaacataaaggtatctgattttggaacccaaaaattaataatgacaaactattgactagaggaaacacgctagctgtgcatgcaggaatacagtatattaactttcatgcgaacataagagaggaacaaatatgacatacttcatagtacgtaagtcccaaaactggatagatgattcagaagttgctgcaacagaattcacatcatgtggattccatgctccaccagataaagaatgacgcataccagctgactccttagataaaacctataattagcaaaaaagatgattaagcggaaagtacctcaaaggtggtctaaaaacacaggaggcaaaaatgatttaatgggtttatcctttctcttgttgtagcaacaatcacctccgcacttttctttgaagagtctaaactccagaagacaagattttgttcatccatgctgattaacttgtcagaatttccagagggacaccaaagaacgctgtttccacaagaggtatagagagtcttcatgaaagtgaagataagaaagttacaagttctaagactttttaaaccaccgcacttataagcacacccagtagatagactgctgaaactgtaaacaatgaactcaccaattaatcttaccaacatgtgcatcaagggaagcaacacattccaatgttgaagaattc

SEQ ID NO: 1254 - DNA, 100806 bp, Arabidopsis thaliana
agaaatgtattgatcccactgctgatgaacacattttaattctaccaatyaatcaaattcagagatcttccaaatcatcatctcttaaaggaaatgtcgttgttcctatgtcggataatagggttcgtagcaatatgtagtttgactttataagtagacttaaacactcctagatccctcagagatccattgatcatgaaccgtacataacttaaccggtaaaaacatgctaaaccatcaagccgaaattcgtcatgatttcactaaccaattccaaacccggaccatcgaaaaacaaactaactcagagcggtttggtttagttgaaattgagatggtgctgctcggaacatcaacatcagtaccaaaatctgagttaaaaagagtgttgatcttcagaatccgaagatggggtatgctcaagatttgcttactgatcatcatcactcaaaaagagggaaaatgaaaagatcaaagatcgttttcaaatggtaaaagaaaaactgaaaaagagactgagacaagtcaccaattttatcgttagatttgttagtgacttttacaaaattccacgtgatctctatgtatgattaattataatatctacaataatgtttttattagaggcggcgatatgtgaaagctcttaagtgatgaggtcgcttttggttttattatcccaaaagaaattttgttaattaaactgcactagatgtgacaagttttatcccaaatctttgttacatacttttaaatttaattccccaacttgtaaagatatttttgaaagtaattgcaattatcttctattcattcatgcatctcattctactttttagtcttttagacatcatctttgtgttttcacaaaaagaaagaaagaaagacatcatctttgtatgtaaatgatgtcaggtaatagaactcgttttagcatctaaacttaatttcaattaattatacgtaaaagtctatctacccattgcgattataatatctgattctatctgtatatgataaagcgatgatcgtctacaaatatcaatgtctaaaagacaagaaagccgatatctgtatatatcttgttacgtaatcatgatttaagttttatgtatcaataatgatgttcttcaatccctattccctaatccaacaatttatatcatcttgtttcgaaaatataccatatatttttggttatgcttttattgaaattttatattcttttgataactacaatgaaatggatggaagaataattcatttgaattctgtttggtgaaactggtaaggctgatcacaaggcattaggcaagccacacttcttcagttgaaagagggctatattatatgtcagcttttgaatgataacgtagaaacaaatttcttaattaggcagtctctataagccactaatgtggaatagagaaaatatcatggttggcattaaattaatttggtcacattcaatgaattttcttgaaatcctttaatatggttcaggtttccctactccgatgattttaaaaagcaaacacttacgcatactcaaatctttaaatgaatactatatgatcatgcatagtataaaaaacttggaataatatatacggtccaaaaagggtttatatataaaaataacaaaaagtaaaatgtgctttacatgttcacatgtgacccgcagagagcagattattgcatatatataattccgccggtatatatccaaaatgttataataagagtactccaarattacgtacacgaactcttaaccaacgttttaaaactaattagattgatattgttagcctaaaactgcatcaactggtaaaagcagtttataactacaactctacacgaattcttttatgattttttttttatagatattatgaagtagtcaaaaaattatgatgtttcatttttctagtcatgattttaaatgtttcaagttaatggtgacaaaaaaatgttttattttttagacaatatttctgtaacgagttgtgtaattttatagtgtctaaactcaataaaataaataaaaagggggagcatgtgacggaaagcaagagtgggtggtgagaaatcggaaagtgataagttcactagaagggaaagagtcaacaaaaatatgtaatggtctctctttttttatgtatttagtttttgtcatgtaactctatttagacactcataatttcacacgtttcctccttctttttcttaccacacattgtttcatgtattattcttctcaaatttttcatttgtttagttgtcttttaatcatttagtacgtctaatttccatgcaacaatacaataaacgagtagtaacgttcaagacagaaaagagagccgacagttataatatcaaaatgtatacaagcttatggtccttctgtatacagaatttaacttctaataggttatagtgatattttcctgactataataaagctctatatattgttgttattgttaaggtgaggattggtatagtacaaatggttgaaaatgtattaaaaaaagctatggcctgaatatatattaaacaatctagagtgtatataaactgagtgataagtaaagggaaaaagattatgaataagaaatggacaggcgtccctctttgccaaattctttgcgagtgttgatgcatgttttttagttagttgttattatcatctttcgcacaaactatgatgaccattgaggccaaaagtttcacatgaaccttcatttccttctgtacatattaggccgatgaggtgactgttctccacatatgttttatacctctttttacctgccaggagaaattataaacatttccatctatgtgaataattttgttgattaaaatttcaaaataacctttatttctttgtttaattgtttacatatacaatatcttataactctatttacttgccatatgaatgatttcgttaggattatatatatacgttctttacacaaaaataattaagaaattaatttgtgttgtgtctgcaccctaacttcgttttcgtaggttagatcagttgttccttctatgtgtacgtggcattattctcatggctaagagtgtttagagaacactgtaaagccaaaaatggaattttgggattatggtttgagacttcagagccacaaacttttgtcaagtgttatagtgcgagacttttgatattaaaattattttgaatatgcatgcatctgtgactgtaacttagtttttctactaattgtagctacattaaaaacgcggcgtattttaaataatttgaatggttctgatataggtttgtttgataaatattcaaatttcaacgagatagtacaaaaaaaatgagagaaattgttttgtcattgtcctggttttttattcattctttaaagttacagaataccatgagattttggttcgcgggttcgcagatacaatttcctagtttttttagccaaatgatcagataaaatattacactttctcggtatataacatgacaaatagaacatatagtttgaaaaatctacaaaaaactaatcgtctatttatgtgattcatatattttcttcgatcacttagaggtggtatatgtgctgaaatcccacggtcattattacaaaacgacgatgtatcccatgtacagaaaaaaagttcataatttttgttttgaaggatattgatcttatcttaaacattaaaaagttttccttaatgaattagtcgttatcccaacaccaattgccatgtcagcttgattgactgcaagtcctcgaccagattttttttttataaggatttcaaatcaagcattcgtttttataacctacatggctacattctgagcattttaatttgactcataaccttttgtaagttataactatgttttagtacttttaagttgcgacgagttcaatagttcacaaaacgtacgtaaatcatctatgtcctacactataaatataaagaatgggtgttatttagattttttgtatcttgtcccaagtcctaacataacatttttaaaaaaatttaaattgtgtattccaattatatattttgtccagcagccactgagttaaaatgttcttttcgtgatttcaaaggtcagtacgtagagtagagagaatcacatttctccactagttcaaaacgtcattaagtttctttgaacatgtgtataatcatcaactgaggcaaacacttaaaatattcgaataaattaacaacccaatacagtatttggaatagctagctactaattaaaatagtagattccgcctgattagttgctgctgtgcatgaccaactgacaaataataaaaagttaggacaatttatacgagaagaatgaatgttagggtaagcgatatatacacacaaaaaaaggataagcgatacacgttatcaatttatatcgtggtttggtgcatgttcaatggtcgcatcgcgcacacacgcttcttccacttccatcatgtctatgcccccacacgcaccatttcattacatccgtcaaattttaatgttttcagtccaccaaaactattaatatcccatctaaacaaattaacaagtagattagaacgtttgattttgaccagattttcaatctagtatcgattgtccaaaataaaaatcagaccattttcttaattataacgaatgattaattttcaggtataaagatgttaggtaaactaaagacatctcataatttggaaaaaatgagataaactatctaactatagaaacaccatatatattattctctatatatatatttatatttatatatatatggtgttattaaaacagtcatattcttatctacgcatttatcttatagtaataacctttctttcttgccgacccatccgtaaaaacttgagaacgttaagatacaaaatatcgaagaaaaggactcatagagtttacatgagctagctttcgagttttcagtcattaactaaatgcaaccgatttcgaactaataacaattgaaattttacgaaaacatccttataactgaaagtgatacaataaactttataatataaagcaaaaatacccaagacgaagatctcactcactataaatccctttcctctttgcctccccaaaaaacgctcacactcctaatccctcccatttttcaaaccactctctctttctctttctctaagtctttaacaatggcgcgccttctcttccgtcttctccaagaagccaattctacatctccggctgaagcttctccgcctttcaactccgacctcgtcctcatccttgcggttcttctttgtgcactgacatgtatcatcggcttaatagccgtctctcgatgcgcttggctccgccgtatcgcctcaagaaacagatcggatcaaactcatccaccgccggtagctgcagccaacaaaggattgaaaaagaaagtcctccggtcgttaccgaaactcacctactcgccggattctccgccggcggagaaactcgtggagtgtgctatctgtttaacggaattcgccgccggagacgagcttagggtgttgccgcagtgtggacatggtttccacgtatcgtgtatcgacacgtggcttggatcacactcttcttgtccttcttgccgtcaaatcttggtggttaccaggtgtcataaatgtggcgggttacccggtagctcaagttcaggacccgaacccgatacccgaatcaaacaacgtgaagatggtcctgataacttgccttgattcttttctttagacatatcccattttattttttataaagggaattcgattaaacaaagatataatattaattaaaaagtgttctttatcattttaaaggataatgttactctgtcatgtatatatttaattatctattgtaaatctatcatggaatggaaactttatgtcatttaaccctttatttgtttttgtcaatgtattatgtaaactttatatagctagagaccaagaaatagttaccagaacttgaaactaagacgttggaccacaccatttatacgtaactacaatcctaattatccggagtaaaaatttgccttagatggttttgtcaaagaaataaataaaaatacatagtatattctttgacaaaaaccatcaagggactctagtctacctaaaatgttggttgttcgttgctacaaattcgatttaactaatggaatattccataattaatgggaaaagtagacagatggaccagtatacgtagaacagatggtgtaatgtgttttgtgtgagatttctttttcccttttccattaataaagcagcaaactaattgtcgggttttgtatatttaatttgttcatgttttatgttaaaagtatttaaatattgggaacacgagactgtatcccactaaatcatcagacacgactttaaattattagaacttcgaaaatgaccatgaagatgagcttattttgtcttcgaacaatgacctaacaaaagatcgccaaaatcttaaagaatacaactaaagtgcgagatacgacaacttgaacgtagtttaataataattagccaagatgtagataatcacgcatacgaaaaaataactgattatggattatttctctttcgccgtctaaccattgagtataacacatatgaatagtgatggtccaccaccgcgagatatcatcattcatcacgagtttctccactatggaaagtgcgtccatgttctccattagattgcataattgacattgaatatagatctaccacaaaaatatccatcttaattttcatctaacgactatagttttgatgatatagctcgtaatggtagtaattcactaatgctccaacaaataaattatcgagctaatgctccaacaaaaaaaaaaaaaaaaaaaaaattatcgagctaaaagcaagctataaccattaacccaaagaggttgaatgtccaagcattactgttcttcaaaaaaaaaaaaaattgagctatttatgtttattttaaaagtactattacatatggttagttgtaaattgtacgtgtgatgcatgagcatgatctattatatatctcttggcttttatctccatggatcatggatagatgatagcattatattgcgtggctctcttatcatattattatagtaatggatatttatttctgtagaatcacaaataaagagtaggaagtcgaaagtgaaggcatgctttttgtttgttaaaaggaagaactataaattctcatagaaaaatgatgagaccaaaattcccaatctggccgaagattcccacattcctgtttttgcattattagtaagctacacattagttattgacaaaaaaaaaaaaaaaaaaaagtaagccacacattagtttttttttttccatgaatgctttattacctaggtagtggtgttacagttaaataaaaatcatcatcggttgacaatatctgaaggcaacgtaatgttcaaattcaaatttgacgagcagaaaccaatttcttttagaactttcacgcttgaataagactacatatctaataaactaagtattttatgttagggaatttatatgtgaatgcatcatgaatttatattatattttaaagctgaaaatcttgatttatcgatcattcatatatcaagaataagaccacataacaattgttactcgtttaggcgtttaccatctattttcaaacttaaattagttttcataattcgttatatattattttatcagcgggcctcgctggtgtttaatatttagttaaagtcaacttctgggcctcgctggtgatgggcttcatagtccgaaactatgaccaaacttgctaaagcaggtaaaccaaactgacaaagacattgtagcccgcttaaccggtccaatttagcattgtaacagaaaatgtcatttttgcagtcccaaaattatgaacacaattcatacaaaaaaaaaaaatcttcaaaacaagaaacaaaaaaaaatgaatatgagggatagtctatcaaaagcaaaaaagaataaataaacaagaatgacgtcagaatagttgcaaatattattggtatttatgagatcacatcgaatagtgaaacgcccacaaaatacagttcatcaaaagttgtaacacaataatagcttttacctgcaaggctacagcaatcagccacataacttttaagaaatttgttcgacaaaagattttggatcttaggaataataatttatataatttgtattttacagaaggtgaaaataagaaaagaccaaatataaaatccaagggccaagattctacagctggaatcctaaaggacatggagaatctagtagcatgtgaagaggtccaggagaagacgaaaaacccaacagaccataactcgcttcctgaaacagagggttctccaagtaatctcgtacgtcaatttcgttaccgttcgaagactgctctgttttcacgccgaggttaaagtcgaagtcgtcttcgtcgttgttgttgttccctgaaggaaagatgataccgttgagctgagagacgacagggttgattaaggctttgagctcgtcgatgttgtggcctgatgatccatgaaggaagttgttattattgtagttttggtgtggatcatcgtagagtagtgatgggaagttggttagggttttgttggaaggttctataagcaaaggtaaggcttcatgatgatgatgatgtgttgttgagagtgaatggttatgaaggtagctgatttggttatggattaatccaacattttttctgtctcctgttttattgaacactctgcaaatcacccattcctcctgtgaatttccaccaaaaagaaatgaaaaaccaaaacatgttattacacattatataatgcctacaccttaagatcttgtttgaaatgtgagcctgacaaattgatttctgataatgataaatgtaattagaaaggtgggatacaaaagaaagcaatagtgatggaaaacgacacaacagtgtatcggtgaacagaaaacggcaaggtgtgtttggtgttgacatccacaccacacgtacaggtttatatcaaatctatcacatctaaactgctctctcccctgtcctccccatactaagccaaacaacatagtgacaatactattgaaacaaaacacatgaaatgggaaaaaaaaagttaaatatttcgttaaacctttcttttcaacttgtggatttaaaaagttaacacattaatggagaacaaaaacatcaaatttctattacattcgcaaagttaaaaagaatttaatgttataagaaatggacgtgtgggaataaaagtaacagggtttaaattactagtttcacacactagtagtataaaatttttggtttcaaaaagtcaactcataaattgacaagagaaaaaatacaaatttttttaaagaaagagatgcacgagtgagagtgagacgcacgagtgagagtaaaagagtgttaatttaccttacacgtgtggcggtgtgaatggtcgttttcgaggcgatactcatgcatgacccacttagtcttgaggccacgtggagccctacctttgtagaacaccaacgtcttcttcatcccaacaagctgtcctcctccgccggagaagacttccttatctttgccggtagctttccagtatccagcagtagttgctctgttagtcctcaaacctgtcggatatttcctgtcccttagactataaaagtaccactctctctctcccatcttcgccatttcttcatataacaacaatttcaaaacgttacacttttttcttgttaaaagatttatcaaaatattcaactaaaaacaagattccaaaataaaacttatgaggtaaagaagagacaaaatgtataatatattacctggtagctcccaaggttcacagcggttgagatcaacttcggaaatgtgaatgccggagagaccaccatggaagattttggaagctaagtagaaggtaatgagctcttcgtccgtcgggtgaaaccggaagccaggtggcaatcctctctcgttcctttcttctccggcgagttcgcttaacacatcttccaccgcaagcatcatcttttacttaatataactgaaaaagagactttttgttacactgaagagacaccagaaggaagaacaaagatagcaatgatacaaaaggtgatgggaagtataaccttattgtgtgcaagattatatatttatataccaaaatggcacataaatcgaagatataatagagatagagagagaaaatggagtgtgtatgtagaggtatgtgtatagatgtgtggattttgagtgtttgaggttagaggagcattgatgataaaggctgtgaaattcagggagcaggggcttctatttgccctcacctggggagtgagtctctttctatttttccctatgcaaataataattaaagtatatgacattctaaattgtaaaacaacttttcccgttttgtgtgtttatcactatactgctgctttagcaaaattcttatggtcttggagttttgattagactgggtgatgttaagttgtgatctttcgttaatgactactcgattggtcaatggatcatttacagtgttgtttttgtactttagctaactacaaatgtaatttatgataaatggtgttgacgttttggttttgggttttatgtcataatttttatctatttttcaacaaaagctgacatttttctcttgttagtttgaacaaaacgagagagagagctgtttaataaggatactgttttgggtgtatattagttgaaaaataccataatgcaaacatccatataatgttgagttttgcataaatacactattttacaaagaaaaccaaaactctagtgccctttatcatctctttaagatcattcttcccacgcaccaaataatgtgttttcaaggaaagtatcaatattacatttgatccagactagttgaactgatatcattaaagtttgagaggaaatatatatgcaatgcaaccgttatactaaagacactgataagaaggtaatctcatactccaagtcgatcgatttctcaaccaaaacaattgcagtcgcagttaaaagttttcagatttcaagaaatgtgaaacaaataatgtaatctaaaattgctacattttgtggttatcagcaaataaaattgactttaaagaagagaaaaggaaaagagtgtgcagtaaaaagatggcagaggtttatgcgtgcgggtgtaagcatatcattatacattcatgagtcagacctttttttcttttattttatacacattctcccctcagatatataccaattcctttcgatcgtttccttatttttcctttaaccactttctccaacggttaactcaattctgtgtattacactttgtttcttttgttggttcggttgattctatactcttcctcataataaaaaatggaatataaggttgtttgtgtttcggttttgacacatatttttactatcattttttcaaaaaaaaaaaaaacgaagcaaacatgttcggtttatagtaaaccaacaatacataaagcatgagtttcgtcaagtgtctcaacacaactatttaaaaaattattgtgagaaaaataattggaaacaaaaacttttaattcatattgtcgatattaaatgtttgacaaaaatgtaagataaaaattaaaatgaaacagtagaaagatagcaggtgtcggcggtggcacgtgtgtgtagaatgatacaaaagaatcaggtaaaaagataataaatgcaaacgtactacactatctatctatctcactaaatattaactgcccacacgatcttatgttaaatctcccaagtcattcttttaccctaacccctacacaaccctataatattcatttttaaatatatatatatatataagtattacacaaatagatttataaaaattaaaatctaatatttgaaacaaatgtttcatccaataattcaaaacctgctgtacttgcataggcttacctaagcctatccattattaaatgcttattatatatagtttctgtactatttacaatctaaattatttttcgtcaggggatctataatctttatagctctgataatatttctgtgactctctttttttatccttttcaaaattgttatttttttctatttcagtttaattattgcccaagtgataccatcggtctgctatatatattatagtgctgttcacctgcgtcacaaaacaatattattggcccctgtcaaagtatattttttttcatcctttaaaactaatctgtctgcgataataatatcattaaacttggcagaatatgtgtatctggtataataatttggaaatcttttgtactcgtacgtcatttcagtaacatgcactatttcagttatttattgatatagtaaaaattaaagttaatccagttaaggagcagaaacggtactggtctgtgtaaacagaactagtgtataaaataatagtccaatttgtttcagaattacagggctagtaatatacagtataatgtgacacttaaactttaagagattaggtgaaacaaaaatcactaaaatgaatatagatgactgtttgtcacatttcttttatagtatatacctgtatatgtcaatcaaatgacaaagagggtcccctattctcttgctcgtctttgtctgtttgtatttaaaatgtctgtatcaaagtccattttaaaaagcttttacaatattttattttagaaaaatgacaacaaaaataaagtttacctgtagagaaaataccaaaaacaatgagtaatatcaattataaatgttaaagttaaactgcaaaaatatatattacacatcgaaatagatattttagtttaaaaaatttcagaacacaagtggattgacccaccaatttttactgttttttttttttggaattcgactagatacaaactctaattaagtcaccctccatcactaacttataagaaaaattgcaataaaaaaaaaaaaggaaagaagaagaggaagaagaaggagaaggtggagaaacaataaatgaaggacgaagaggaaaggacaatggcagcaccgacctgctccaccagagaacgacctctcactcatttcccttcacaagctatcttttcttcctccaaattttgcttctttaatttctaccactttttttttttttttccaaatcattaaatgatcaaaatgtgaagcttgacttaatactataaattaatccctatattttccgtatcattatatgattgatagatcttacaaaatgtaataatcatttcatcattcgttttggggtagcaatcatagcctatatacaataatgttaagcgagtagtctgcttcgtagagtataaattttgtaatgttaagtgatgtaagtatatttatgaattatcttttggctaatgaataagtttggtccagcttatagtgataatatgatgcgagtatgaggttatggagattagtgttattacatttataagacgtccgtacagtggatggcaataaatgtgaaaggttttgaggatactgggacagacgaagccttcataaatatgggcgaaaagttgcatatttggggccgggggaccaataaaaccgtgcacatatatcatatagtattattgagtttctggataaagctttttcaaacttatgcttgtatagtttgtattgtatctctaattagtaattggcacgactatgcatattcatgtcacaaagatccaaaaggtgaaatatctaattgatgatcatggttgtgttttcagattttccccaaagttcttaacaatactttattttcctaaatatctagaattttatgtgaaattttcctactgttagtaacttttttcgtcgctataaaattcgtataataataaaaaaactcataaagatgcgactaaagaataaagttggttgttaaaagacggtatataaattctatatagaaaataacattagacaaaaaaacctttctattagctagatcttaagaatctcaaatcagtttcttctataatgaagttatatagtaaaaaaaaaggtactactaattcataatgagttatataaaggtggtattaaggacgatatggtaggttaatccataaatgtaactcgaatgtgagcatgtagagagagacagacgtatccggcgacggcgtaggttagagggagggaaaaggagtctttccacatttgttttattttgatgctctgttttctattttagttacattcctttctttgttactaaattatattcctgttagggaaactattaaattaacgtaagaagacttaattttattactcgtgtgttgaactacaaaagctttattactctgttcgtgtatccagtgccggtccaacatttttgagggccctattcgagattaattttttttcttcttttaaattactacttaaaatctcacataagtgttttttcctttaaacgacccatagttcaaaaatacaagaaacataaaacatcaaaagcaaacaaaaaataaaccaagaaatatagaaaacgttacataaatcataaatgataagtttcaagcacaagcttaagaacactaattggttaagaatttgcaattaaataacttatgaaatcctaaacaattgcagtctgcaacacttgctcggcaacttgcagacatagttgtttgagaattatgagagtgggtgatagactaacatgcatggctaaaatttttggtatatgtaaactcaaaatcaatctccacatatgaaaacaatattatatgaccttaataatcacatccacctttttttagtcacttattcctcacgaatcacaaaaaatctcttgtaaagtactccctagtaattaaaatggaatctgcaactaatgtaatgatttggaaagagttaatgtttctataaaagtctccctacttattgcagtttttactcagctttattgattaattaaaattaaattgactaaaaaaggtttaaaatttcaagaccctaagccgtcgcttatgtggcttatgccacgggccggccctgcgtgtatctatttttctttctttctatatgggcccaaatgggcttaagtgaagaattcttgcaaaggtaaggatcatagtgaagagttcttgcaaatatatgcacggaatcaaaaatttatgtaaacatgagactgagagaaaacaaaaacaaaaaagaaactttagtatcaacaatcaaaaacccaaggaccatttagagttaattagagagtaataaatcaaagcacgattgcttttgtcgtgatcttgaaattagtattgtctccgaagtaactcattcgcaggagacgaccctgctgacgtggaaacaatctcgtcttcgttctcttctaacgatcttcccatagtttcacgcgtgaacaaatacgttacgatcattcccgcgatacaaacgccgccaaggatcaaaaacgcgattctcacacgtttcacatctggaaaaccgtcctcttcatggtgtctcgtggcccacaagaaaccgacagtgccaacaatcgcaccaaacttccctgcagctccagatatcccgtgacacgtggacctaaacctagccggaaaaagctccgccgggatgataaacgtcgtcgtgttagggccaaagttgctaaagaagaaaatcaatccgtagagaaccataaagcctttattagtcttctcatgcttagaccaataccaactatacggaatcccagcgactaagtaaacgaccgccataaggaaaaaccccatcatctgaatcttgactctaccgattttatcgatgaaatagaccgtgaaccagtaaccagggatggtggagcaagcggctacaatggctgcaagcttagctacttcaaaggcagagtcgtagacgtttgtggagttgaggggtttgttggagaagttaaagatttgagagagaaggagattgcttgtatagaagacgacgtccactaggaaccaattggctgaggctgcgaagaggtctcgaccgtggagactgaggaaacggcgagagaagagtttgtatgaggaagaagacggtggttgttctagctccgatgatgaatcttcggttatttgagatatcattgatacggacatgactctttgcatgtcttttgctgcttggactacattgttctcaaccaatgctgtgtatctgcatgaattgtcataaaatgtagtagttatcatatttaagttttgtaggaaggttcaaatatttataattttgtaaaaaatatgtaacaatagctgtagttggttgacattagatgtgagatttctaacaaattagctacttaaaacaattttttctgccaaattaggtttttttgtcaacatagataaggtttattattagtgagagatgtcactgctaacaattagtcataataagtcataactcatacaatacacggaatgtaaaaattccaatctcttaagactttttcgtatgaagttagagcattaaactaaagtgggagaacttgttaggaagagagtacgtggttatttataataatgaaataaaactctgttagttagctggagtttatatctgggaggaataattaatacaggaaaacataccagaactatatattatacatataaaaagaaatactattgaaatatgttatcaaaagaggtagcatagaaaggtatatgccactgtgtttggtatatctccctcccaactcacaagtcaacgtacttcctagtaacaaaccacgaagttgccactctttacattatcgctcacatatattattttatgtttatcatctgatcaacatcagatcgaatttatgttaaatttcaggttctccaacattgtttcgtacggagacgtatgagtagaacttttgttttgcacacgactaaactttttagtgatttaatttataatttctacattgaatagctaacaaagtcacgcaagatatacataaaataagggtttatatacagaaaagtttgaatggtgatgacaagtaataactattgttgtggattaatatgctctaacgatctagtttgcgatagaagcaatccatggtgaaaatgcttaccgtttcaaatctcaatatttttaatcttggaaaatatttctaaaaacaaaattttaggagagagttatttaatagtctagaaattttccaaggtttgtatgtgggatgatatgaagcaaagtcacacaagatatagtgcatatatatatatatatatgtatatataattatagtctatacaatggtaatattaaagatttaaaggataaaaattggtgaacaaaaagacaaaaagaaatacgaacctggcggtttcaggcatgagcattcgccagtaaaacgttaacgcggcgggaagagctccgatcataagaatcaacctccacgctatatccgattccggcggagccaaagtctctaaccccgccacgttcgtcttctccgaactcccctctccagcgttcttgaacgccaagcacacaaccatagtcacagcagagctcatcaaaatccctaacccttgcatcgagaacacggcagcgataaaagctccacgcgtccttttgttagcaaactccgacataatcgtggccgaaagaggataatctccaccgattccaagtccaagaacgaatctaaagaatccaagactaaccataacacaagaacgtcgagtcgtgcaaacagagaagccacaaccaaaggagctaaacaccatgatcaagagactaagtccatagactttacgacgtccgactcggtcacctaagtaaccaaagatgagctgacctaacgcggtgccaagaagagcgattgcgtaagaagttgagagaagagcggttccgattgagtctttgtggtaatatatttgacttatcattttcatgatcggagctatacagaaaagatcgtatgcgtcggtgaaaagtcccattccggcgactattatcgctttgaaatggtaccactgtatcctcgctgcgtctaacgccgataataaacttaactccggcatcgtttcgtcgattttttaagaattttttcaagatacggagaatgagaacaatagaagtctttgtatttttcatttgaatgtgtttttggagattttttcttattggagacaaatatggaatatgctttggtttgactgtgaggaacacaacacctccctggatcgagtccacttctttagttgactttgacaactttatttataaaatttggattataagttttaaatttccctctttggtacaaagagttttagttgtaagatgtgattgccaaaatcttggttaaaacagttccgtttcacatcaaggtgctttttttcagagtctaagaacatcttaaggaaccggatcattggacatggttctacacaaaagaaactagaacattcttgagtctctaacctctgctaaatccgaccaaagacttacaggtcggccactgcaactaaatgctgattaagcatggaggatatcgtggttgaatgaaaaccggaactatgaagttgggatgcgcactccgagcttgactacgacgacttcaaagatcccatcagatctaaaattaggagaaaacaagcgaggatccacttgtcccggaagattaaacgtgattgagaatggaccaggcggacagagctgttgcacttgcattctgtataagcatcccgtgtcacttggaatcgcaatctcaggtataactccttggatgcaaactctcccctccctctgaatttcacatttgatcttatctattaacagaacagaagatagcattttgggtcaaagttgctttcatacacggatagcgtaaaagaaagcagctttcttttcacgtcattggtcattatctaacccaaaacatgaggaatccattccggtattaacaggttgttattttcattatccaacaacaggacataaggagaaaagaaatgtgaaggcttaccttgatttttctcaatgccaggaagagagactcggaagatgtaagcaacttcgctgacgccaatatcaacaagaccaatgggtggcccaacagagcctagcttagcagtaccagtgcagaatacatgtgagatcactttcgagtgagtagtagtagtctgattattctcagcgttcatctttgtgtttctgtttttttcacaagagatagaatccaaacctacctgttaataatatcacaattaagaaagcaaaagaagaagacaacaatcaaatcacaagcacaagtcaagtttgaagatgtaaaagcaaagagacctataagatttttctatacaaacagagcaaaggttaaaactttatgagtaaaaggatctaatctctctgaaggaagattccaagaacatcaaattgaaagtacaagggaagaaacaaactaagctagatcatgaccaaattcttaattttgatgaacaaaagttctgaaactcgaatcgtttgagctagatttctcaaatgatttgagaaactaaatgtggaagatgagtttcatagtacgaatcagtcgaaatcatttgaaatctaagctcaatcaggtttatgaaattagttcttctttgcattcaaaaccctagaataagtggcgatgaagcgataattttcgtcttcctagggttaaagaaacagattcgtaggaaaatggagttaaaggagacagaggagacccaaaacagaaaaaaaaaaactaatttcgattccacaatgccgaaacccagaaaaattctcaaaacgaagtcactcaagaagataatcaacaaagcgaaaacggagaagggtttgggtttaaggtaccgtaacgaactccggtaagttccgatgatggtgttgacagcgaagcttcgtggaacagcgtgaccgtcgttactcactggatttgccggtgaatttgatgagtcaaaaatataactagcagctggtcaaagtaaccactctgaataagacacgtgtcagaaactttgttgaccattctgactaaagaaaccttgtaaccaaaaacatccacatttttacatgctctgtcatatttcaactgtatactaaagttgaaatatgactatggtaacttatgtttttttagttgaaaactaaggtaaactattctatgccagcaggtaaaagatgtggatgaccaactactgctggcataatttattctatgactaaggtaaaactaaaagttaatatcactcgaaatatttacaaaagtattagataaagtactaaaaattttaagttagaaatgatgaaattaaaagatatatgtggcttatttaggaaaatagatacttttaatatgatggttgggtagttttattattgtttgggattgaaaaaaactatgaaagtgtctccaagtacagtaatatttaacaactaactaggaaggtgtacattgttcagtattcatcattctaattaatacaaataattttaaaaatttggggtcgtcaattgctcaaagatattcattattttataattttctacattttatcaaaaacagaattgtgtaaatgttgtgtcattatgtgtcgacttggatgtatgcattacataattttattttatatatgtttttaattgttagagcatttattcgaaaattataaatattgaattttaatcctcagtcacttaataaaaacattattttaggactaaaaaataataaaagttgaaacagcaaagtagcgatagatttcgtgaaaacagagaagcggacatatcttgaaacacatggcagcgatttctccatggttatcttctcctcagagcttttcgaatccccgcgttaccattacaggtcctctcaatctctctcactctcacagtcttcactgattcatcgtagtttacaaaattcatattcttggagctaattctttccagattccagaagatgttcatcaatttctgcggcaatctctgttcttgacagctccaacgaggaacaacatcgaatttcgtaaagtctatcaatgtcccagtgaaattcactacctttctttatctgggtttgttctgaatctgttaaagtaaacaggtctagagatcatgttgggatgaagagaagagacgtcatgttacagatagcttcctctgttttcttccttccattggccatttcacctgcatttgcagagacaagtattgttgattctatgtgtttttgatgatattgattccttgagaatttctaataacaacttcttttgaatctcagatgcatcagaagctttccgtgtgtacacagatgaaacgaacaaattcgagatatcaatcccacaaggtaatctaatcaaactctgttttcagatacttatgatagtggcgaaatcattatgagtgatgaatgaatttgatctgcattcacataaagattggcaagtcgggcaagcagaacctaatggattcaagtcaatcacagctttttacccacaagaaacttcaacttccaatggtaaaatttatcaaaatttgtttctttttgtttactctctggatcagacagaagtcatgagctaaccgataggtgatgtatatggatcgtctcagtgagtatagcgatcactggactaggtccagacttcaccaggatggaatcattcggaaaggtcgaagctttcgccgaaacattggttagtctctctacatgcaattgaaacaaacaaacaaactctctgcaaaaagatttccttacaaatgtcaacatgacatttatgtataggtcagtggattggatagaagctggcaaaaaccagtaggagtgactgcaaagctaatcgatagcagagcttctaagggtaaatacaaaaatctcaactcaatgagaatctctgcagtatcttggcattgtttcgttgacacaatctatgatcaggattctattacatcgagtacaccttacaaaaccctggagaagctcgcaagcatttgtactctgcaattggaatggcaacaaacggatggtacaaccgtttatacactgtcacaggacaggtaactctagtctattgccacaataacctatcttattagtatcttatgtctaacacaacgactctcttttgggtattacagtttacagatgaagaatctgctgaacaaagctctaagatccagaaggtagacatacgacactacaacaataaaatagatcaccaaaacctgttgcttatgacctttttctttgtttttgcagacagtcaagtctttcagattcatctgagaatgtcattcatatctatcagcggaactaaattatagaattgatcaaacaatttgtttactgaacaattacttttttgcaatgaaattctgagaaaagagcctactccatactttgaagtaagcttcagtaaacaatcccagtgtgttcagatggaagaagagagaaccctaaatatgcacaatcacagaaaaggacatgatgaacatgttttacttacaatgcaggacttaaagacaaaggctatatacctatcaatgttactcactacactcctgcacctgaaggaagtgtagtggtattacgacttcagacttgaaaagaatcagattttgattctaccatatgtatatgcttgtgtatgtgtgtataaatatatgcatattgtacaccaacttattactactggtcttcccctccaagggaaaccagctatggtgccttcaaactcaacccaagctcgagccagcagcttttttgtggctgtgttttatacacattgatggatgggtaagaaaacggaagcataaaccctgacactccaatttcctttgctttttttttttccttctgcgctgcgccttcccagtgagcaagactattttacataacctatacagcaataagatcccaaggttaacgagatcaacgcattacgatgatgaccatcctctgttttgcttttacaataacgccgaataagaaacgcataccttaaggatgcaagataaataacgtgcaagacttaataaaacaggaagcctcttctgcaacacctccagtagcagtttcactaacttaacttccttttctcttcagtcttcaagaataactgaaaccattagtatcatattagcagtggaacaaagacaaatgtgcataattcatcactactacacccaaagtaaagaaagcgttgtattgattctcaccttgttgtttggtcagaagcggtactctgcataaattgaggggagtggacaatgatatgcgactgtacgggagcagggcctggtatacctgacaaacataattcaaaggagacataactaatagcatctaaaccattagtagccgagacatttgagataacagtcagagaataacattatggtgcgtaagacagtaaaatgtacctgaagggtaaggagcttgaagagcaggcatagatgaagtggtcatcgtactgacagtgggtccaccaagctgcagaatatggcttcctggaaccgaatagccttgaactgctgtataaccatggccattaggaatagtctgacttagttgcccgtattgataaacgggtgaattcactgctccaggtactccatagacctgaaggtattgctgacccatgtatggactatataaaccctagaccatgaaacaagaaaagacatagccaaagttagaagagagtttaatgacgaagagaaataatagcaagtgttcatagccattgtcaacctgtgattgcgagtacatgtactcgggtccataagcggttactctgagatagaaaataaaaacaaacattagacacttgcgcaaagacatcagtgtgtactgtgtgatataagaattgcaagactttacccataaggatagacaactccttgctggtagttatatggaagtggttgctgatacggataatttccaataagtgaacctcgaggaccctgcacatttccaatgtacggggaagcaggtcttaagcgtcctatccacacaaagaaacccaccaatacactaaattacgagtattctacaacaacatagaatattaaaccagagttaagccagtctaaataagactgaccaggcatgttaggtatcactgcatagggcaatggaggccgaggtctcccaagggaagcaagattacagtttgcacgtctaccgtctataatcggagtagggtcagcacaagctctcctagcagcttctggatctcggaatgtcacctataaatcctccatatgaaatagaaacagagcactgaatcattcacaaaacaactgcaacagaattaccccaaaattaatgactttctttgttctgtgattaattcacacgatccataagtgttatatgacactagattgtaattgtatctccaaagcaacaattagcatctctatcagacattgaagagaaacaaagattgaaggagaagagaggactcacaaagccatatcctttggatcgaccagtgttcttatcagcaatgacaacagcttcaaggatttcaccgtactgttcgaaatgctggcgaagagtttcactttgagtttcccaagcaagaccaccgacgaacacctttgtgaaagttgtatcaccgaaaggagagttcaagtagtgaaacccagaacccggaacaggctgatacgccatgattgagtgagaaagagaagaagaagaaaaattgaaactttatgccaaagacagaaagaaaagaggatgaattatgaacaaggatcaattgatgatgataaaggtaaccgagtaaaccctagcaatgattaagaccagtgatgaaaccaattgaatgagaagcggagattctagggtttactcggttgtgtgaaatttgagatggagaggaagtgagaaaaagtgagatttgggggaaacaaaaaaaaaactaaaagatcattccctactaataatgacgaaaggtaaagagatcaaatttcccggaaaaaaaaaggaaaagcaaaagcagtgtgggtttaaggatgggccacagagaagagaagaagaagaagaagtcggtgggtgaattagtttttttgtactgtgaatgatcacaagaaattataaacaacaactaagctacagggtcgaattcgaaacttttctgagtaagaaatctatagaagaaaacttgaagcaaaagttaattaaaaacctaaaaaaaattagaagaaggaaaaaagatgaaacgatttttagggtgaagggtggtttggtttggggaattccattgatggtgatgatgaagaagttggtgatgacgatgaagatgatgatgattatgatggtgcgtgatttgttgaagatgaagagagagagaaagagatacttttgtttctggccattgtaaatgacgtgggacccatatatttatacctctaattctgtaattaacgtcgtaatcatcgatctttttgttttgtctgaatcaaatctatccgttgtagtaacgttacacaaataatgtaaaaaactgaaatcaaactttgttgattattttatccttagaattgaaattgtataatgactaatgagacaaagaaaaatctactcatggaagcaatttgccgtcattaacgaattcggacggtgtagattaagcctcgtcctcggaaaatcccaaataaatggctaggggttcatgagctcgtgactcatttaaccccacaagtccacattgtggtctaaatgtcaatgttattaagaaaccgtaactaatgactaatcatatctactagactacaaaactaacaacgacaattaaatttgtatatctctactagactacaaagcttgtataacgacatttaaattggttttcattttgccgcggactatggacactttagtctagtggtcggattcaaaaccagttttgttttgtgaaaaagaaaccgtgagaatctgacatgttccatcaaattattcatgttggtgaaagtgacaaataactgactgttacaaagaacaacactaatatgatagtaatagataatggatttgagaatgaaatgattctaacaaaaaccactttatttcaggagtgataaaagtgaagaaacagtcactgtgacgactctgtaagcttatgcctttggaagatcaccagctgcttcaaagctcacaacagaatcatcaatggtttcttctaatggcctaaacttccaccccaagtttttcaacttctctgcacttagaggcctcacttccttctcttttacctccgtgaaactgccaataaacattccatcagatcagaccgaaatctcaaagtttgaaatcaagcgtttgttcttactcttcttacctttcagggaagttgcgtttaggatacatattcttgagcttctccataagagaatcagtgtaaagtgaatgagaattacatatgtatcttcctgttgcttctcgattttcatacaccaacaaaagcgcatccgcaacatcacgcacatccacaagatacagttcatcgctcaacaaggactttataccacctaagaagagacacaccaattcatcaaattatcaagaatgaatcaatcacttaaccaaaatatgcaataggaggtaagagaacacacattatatgtttacatcaccttttatgaacttgagaagtcccaaactactagagttaagcgtggattgaagcctagggcctataatgacagacggacagagcgtaacaacatcagcaaagtttctcttactccactctaaagcttcacgttccgttaatgttttggcaagatagtaataacgccaataaccctgagatcctcagattttttgcatcacattaaacactcaattctattactgtcttggtgtatatgtataacacagagacaactgaccaacatggtagcttcaaagatacaatattacctcaagtgagtgaaggtattgagtgtctgaccaacaatcctcgtccttagcaacatcttgaggccattttggattgtaaacaactgcagcgattgatgatacaaccacaactttctgcactttggtttctgtgcatgcttctagaacattcttggtgccagtgagagctggtttaatcagttcttcctgaatgttttaaagactttgttagtgattcaagaaacaaacaaaagaagaatctatgtaagaacttgcctctgtgagaggaactccttcaaaaggcacaggagaagcgatatggaaaacgccagagcaaccatcaatggctgagaaaagaccttcatcatcaaacaaatctgccttgaaaagtttcagattttttgaagcattatccagtttcctcaaatggtcattcttttcatcacctgagaacaatgggatcaatgcatgcaactttttcaaactcaagaaacagagaatattcaaaagttcacaaaaaagagaggatttgttttctatcttatcccttacaaggatctcgaacggttccatggacagtgtagccacgagagagaagaaacttgacgagccatgaagcaataaaccctcctgcaccagtaacacagaccttttgctttacagccattggcgtctctctctttagcaacttaataggatgctctttggagtgaacgaaagagaacacagatctcaaagtatttatacacaagtctcatctgattttaacaactcatctttaacttaaatagcgtataaatttgagggaattaagcttggataaagattgcaagttcagattttacagacattgaaatatttcatgaatttttatatcgaaggaaattaaagaaaagaaattcaagttttgttaagcaattcataagatttgtttgtttttttttttttttttcctgatcttaattcatatatcatgtactcaagaaaactcttatcatgcacatagcataagtcactgtcacagcctaattagaactttcttagaaatcgatctacaatgatttccacatgtgaattttacacaagtgaagaaaaatatgaaggatacagagaaagaactttgaatttttatcatgaacaatagtctaacacagtcacacttttttctcacacgctattgggcagaaaagtctcgaatgttaaaagaaacataagaagaaaagacaatgttggattgtgcaagaacagattcagagtatcggagtaaatcaacagcaagacagatttaaagtgaatttaaaagaaagatttagacaactagagctttgtcagtttgtactaaaattggagttttcttcttaacctaaaaattaaaaacaaaagaacactagatatgataaaaatgatgaatagataatggacaagacatatagcagtaagaaacatgtatgacctcaagaatctttcccatggctgcgatgagaagaacgtaaaccttgatcttttgtaagaagagacgatggtaaagatcgaggaactatgaacgacaccacgagacacaaagctactaacagaaccactgaccagcttgaataaggtatccccatgagttgttcttcacaaactgtttttgttaccaaatgttttttagacttagaagtaggcacaaagatgaaaaagaaggatagataatgtatacttgcctatgttgtaaatgataaaatatctttctctagaatttggtattgccacaatcccctcgggttccaaggtcaccaaaacattcaatccagcctaaaacagattaaaaactcaggaaattaaacgaagctatactcttgagttttgatgatggcaataccttattgttaacttctttgagactttctgccttgaagatcagcttctcagtgtttagtaatctcctcatttggtttagcttcaattccatttcatggttctttagtagttgcagcgagacccgagctggtatctgttaaaagcaaagaacaataacatattacgattcaacagcacaaaatctttgaaaagaaaatagattaaaagaagcaaaaaacagagtttttacacacagaagcagggtatgatatcttcacttcataccaggaattcgacttcagtccttgtaacttgtaaacgcgagaacccgattgcaatggcagagtttctctccacagttccttcccaacatataaagctttcacatcaaacctaacaacaaaacaagaatcacacaataacttagtctcagcttgtggggagacaaaaaaaatcacaattgaagattgagaaagtttcaagaacactaacatgttatcgtggcagagacaaggcaaaccatttaccaagactacaagacataatagtaagtagcagagtgtcctgtttaatggaaaatacgattcttttctgattccaatcttgtaatcagcaaccctgaaatcgtagattccaacaagtacaatcgattttaggctccacagtaccttacaccaatgagaaccaaagcaaactaagatacagattctttaattacgtcgtacgagaaaacatcctagtggacagacaggaccacattattgcttagaccttggccctaatgaaacctgttattcagtagctgtttcaaaattagatccaacatatcatcaagcttatcgacatagcccggtttagcctaatttggttacttgaaacttttttttttttttttttaacttgaaacttttatcttctaaacatttttcatttttttttaataaataaaatgaaggatttgtgcgtttgtgtgaaggaatctgaaaacataaaaccaaaagaatataattggaggagcaattcaatcaatcaatgggttttttaatagttaatttacttaaggggaggtaggttttatttgtctgcttacttcgagtaaggtcgagatccaccagaacgtgacaatgtgacttccactgcttcaggacaaatcaaatatgaacctacgtcacaaaattactattataacaatttatccttatttattctttcttacgactatcttgtcttttgctatcatttacatttgtaaaaaacatcgtgatattattatttactagtatataatatcaaacttttcacgtttaataaaaattattaatttgaaattattcatttttgaatttgattgatatagttgacgaaaaagagttgttagtgtaggaagtttgtccggatatgcaattttttttttgtaacgtgtatcatctcgttaagaactcatatgtattatatgaacaaaatcaatcatgtatattaaaaatggtttgccctaaagatattctatgtttttttcgtgaataggtgttaaggatattaaacaaaaatacccttatttattcttacgactatcttgtgtctatagcactctagcttctacgttggtatcatttatattttaaaaagattttgtgatattattatttactggtataaattttaaaatttctcacgtttaataaaactaaacatattaataatttaaaattattttacttttgatttttattgatatggttgacgaaaaagagtgattagtaatggaagtttgtctggatatgcatttttttttcttcgtaacgtgtatctcgttataagaactcatatgtattatatgagccaaatcaaatcgtgtgtattaaaattggttgccctaagaaaattcaatgtttctttcgtgaaagaaagtctattttttttatagatttgattctcttcttgggatttccacattaaaattattatcttagaggctcagtttgatacatacactatattttttatatattgttcaacgtatagtgactgaatggtagttgtttaaaaggattgtgtaaacgagttggatagccaaaactatgttaacttgatccttgtaaagtaaacaaagccatgcatcctctaattcaacaatttggtcccattaccccaagaaaatgttataaagaggttatctttatcaattacttgtaaacaggacattatctttataaagaaaatgatatacatgctgcatttttttggtttggtagttttacatgctgcattttgtacttgcaaccacttctatactaattgttttagataagatagtaccttcttgtttgatcacatcgtaaaaggatcggatatgttaaccgtctttttccaaacgttatatactcttcaacactcatcataatgtatggagatgtatcaagtatctcttacgaccattggtctttgcggcctaatttgcaacagaaagtcagaaatatccatactataactatgctatttgaaaattattcattttgactcatatataaagtagagttaattaggtgtatagccaaattatggatgaaaattagacaaatgatcatgacattcttttttcttaatttcccaaaagaattgtaatatcagaagggaaaaatacattccacacatagttagaacttagaagaggtccaatcaataggcggtaaaaattaatttgtaacggtaaacaaaaacgataaaggataatagtacaaactaattggcaattaatactgtttttggtcaaatatatatgtcacgacagtagatgaaaataccgtttttggttgaatcgttttattttttactttgtcttgaatcttgtctactcttcaataccgtttttcgttgaatcattcaaaaaaaaacagatctcctagtgatatgaatcaaagtttatcaataaaaatcttagtatacatttgcaaaccataacttcataattttgaataaacgataatgtaagacaggttggctcattagaaagcatatcaaattaattgtaaggacacaaatatctataattaatgcaggcttttatgaatcaatcatcatcattcacatcctcgtataattgtctaatttcgtacctcaaaaaaaaaacaacaacgtgaaaacctaaaattagatgagttacgaaaattaggcaaaaataaataaactaaatcatagtattacaaaacaaaatgaaaacgaaaaaatgaagaaaaagcaagctggtccccaacagacatgcgagttcgtctcctataaaactttgttaatctctccttcacacttatcacgccacctcaccacctctctcctctctcctctctctcccccctggagagattattcattccctccaatggatctccgtcggaggcctcctaaaccaccggttaccaacaacaacaactccaacggatctttccgttcttatcagcctcgcacttccgatgacgatcatcgtcgccgggctacaacaattgctcctccaccgaaagcatccgacgcgcttcctcttccgttatatctcacaaacgccgttttcttcacgctcttcttctccgtcgcgtattacctcctccaccggtggcgtgacaagatccgttacaatacgcctcttcacgtcgtcactatcacagaactcggcgccattattgctctcatcgcttcgtttatctatctcctagggttttttggtattgactttgttcagtcatttatctcacgtgcctctggtgatgcttgggatctcgccgatacgatcgatgatgatgaccaccgccttgtcacgtgctctccaccgactccgatcgtttccgttgctaaattacctaatccggaacctattgttaccgaatcgcttcctgaggaagacgaggagattgtgaaatcggttatcgacggagttattccatcgtactcgcttgaatctcgtctcggtgattgcaaaagagcggcgtcgattcgtcgtgaggcgttgcagagagtcaccgggagatcgattgaagggttaccgttggatggatttgattatgaatcgattttggggcaatgctgtgagatgcctgttggatacattcagattcctgttgggattgctggtccattgttgcttgatggttatgagtactctgttcctatggctacaaccgaaggttgtttggttgctagcactaacagaggctgcaaggctatgtttatctctggtggcgccaccagtaccgttcttaaggacggtatgacccgagcacctgttgttcggttcgcttcggcgagacgagcttcggagcttaagtttttcttggagaatccagagaactttgatactttggcagtagtcttcaacaggttcatctttttaaccaatattttcccgttggatttgattttgttgacttttgatttaagatatatttcccagtgaggagacttgttcaactaaatttgataggaagcttttacatcaagtttgtgttgaaaatttgcattgaaagtatttgtgaagtgttttgatttaagatggagaattttgcaaggggattttactgaagaagagtgaatttttggatgcaggtcgagtagatttgcaagactgcaaagtgttaaatgcacaatcgcggggaagaatgcttatgtaaggttctgttgtagtactggtgatgctatggggatgaatatggtttctaaaggtgtgcagaatgttcttgagtatcttaccgatgatttccctgacatggatgtgattggaatctctggttagtttccttctttgtgtgattgatctgatttaaaaacttccctatatcaagcttagtgtcatcttgagacttaaaactctagttgatatttttgatgctatcttgtgaaattctgagaaccgcacagttgctaatatattcttatcataattcttcaggtaacttctgttcggacaagaaacctgctgctgtgaactggattgagggacgtggtaaatcagttgtttgcgaggctgtaatcagaggagagatcgtgaacaaggtcttgaaaacgagcgtggctgctttagtcgagctcaacatgctcaagaacctagctggctctgctgttgcaggctctctaggtggattcaacgctcatgccagtaacatagtgtctgctgtattcatagctactggccaagatccagctcaaaacgtggagagttctcaatgcatcaccatgatggaagctattaatgacggcaaagatatccatatctcagtcactatgccatctatcgaggtagttgatcaaacctctttctctgagctcacttataaagtttctgaattcaagagatcttgattatggtttttgggtttggatttatcaggtggggacagtgggaggaggaacacagcttgcatctcaatcagcgtgtttaaacctgctcggagttaaaggagcaagcacagagtcgccgggaatgaacgcaaggaggctagcgacgatcgtagccggagcagttttagctggagagttatctttaatgtcagcaattgcagctggacagcttgtgagaagtcacatgaaatacaatagatccagccgagacatctctggagcaacgacaacgacaacaacaacaacatgatctgaatctgaatcatcatcctctcaaagaaggacaacaatccaaaacaagggcaggctttttacaacgcattcactcaaaactcgctggtggacagattttagccatgtgcgtatgcgtttgcccttttgttaaataaaaaaactatttgttttgtttgtttgacttgatatctttttttgggattgaggattgagagagatagagagattttacaaactttctctctttctctctttctctctttctcatggataattcgtgtctctttgatttgtctaaggtttgtctttgtttgttaggaagtggtctatatgaacgaaaaatttgtgtatggtgcagttgcgtttggggacatttttgagattttttctctgttttgtttcctctcttcgtttttattgtttgttacatataaaatatttctctgtatgttggaacatctctctctctttagttgttgttggtaaaagatacggatcttctttcctccagaagaatccatctatataatattaccatctatgtgttctactagacttggactatattttaatggaaaagagaaaaaaacaaatcttttgttcactaggtcaagtgatcaatagctttcgagacttatatgtttgcatgattgggattcaaattacagaattatatatattatatactggtcttcagtttgttagaaatctcacattgaaaatgaaattcaaaccaaaccaacacttatatatggagtataagaaacgggctaactcatttactaatattttttttttctaacaacaaataaaaatctctttggacttgaatcctcgaaaacaattcacaataaacaaaaattttctatcgacttgtagactttgaatcggtttactccaacttcaattgctaaaatatcgacacatatgtagatgtccattgtccgatgatgtttataattttgacaaaactcgagtcgaaaaagtagttttttttatcagaatttgtacagtgttttgttgtgttagagtcgttgttctattaaaaaaaaaaacaaagaaaaaaaaactctattagtttgtgtttcttgacactaaacttgatgtaacaaacattccaatcaattgtagttagacactactcactagtgaaaagtgtttccactttgggatggataaaccagagttggtagattcttaacaagttttcattcagtattcccctatgtttcattttaaatggtgtttatcaaatgcagacaaaacatctatcaaattgaattgagactcagcccatttgttattgggctattcttaagctgtacttacacaaaatctccaaataaactgttaacagtaattttaaatttcatgggccacaaacgctgttttgttcacgtcatcctgtcgaaattttttcttattcacgtgggtgggtctctacttgggcccaaatcctcgacaataactcacaaagtccataaaggttaggaaacatgtgggcgtttatcttctcgagccttttttggtaattcgcgcccattgtgatattgtatagttcgtaattcaaaatgtcatcttctttttcaataacaaggtaactctaaccgaagtacaaactaagttcagaatccatagtacagcccatcgagcattttcaccatttaatgtatgcaaattatctacttatgattgaaatcccattgaaaagatttgaactctactccttcaacttacataacgaatttggtaccaacaaaatgtaagtgatcattgtcattttgaggctagttctttacaacagaatatgtgtaaacccgtatctgtatttattcggtgttttttctagtttacttcatcgttcataaaggtacttgttcaaatctgaatgactaagacatattaaaacaaagaaagaaagaaaagatatgctcataatacatttggaaaagcactaaaattcgaatggactttagttttggttttgtcgactttttcggcattaaaggtcataatataataatgaaaagacatgataattggtggatggggttaccgggttatagtggcagataactagtcgccaaagatttatgaaaatgaggaaaggtattgttaaaatgttgacccgtaatataatcatctttttttcttcttttactaattaactttttgttaaagttatagtatatcataaaattcaatgattttgaattatgatcatcttcgtttgtcagcaatttaaaatgatttgtgataactaattacattattagtcgctccacaggattgttggcaaataattacattagtccataacccattaatttaaccatataacttttgtttttgattattctttaactttataaaacatttactatgcagattacataatttacattcatatatttggtttatatatacatacatacattgtgaagctaatagccgtagaattcaagttttggattcatcccctcttggccaaacatttttctttttttgataaagaccgaacttccatcttgtaataagaacaacaatacatggaccgacgacgagagtatttatgtacggtcccgagatgatctcagttcaaaatctaatcaatcgttatgtgccacgtcgaaagtaaggatggaaaggaattcaatttttgtatgggtgataattcctagtactttactaatcactactaacagatgcaatgcattatgctacttgaggttcaatccaacgactataatagattcggaggtcacatgtttggtttcaattgtatattaataaaatactatatattattcatgatttggtcacaaatgtgttgtagtccagtgatgtagctaggttgatgatacttttgtatgaaactatatatggtggagaactggagatcatgtattacgattcactaatctctaaaaccactgaatatgacactaatagaattttattgtagtttggtagattcgaccaatatagttatggtctcgattctcaatcagttaattcagacttaaatcctgtttttactattataatagaacttgatgatatattggtatgtcgtgtatcatgttataaccatgtagtcaatcattttcaagaaaaacaaaacattaataaataatagatacagacccgccaattgtactaaaaaatattatggcccatattcaaaacctaaaataaaaataaaataaaaaatttatcagcgccgatccagattagaaagaactcaacttccgtaggtgtcttaacaaaacttatgattaaaaaaaaacgtaatggaattttgatggttaggatatgagaaattaaattatataaatatgtgaaaaacgtaactcgaggtattaaatacctttgtgtggtaagatagattgggggaaacctccacgtggaacaagtaccgatgcttccgaccacctccacgtggtaacaacagctcagcttctgctctgacattttgaccgcacgtgacttttgctccgtgcacgtgtgtatcaagcagactgtgcgattgcatcgtcacgtcatgaatcgtccgattgtcaccggtcatgtaaatgaacggttctgattgagactacttggttaagtgaggcacatgcatccacgttaaagagactgcttcaaaggtaactaaatccgcacatctttacaatttctccttttcgttccaacaagatccacacttcatttctacatctagatagatcaacttatatcgaaagtttttttctaatgcatcatttgtccacaaatatatgatatatcattccattgtaatatatactatgatcaaaataaaaatatctcaatcgaaagtgctaaactcattttcaattcttattgtttgtccgtctgcatattttataagctttcacatgaatcctttcgtgcaaactgtaaataattaaaatactaacctgtttagatcatcgaataatgcgtgcacacaaatggatttagatatgcacatacttataccttacatacacattagacaaccataagatgatcgtaaaataaaaaattaatacactaaaatattcatttagtatcctaagaaaatagttatcgttgattattcgttcttatcgtctaaattattcttacttatgtccgacccccttctagctggtacagtaaaagtggataattaatactaatacctatcaaacaagtggggaaactttggtaagaatttcaatttctttaatatatatagcttggtactaccaagatcaagtagtagcatagaggagggaatatgtgtgcgaattaatattaaatgctgttaattaattaaccaactaatgtatggttaaataattaaaagtattctaaacgttgaaagcaattatgtataacaatagttttctaaatatagttcatattcaacgtttgaaagaatgaacatattagctcaaatctgttaaaataagtggtgttctaaacacgagagttcgattacaaaactaatgaatctcgatcattattttcttctatgttagaatactgaaaagacatttaatttgcaatacattatcgcatagtgtaataaatgttaagttccacctcttagcaaaagactgagagaggaggtccaatgaacatcgttgacaggaaaaaaagagaaaaaaaaaacgtcttaattttttctatacttgataaaatttaaaagacatttagattataattattaacatactaaaaatgtgtttcataaattgcaaaaaaagcaaagaatggtttgactcatatttatatgtaagaaataacctttgagttgaaaagaatacacaaaataacttagaaccaaatagtacttgtcggttacagaaattttggcaatatttagtctattttagcctttctctttcttcttccttcttttatttctttttcatgttctttacgagactttagccatagagttctctttctcttttcatctttaacacaattcatcttcttcagattcaccatgtcattttctttttctatttctctctccctctcctaaaataatcttcaccacctctcataaaatatatcatcatatctctttatttttgttcacccacatgttctctctttctttttccatagaaatctctctatctctcattctttattttctctttttacctgaattctccgtcaatgtcgttgtgatataagagattaaatttgattttaaaacaaatatctgattttaaaatgcatgtattttaagaacaaaacatgttattaacactaatatattaatatttgtcatgctatccaacaaaaactcatgaaataaataaatatttgtcatgttatccaataaaaacccatgtaatattgtaattttttaaatttcgcaatctataagagaattgcatgctttttataaatatttcgtgctatttctgaaaaacacattatttcagagaaacatatatatcgtgtatatatattctgtatgtattttaaagaattgcatgctcttttgtaaatatatcatattattttagacaaatacataaaaactttataactacaaccaccgatatttttgtaaaaacaagaaaatctaaggatattttagtattttatccaccatagaaaatgttatttacctaagtttcctgacacaaggctattctctcaattcttttcaattccatggttactttctaatattaccctatataatattgatattttcaaacttttgatgtaaatatgaaattttcaatgtagaaacttaacacatgtcactggagagatgatgctttttatatgtttattttaaacaaatcccacttaaaatctgtatacacttttttggggtaccttatgtagattatatcgaatttcatgaatttctaacttagaaagttaatatacattgataataaatagtttggtctatattttttttactatcaataataatttataattagtttaataaaaattgaagtgcactcactcatggtaatagtttttaattagttttagaatatatgaccaagaccaaaaacattttgaaactgaatttagttttgaataggtagaatctcggttttaaagaaaatgatgaaattcataatggaaggcgttacatgcacacgcttcaaggcaattcgattcatggctaacatttttgattcacttttattttactttttgtcatctgtttattctgtttcaattaagtgtcgttttaagactttaattttgtttcaggataaattttattttatattttcaatgcaaatatttttttttgttaaaatttcatgtcttatctatgtttttctaacagattgacaaaaaaaaaatctatgtttttctaacgtattaactgatgaaagaaatataattgtgtattaatgaaagatagaagtgaaactttaattaaattttaatactatatgttaattaactttaaacagcatataatgataaatggtgggagtattacatttgtttctagggaatactgcattattatgcggacaaatttgatatgtaactttcaaaaacttatacaataatttatatttagacttctcgtttgttttctatataataatttccaacaactttatcaaaaaaaataaaaaaaaattccaacaatttaatatcagcatgtttcttccatctcctattcatatacctttggcttttaaattgtaaatttcttaatttcctttttctttaaattttaactcttaaaagttttcctttattttcttggtttgaagctatatgccaaaaagggaaacgcatatatccagagaagaaaaactcgaaacccttgtcttttcatggatttcaagtatattattaatatgcaattattcgtatattaatatatgcccctatgcgtattttattttttaatgcgaaaggaatgatattcagctaaattttcggtgtgtctattgctttttttttccctttcctcgttcaaaaaaagtacttgcagagtcactcactctcagtctcagcacatgaattaatttgaagcttccctagaattctttcacatcaattaatacgacaccgtctcgggtgaagaatctctcctctcttgccctaaagcgagttagggtttaacacacaaagcataccctttagatttgtgtctcttagctctgtttttgtcggcttgtgtaaccgatcaactcaagctattggctcctcacctcctgaaatttgacttctccaatggatctcaaagtttctcttatatgaattctatcttcaccctcacaatatctttatatatatgagccacaagaacaagaagagtcagtagatgcggctgccatggacggtggttacgatcaatccggaggagcttctagatactttcacaacctcttcaggcctgagcttcatcaccagcttcaacctcagcctcaacttcaccctttgcctcagcctcagcctcaacctcagcctcagcagcagaattcagatgatgaatctgactccaacaaggatccgggttccgacccagttacctctggttcaaccgggaaacgtccacgtggacgtcctccgggatccaagaacaagccgaagccaccggtgatagtgactagagatagccccaacgtgcttagatctcatgttcttgaagtctcatctggagccgacatagtcgagagcgttaccacttacgctcgcaggagaggaagaggagtctccattctcagtggtaacggcacggtggctaacgtcagtctccggcagccggcaacgacagcggctcatggggcaaatggtggaaccggaggtgttgtggctctacatggaaggtttgagatactttccctcacaggtacggtgttgccgccccctgcgccgccaggatccggtggtctttctatctttctttccggcgttcaaggtcaggtgattggaggaaacgtggtggctccgcttgtggcttcgggtccagtgatactaatggctgcatcgttctctaatgcaactttcgaaaggcttccccttgaagatgaaggaggagaaggtggagagggaggagaagttggagagggaggaggaggagaaggtggtccaccgccggccacgtcatcatcaccaccatctggagccggtcaaggacagttaagaggtaacatgagtggttatgatcagtttgccggtgatcctcatttgcttggttggggagccgcagccgcagccgcaccaccaagaccagccttttagaattgaaaattatgtccgtaacatagctgtaaccaaatttcatttctcaaaattaaaagaaaaaaaaaatcatcttcattgtttggggatcgtttggtttttaatttagttgatcatatatgaatatttgaattcgtcttgagatgatatacttctccatctgcattttctcttcttttttaatcactagggtttcgtgctgtccctatatattatttgttatatgcttgagttcacaataaaagtgctattagaagccaatttttatatatcacttagttacctttgtaattggataacaaaaaagttattgagtacattttatagaaatattgaaatggctcatacttgtatatatcatggatgtggtatgtgtaatcccctttttgagtagttatcaaaggtaatcactcaatctatgttactatgtctatcaagtaatcaaccaacaaatcaaacatcttgttctttttaattcatctagataccatacatgaatcttcgagattttatgatttgaaaatctctagattgaatatcttgtttacgcatggaatctctgatttagtacatgtttcacccaactgagttctacattgtatttcgatgagatcaatatgaatatttcttcgtttttatcaattaatcacgaaaataacgcgttaagaatctaccaaaaagtaaataacgctttagaaattttacgaaaaactaaataactatttagaattttatgagtttgttttaaagacagcggttactgtgataattgcatactatatttttgtcgattataagaaaagattcgcccacccgttacaacgatataaacatgatttttcgacggttacaagttaatggcttaaacacgagaacattacatgacctgccaaaaccaaaatatgaaaaatttgtcccagagtttcatttatcagtttccttttagaggattaggaaagtctataacaacacagccaagtggggctttaagtacaaagatgtgtgaaaatgaggaatgcatcaagtccctagggaaactatgtatggaccgtatgaaaacgtatatttaaaaagaaaatcaagtgaaaggaaaagcttgtacatgaccaatgcatgtccaaaggagatttgtggtgaaatatcttcaatgagcttctaagagaagacaggtgacatttatgtatataagaaatggagtctcatcatgtttactgttatacaatgagaatgagagatggtttaaaaacctcttattttcataattttcatatatttgacattttagggcttcaaccatgtaaagagaataaagggtaatgtactttgagaccttttcgatacatgcactgtgactttatctttttaagatatccatgtgctcatgtcaagtgccttacatgcagttgagcaacgattgggttaagaaatcttgttcattgtgtgttttatacgaacggctgataagtaaacgtaaatgtgaaggtttccctatatatacgaattatgattggatagatatatagatcctttaagtaacatatgttctacactatctagactactaactattttacacccaaaaaagaagaaggtctacactattgtgtgggccatagagcttgaagaacatatgttacttaaaggatcatggttcgaactacaacatttttaagtatgatttgttattgtaattgttttacatgaaaataatatcatactttttcataaattctgaagattggtatgaattcgaccaagaatctcacggttgtaaaaagagagaacttaaacaaaaattgtatactatagtagtatagtcacatattattaactattacaatagaatgttttgctaatttttgtctgatgtcaacagaaaatagataagcatgaatatctaaaaatcacaaaacgtgttagatgtaaatatataatattgggtctaatgcaaattggaagttgcaataatatgtttagtttttttcttcaaaaaaaattttcttgactttcctcatcatatatatatatatatatatgaatgcaattgtggatcacgaaagcaacacgacacatctaaggcctaattttcaggccatttaactcaacccaaaagcttccagcccataaaacttcagtactctcctacaataggagccatttaacttgattgaactataaattgtaagttttctttatgtgaaacctgaaactgaaataaacagagaaaacagatgaaaacttcattttctaaaagatatataccagacactgtgattgttggttgcatacttgaaggtataaggaacagcttccttactaactttatatggaacatcaatattcatttctctactttaatattcagaactcaagtcacagtcaaactatcacatttgctatcgtttgtttttagttctgatacaaacgaattcctaaaagaaaacaaagagacaaataaagaactagctcacttgggatgagaccggtcactgctcaaatgggactcgcacaaacagtcgaccatgcaggctcacaaccgctgacgtgtgcagcggatcgattcttgcgggaaagttcacaacctaccataaccaaaatcggaaaacaattgacaactatccttcaattagcaactagggctctgtttggagtgttagaatctaacctttttgaagggtgtgattccccaaggattgtcaagttgctcaggttggcctgctataactagccgccctgcagggtctgactgaacacggacctgaaagaagaaatcaacttatattgaggaactagattctgtgtgcaatcacacaaaaaattactatgaaattcattacaacggacaacagtgtgtgtatttagattcgaatccagtatatgttcacatctatgtcgtaggaatcagtaacactccagtgacaaaacactgatcaaagaagctttagagattgaattccaaggagaaaagctcacctcttcgcgaagaagtccaggtaccagggcaaatatctcaaagcagtctttctgtaaataaagacaacaaaaataaatttggtaagatttcagattcaaaacaaaaacccagattgcagttatttccctttcttcaggcagtgttgtttttgactttttttctttctcatgtctctagtttcaagagttgggtaagcgttgcattatatgaggggggaagcggaagtggtactcacagtttctctgacattgatcttcacccagtctgcagggggtccaacatctataacctcggcagttgacctatcaagccaaaaccatattatcaatcttttgctctgattataataaacgaaatgaaaagacaagttacaaaattctctgtattcatttaatctcctgcgctatttctgaaatggcagttcttacaactaccacccagaaaacagtgcttgtgatctaccaaacattgacaatgcagggtttttcgatggataagattgtatggaattgcacatggtaaagcaatcttgcataagcaacacaaaaatacaggagatgattatctttcgtaactgtttttctgattcgtgtgaaaaaacaaggtccatgccggttgttgttttttgtttctgcacacctgaaaagaacatttatacacggtggcattaggtaatcattctgtaggtagtggagaacaatagccatcgcttaggaatattaccaatgtttttgaggttcttttgctttggggttgaattcaagcctttctcctgaaaatatatgtacaaacagaatcatgttgaagcgtaagtttgtgcatggtgaattatgaaacgtggtaaggtctaaatagaaaccttaacaataggctcagtaacctccccagatccaagaaggcgctgagaatgccaaccttgcatagcacgagctgcagcatctcttcttgttctgcctgaccctgaagcttgatggctacttgcctacataagtgcccttatatcaatgagagaaaaagggaaggcatataaagtttaaaattctgttttagggagcttaaattggtaattagctgtgttgtgtacatattatttcttatgtttcccatataacacaaaacggtacagctttattcaatcagattgcagagagtagtattcaacatgttaagctgatattactcatgcccgaaatttccatctgtataaaatgattttataaagaactgcagagctttcactttatctaatttaacaacatggtttacctactcttaaattgacctcctctcaaagtgttcacctacccaaaagcataagaattacacaatttcataggaattctaacctccttttcaatgcctgaagacggaagagaagctgaaccaggaaggttaagctcaccattttgccttaaatgcttctcatactccaaaagtgcctgcggttggaaataaggatacaaataatgaaatttccacatcttgataggatagaaatcaaccagactccatgttaggaaggagtcaatccaaataaactgttagaaggctactaaaccacgacataaatgataacgaaaccagctagtctcagacacactactgacaaaaggagcaaaagaacattgtctgaatcgaacatgtatgaactaaactgaacaagtacaacctcattaatatcaatgcatattcagtacttagaccaaaaatgaaattcaccttttcatagaaaatgcggaatgtccaggagactgtagtgcatgttctgaataacaaaaatgtggaaagtcaatttcatacaagaaagcggaaaaggttgaagattgaggacaatacaagccatactttggaggatggaacgattctccaacttgccgccatagcttagatgtggtgacctatataagaaaatgaaaatcataggaattttgaataccacagacatagagtttcaagcaacgtgggcggtgggatagatttgagtataaactttcaaacagagtagatgacactaagcaagttcagttgccaaaacacagacctaacataattaacacataactgcattgacttaattatttccggaagccattccttgttcttaaatcatcttctcattcattagctatagttcacacgttatacaacccaaaacgtataaatcgcatgacctgtagataataatctaaaagatttttaacctcctaaaggggaagagggaggagaagatcttagtaaacataaaatcattggaagttcgaaagtagatcattaccacatcgtagccacctaacttgataacggctctccaaagcctacatttcaaagtaaagcatgcagacgttatcacgtcaaacaaggcataaccaaaagtatggaattttccaagaattaaagcaacacttccaacaactcacttgagacaatttaagggctgtccgtaaaactttggggctttaaattccaggaaattctccttgttgaaggcctccacttctttaataaacgcctcttgatcctgtggtgcccctgcttcatcaacttccctggcctgtataaaaacgtgaactcgtgatgaaatagagccactgtgatgaccacagatctcacaaaaaacaatattcaacgcttaacgcaaatgcaggcagactagttgtctgaaatgtgacagaaaagtgctctcatcacctcagcatcactcaacaaccatgtcttccacttcttaacactttcttcaggaacatgaggactcgacggatcccccttcaaaggatttgattccccaagtgttgtctcctcttgaccgccatcactagtaatcttcttttcagactgatcaacatcaccattcctcccatcaacactgttctgaccaccaacctcttcattagcctcaatttgattagcaatgggagcatcagataaatgaacatcactatccaaagtatgagtcgtatcctctggaacaggggacttaggtctttcaatagagtttaggtctttctctagttctgaaggctcctctacaacacctttggtaccagacggcacatcttgctcttgcatttcagtatccgccatcatgaagctaattctctgagacatagcatcacaacaacaacgcagaattcaaaatccagaaatcataaatagaaacgcactattgataattccagagagaatgcaagacgcatgtaatcgagaattggaacgcatcaaaactctgagtcctactctctcactgattcgctataattcaaacagtgatggcgactaaagcattagaaagcagagcttcacgaaatcatggagtacatacatagaaacaaaagatacggttaccggtttcgccggaagaagaagacgccggagacggtggagtcgtcgcgggttagggttcgatagcagccggcgaaatggaaggacgccggcggagaaaaagaagcgagaaacggaaagatatcaattaaacggagagatatgcagatcaaaagatttatacggatgatataatgaacacatgaattcattaagaaagaaattaatgcttgttacttgtattaactcttaacgaagatcttaatagcaaaacttattaatgatatttcagaaagttggacttttacgacccatttacataacaaagcccattattgtaaactatgggctcaatatgtaaggtatattatgaatataatcttaggcccaattaaacacggaagacaacgtaggtttctgcttgtctcgattgttgttgtgtttttatttgttactaaagatagagaaagaaatatcgaagcattgtgcgttcatgttcaatatagagtttttgttgtaccaaaaaaatatagtgtttgaatctttaattatagactagctagcatataattaacgtgattaactttacaattatggtgatgatgattttctcagtatgtaggtatagtacttgtcaaagtgacaaataattgcaatttaatgaattggtgtggatccaaaggataacaaatagtatgagcatattcattcgaagcaaaatggtacagaattaagcaaagctttttgtccaaaattctaatgaattaaggaccattatttttagggaataatagtctttgatgccccacatttccaatagtacaaatcaagattttcaatatatgtcaagtttgttattttcattcacggacattaaaacgagtggagcatttcaatttgacatatctttgtccttttctttttgttacagatatcttttgttcacgttctttgaatcatcatattcatagctatgagatcatagaaatatcaaatactgttaattaacctctttaaaaatacatattcacaagtctcttgtgtgagtagaaatcctatacaaacaagtttattcatgctctaataagatagataaataagaagatagctcatgacatggccttcattaggcttgttgcatatacaataagcttacatataaggaattaaggatggtctaatatctcttgcttcacatgagaagagttataggattcgagtcacataagagatttttattgtagtgtgtataatatatcccacttctacaattatccagtctattgtgtatttttcattaataaatcactaaaatttgcactttgacaatatatacttaaatatttgtatctcgtatatatatatatacatatttttagcactgtatgataattctaattattcgctaattgtttttttttggtaagaattagtcgactattttgatattggggttgttacatttatatcttgcattgaattttatggacggacactggtcgcagcctcacacactaatttgaattttccgttatcattaatattcgatcgtttcgttggtacgcttccatcacacaattaatttaagccaccacactattatcttattctcattcagttttgtttccatttcaaatttcttacgacgcatatgaaaatgtacatttttataacaattccccttaaaaatagatgacaaaaagaaaaatgttttttttaaaaaaatatataaaataaaataaataataaatcttcaacaatcgatgaacactttgcaatatctccacaccttgggcaagaaccagaaaaaaacatggggcacgtttcgtagtcgatgtgacgaaaggcatgacgacggttaccatataaattcgtcttctcagataaagccttattattctcaatagtgttatacgacaatatacgaaacaaacaaagaccccgcttgagttgagttttccaaaaattgtggaactgtttcctctttctttttgtacataaactaggttacaaaaaattggaaaatatacaaaatcaaaggacataaacttacgagatatatcataactcataagttgtgaaagttggaattcaaaaaggagctaactatgaatctatgatacgttattttgttgcttatacggaacaaaacaattccaaaaacaaagaagatgtaaaagtctgacccggatcatgcggacaccaagttgtacatacaaaatatgtaggatgaaaatatgaaattctcttcccatatgcatagaataataatttaccttagttaaaaagattagtttctaagtttgccccaaataaagagattagtttcttgaaaaaagcattttgtggatagacaagaatttaaatagaatgaagaggcgaccatgcaagtgttgtactaggccaaattttggagacgctctttctctttcatagagagagagtgagaaagttctgatacggcggcttctcactgtcatctagctgtaccactgacgataaatctctctcttcctctaaatcggttaaaaaattcattcccttcttggattgctctgttttcttcggcggttcttgcagctccattgattctctgtttcctctgctacagttaacttatacttgcagattctcgcgttgatagtaaaaagatggtgaagcttttggagctgttcataacttcatcaaaaccagtcgttgagattctgttgataacatcagtcggattttatatggctctcgatggagtcaatcttcttggtcatgatgctcgtaaatatctgaacaacgtcagttaattatcacttaattttactcttttctttaataaatctaaatgattcaactttaatatgtctctgttttgttatcattttcttgatgtgtgtgtatatagattgtcttctatgtgtttagtccttcgcttattggaagccgtttagctgatagtgttacatacgaaagcttggtcaaaatgtaagtcaatctcagattttgcatcttgagtctgtaatctttgctctttggttaatgaaaatgaggatttgcaggtggttcatgccggtgaatgttctgcttacattcatcattggttcattacttggctggattgttattgtcatcactaagcctccttcacaccttcgtggtctcattcttggttgttgtgctgctggtaacaaaccttaacatgaatgtttctgatttcagaatctgtttaacttgtgttttgcttatgactgtggtaatgaatgaaacaaaacagggaatttggggaatatgccactgattataatcccagctgtttgtaaagaaaaaggaggtccctttggagatcctgagagttgccagaaatatggaatgggttatgttgctctctccatggctgtaagttcttcttcttcttcttctttgtcttcttcttcttcaaggttttgtaatcagtatgtctcatgacagtacttggtaacgtatcagatgggatctatttacatatggacttatgtatacaatcttatgcgtgtgctatcgaactctcccgttgaaacccctccctctgttgaatccaactacgacagctacaaagttccccttatttcttccaaggaagaagaaaacaaccaaaaggtttcatcacatatgcacatgatcagtaactattcatttatcaaagttggtagtgactgtgtgtatatgacaggctgggaggtgggaaaaagtcaagcggagattggtttcactgtcacaaaaagtcaaccttaagacaatttttgctccatcaactattgctgcggtttgtgtttcaatggctctgttttatacatttgagacgtcactcacactagtgtaatctttctaattaccctttttgttcttctgtttccagatgattgcacttgtgatcgggctcattactcctttaaggaagctaataatcggcacggaagctcctctccgggtgcttcaagactcagtaactctagtggggtaactgcagctaaaattagaccattatcttagcattagctcaacaatgaatcatctcttggaaaaacgtaactcactcattcgaaagcttcttatgtgtcttgtttcttttggctgaagagatggggcagttcctgcaatgaccatgattataggaggaaacctactcaaaggtttgaggagttcaggaatgaaaatgtccagtattatcggcgtcttggttgcgcgttacgttttactgcctatgagcggtgttttaatcgtaagaggagcatataagttggatttagttacatcagagcccttataccaattcgttcttcttcttcaatatgctgtcccaccagccatgaatctaggttcattgctctgaaaccaactctttaaaaaatacagttacttctttcagataagatcacttcattagtttcacttactcttgcaggtacaattactcagttatttggaactggggagagtgaatgctcagtgattatgctctggacttactctttggcttcgattgcactcactgtttggccaacattcttcatgtggcttgtagcttagaatagacccccatactcatcatgttacatgtattgttttgttccattgattcaagaattgttcttggacttccagatgattggatcaagtataatagagaacatatacttataagtcttttgatacgaactttggacttacagtctgtaacttacagatagaagatcaagtccagcctcatcaagaatctgctattttgatcctcattgtcttgggatccatcaagagattgtgaggcttaaaatctctgttatgatacccaaatcattctctcttgaaacagggtaaaaccagagaacaatctacttgactacttgtgactgtggccatggcagaaagctattcctttgtttagtttggtacacctgagaaaaatttcagattgttacatttggtttaatagactattacatatcagtcaagtgagtacaaatgatgagagaaaagagtggtgacaaaaagctctaattggtggattttgtgataaatttctttacatctgtgtccatgtatctcaaacctaatcgtactctaagatcaattaatgtctcatcacgtcatatttgagattttgatgtataaccttccacatcagggctaaagtgcatgctagactccaagatatactatatgtaatatataaatttgtagctagtgaaactgtggaaaaacaaaaattatagtactgaaacattttagtttatgaaacgattcttcagaaaatagatgacaacaacagaagtttttttaaaatcaacgttattgttctttaccatacggtaaacacaatgcgacatatccacatcttcagcaagaaccacaaagtaacatggcacgtttcctagtcgctgtgactaaaggcatgacgatggttcccttataatttgtattctttttttctcagataaagagttggtggttatgatacgttggttttttcatacggaacaaaaataatacttactctatatctctccttcactcttcctctaaaaaggtaactataccatttcatttgatttctccataagttatcgtcgtttggttcattgtttctttatctcaaatcatgtaatatatggattaagtttgcagattctaacttttggaagtagagatgaagcttttggagttgttcatagcttcatcgaaaccagttgtggagactttgttgataacatcagttggattttatttggctctcgacacagtcaatcttcttggtcatgatgctcgcaaacatttgaacaacgtccgttttttaactctcttctttaacaaataatctaaaagagttaacttaaatttctcttttgtttgtgtatagattgtcttctatgtgtttagtccttcgcttattggaagccgcttagctgatagtgttacatatgaaagcttggtcaaaatgtaagtcaatatcaaattttgcatcatctttaagctcacttgttataatgaaaatgaggatttgcattgcaggtggtttatgccggttaatgttctgctcacattcatgattggttcgttactcggctggattgttattgtcataactaagcctccttcacagcttcgtggtctcatcattagttgttgtgcttctggtacaaaccttgacatgattttagaatctttttgtctttctttgtatcgtatgttttgcttatgaatgtgatgatgaatgaaaccaaaaacagggaatttggggactatgcctctcattataatcccagccatttgcaaggagaaaggaggtccctttggagattctgagagttgcgagaaatacggaatgggttatgttacactgtccatgactgttagttcttcctctcttgtctctcttcaaggctttttttatcagtgtgtataaacatgacactaattggtatgtatcaggcgggaacggtttactcatggacttatatataaatcttatgcgtgtgctatcaaactctcccgttgaaacacacacacactctattgaatccaactatgatgacagctgcaaagtccaactaatttcttccaaggaagaagaaaaagaagaagacaaccatcaggtctcattaatcaacaactcttcatcatcatcatcagtgttattcattttggcagtgactttgtgtgtgtttgacaggttgggaggtgggaagaagtcaagcaaagagttgtttctctgtcaaagaaagtcaaccttgggtcaatatttgctccagcaactattgctgcagtttgtgtttcagtggcaccttttttatatacattcaagacattcacactagtgtatatctttcttatctcttcttcttctgttttctcagattatcgcgcttgtgattgggcttattactcctttaaggaacctaataatcggcaccgtagctcctttccgtgtgattcaagactcattaaccctattggggtaattgtagaatagtctcattatcttagaagtagctcaacaaatgattcatctctttgaaaaactcactttttctgtgtcttgtttcttttggctaaagagatggggccattcctgctatgaccctgattcttggaggaaacttacttaaaggaatgaggaggtcggaagtgaggagttcagaaatgaaaaactcctgcattatcggcgtcttggtagctcgttacattttgctacctgtaagcggtgttttactcgtgagaggagcatacaagttggatttagtaacctcagaacccttgtaccaattcgttcttcttcttcagtatgctgtcccaccagccatgaatctaggtgcatggcttgaaaccaactccttaaaatacagttacttctttcagataagatacatcactagtttcccttacttttcaggtacaaagacccaattattcggcgctggggagagtgaatgctctgtgattatgctttggacttactctttggctgcagtttcactcactgtttggccaacattcttcatgtggcttgtgacataaatccccacactcgatcttgttatatgtatccatttattcaagaacttattcttagacttccagatgactggatcattataattgcgaatagtcttaagaacattaaagccgttaatccaaatattcgaatagaaagaaacaacaatcagaagtgatatattatgctaaagaaaggatgattcatagagggggaagcagcacactagagatatgcttgaaagaagcaaaactagaaaaaccataaaacttggaaagatactaactgaagattttaaatccttagagagaggacttttctggcagatcatcaaagtaaggatgctccatagccatctttgctgagattcgtttcgctggctcgtactgcagcattttctgttccaggaagataaaaacgcaattagttcgtctgttgagtttgttttggtagctagttaataaactttagacttacagatagaagatcaactccagcctcgtcgaggtttggaacagcagaggatagagtcgatggtttccactgtgggtattcatgccagttcttgagtgtgctcactcctggccacatttcttcattgggtgtcccaaacaacctgagttgtacaccggaaagagcggcaaaatgaaaaaaggttttcttatgtttgtcatgtaaaaggtgaagaatcaacaaagacttacttgaaaatatggaggagctgttggagctcagagtctccctgaaagattgcttggttggtcacaagttcagctgtaaatggtgaaggaacaatgttaattgttgttgtttagtaacttaagatgatatcgcagtgactagtgaaatcaacgagtctgaaaagaacacataccaaatatgcagccaacagaccacatatccacagctgtagagtaatgggtggcaccaagaagaacctctggagctctataccaaagagttaatatctgttgcaatgaacaaccgattcaaaaccataagttctacaatacatacaaagtgggataagtgcaagaagcagtgtcaaacattgattacctcatgggtatacttcttcattggcagagtgaaggctctggctaaaccaagatctgctattttgagcctcattgtcttgggatccatcaagagattgtgaggcttgagatctctgttttgaaacaaggagaaatagtaagaagaagaaatctctcttccaagttattatctaaaatcattctcacttagaagttgaaaacaagggaaagccagagaacaattcacctgtgcaatatcccgtgaccatggcagaatgccatacctttgcatagttgatacatcaagctctgcaaataacttttcagaatgttatgtttggttcaagtgagcacaaatgaagcgagaaagagagatgacagtaataaggtggttaaaaaccttgatagtttgggttggaatgttcttgccagtgctacggaaacttctgatgaatttcttgacatcagtgtccatgtattcaaaaaccaggtacagtacagttttgccttctttgcttagtccttgcttaacatccattaacctgaaaaagatgacaaataaagtttccgtatataattgattttgcaatcactggaaaactaactgatacagcgatccagatcaaactctagggaaacatctatcaacagtttctcagagccaaatcatctaacaattagtagactcttcgaactgattactacgatttgaaattgagatctatctaatctggaaaacaagcgagatagtgagaaatcgactatataaaccctaacgcgactacaagatcgagaatatgggggcaattttatcgaatcagaggtaaaaccctaacctgacgacgtgaggatcacgagcgagcattcgcaaaatggagatctcgcggagagtggtggaaggaacgccttcttcgtcctcatggagacgcgtcttctttagagcgacgattttcccggtagctttctctctggctctgtaaactttcccgtatgtcccttcaccaactttctcaagcttctcgaaagcatccatggcggaaactgctataactccctcgtccatcgctctctaaaattcttcttctccggcgctctctctctctcagttggttcttattgggaaagtgaattgtcggagatcaaagtgtagataggttatataattaaatgagacctgaaattatagaatccttattcttgggctttcacaacggactgatttttcgaaattcaaactggagcgtggaggagcggtcttttcataaacgcctttttttaatttgccacgtactatagtatttaattttaatttttacatttattcatttgtgtccacttgtcatatatatccgtaggtactttgatttggtcgcaccatatacaaattatgatcgagaaggcaacaagaagattagtgaacccaaacacagacttcttcattaaaaaagcattactcaaatcctttaactttgaatatccttttcctaaactcaactttgaacaataaagtttgcgtaaatcagaagacgacttcaaaatggaaagagagagagagagagagagctaatgaagtttatggttaaagggaaaaccaaaacaataaaaaaatctttaagcaaattgctgaccgctggtggaagaagatgagatcgtagtgagaacatcagtcaccgaggccataacactcaatgccgctttcaaaacatcttgagagcaacccggtttcacaatcgtcctcacctgatcaagatactcctgcagcttcttgattttccccatgtaatcctggtcttctacacacagacttaccgcctttgcatctgcacctggaccatcatactggactggtcctgggtttcggtacatatcttccatcaagaatttctgcgcgttttgtctcaatagactgcaaaatcatttgacaaattatatcacttgatttcatgttcattctaatctttgtctaatgagtgaggaacaaaagcttactcgtatgcttttcctttcaagtcaactgaagctggatgaattacaggtctaccaatcgtagtagaaccagaattttgggaccaacgcttaaccgtcatcattgcctaaggttaaacagagaaagagattggggtcagtaaaactgaaacttgaagtcagaaatcaacacatatactaaacaactttagccttataaataagagacaaaactcaactgagataggcgcagccccgcatttccatttgtttacaggactcttcaggttagtcactgtcgccatgtaaccattcaaaccagctgcgaggatgtggtaacatacatgtccaagaacctgcatcaaagttataatcaatggtgtgaatgtccataatattgaagttgcaatagcattttagtttggcgatcacatacataggcgtagtcacaatcgaattttgatggaagagatccacgagcttggtaaccaaaaaagtgacagatagcgttgaatttcttccctttgtaggttccttctttctgtcattttcaaaacttagttttagggacaacttgaatattcaggcaaggttattcaaaaaaatttgaaaaaaatggattgtgacaagtgaaaaagatgtgcaacataccaagcgcttgttcatttcagtctccacaagataagccagaagtttctccgtctcaatctaagaagaaagtaaatgagcaattagaattccaactttttatagcacagtaactccatcattttctttcttcttacctgggatagctgagcagaatcatcagactcgggatggagaagtagctgcagaaacaaagaagacaatttatcataagaacacatactcgtttacatgtgagaaaaaacaaagaaaagtaccatgtcaaagaattagaacctgtttcttaatgaatggaggcaaaaactcaaacaaagcagatgaccaagatgacaactgagtagaaatattatcaacctgcacaccctccttaagcaatccatgaatttcctgcatcgcacaacaacatgtaaatgcttactatgttttggaactcaagaaacaataaaaaatagcacattaaatgataaatagaaatgtttgccagtattgaatcgttaccttcaacagagcatagagttcaggaatactctcaacaagcccttcaggaattaggatgactccatgatttttgtctgatacaaatagacagtttatcaataaagttagggaacaagcaaaagacatcacttccaacataccaaaagctcgttttagttatcagaccttgttcggctcttgcttgaacagcatcacagatttgttttatgatgtcaaatattgtgagcttagatgctgtaacctcctcacccagtatcacctgagacaatcgcatcaaatgcaaatgagaaactagatgcagcattgccaagactatcgattgaatatattcagaatttggaagaataccatgttggggtgagactgaagtgtacactcaagggcaacatgtgaatgcttccgacccatgagacggacaaagtaataatactggcaatacggaggaaagtatgttattgagaagaaaatttgataacagaatcataaggaacccaacttcgcaattatcaaaccataataaatttcacattattaaccaacaaaatataggttggttatgagtgtcctagcaatctttctaaaacatgataacgtttggaaggaatcaacatttaccttctctgctgaaagggcatcggtgcagatattgctaatgagctgagaattcacctgtacacagtagaatgatattagtctaaataacgagttaaaatgttattaacctgaaaagaacggtgagcgaaatgaaagaatgttggctacaatacctacaaagtaaaagaaaaaaaagcgctagatttcaaagttaccttgcatgtagtatcgaaaccaacatttgcttccacaaactgattcttaagatctccattaatagtgaccggaacaccaactacctgaaacatattggtaatttctgctgttagcgatatcaggtgaagtgcaaatgtcactaaagtgattcatgatacaagatcagacaaagaaagagaaaaactgggaagaaattaggacctttgttgagcattttgcttcagcaaaaaattcagcaagatgagcggcatctgtgtttgatgttacacctaacaaataaaaacattgatttagaaaattctgggatgaacttaaaaaatcatatttacacaagttaagaacaaaacatctactaaaacagacacccgaaaaagaggaaaagtaggtacctccaatgataactaggctatccaatttcaaatccgtgcatgcttttagtgcagcattgacctgttcggttgttctaatctgatccttggttcttccaagcatatcatagccacctaatacgacatacatttaaatgccatatgtcagaaagcagcagagataaagttctgaataatcttaatcaaaccaccaaccaccaaccttggtttttgtaagtttggaggacctcatcagtgatctccagggtcttctgggcaaagagaccttcagaaccacctgttacaggtagccaaagtttcatattaatgaccaggcacacatcaatacggaagtaagatgtgactttatagtaagcaaacaatgaagttacagaaataagaaaaccaactaacagataaaaaacagggacttacccaaaaatccaagcaaagtgttcttcgcgttgtgcactttgagagcctcgtatagaccccaaactacattgtgcccaccaggagcctgccttccacagaacacaattccgaccctacaatagaaaacaactagctctaaccaacaacaaaaccacagaacaagaaattccagagatctataaatatgcagatgcatgcacacctcttcactggatgttcagtaatgatctgagcatcagcaactttagcagttgccctgaggaaatgagccaaaggctggcctagagtatgtgggaaggcacgggcaatgatatgagcatcaccagcctttgccacagtggttccatcaccaagttcaacacggacagtagtcccctgtaatgtacattgaatcaataacgaattaaactacgaatcatccaaccaaaaaaaaaactacgattcaatcactgttccagaaaatcactccatcatggtagttcacgttgaaaggcaattctacctaccacactaaactgaaatgttaaatcagacgagtaagtataaaaggatcataaaccctagatcccgattataataacagtgtaaacagatctgcatgaacggaaacaacattgcaagttcctcgagtagacaatcaaaataaacagctcgaagggattcaaaatattcgcgacgtgacgaaattgtgagaaaacgaaacagcagaagagatgatatcaatgaaaaacatagagatccaaacattggagacagtgaacgagagaaggaagcaagagatctaaggaagatacgaatatacaaataaaaggaagaaggagaagtacctggagacaaggaggaagctcagggtggtactgagatcggagttgttgaagaggagagagttctctggggattccgaaatctgaatccatgggcgataactttttaggtttttgtgagaaattaggttggtgagagtgtcagagagactcagagaagattcagagaaagttttttcctttggcccgtcaaaagtatttatatagtatgcgggggacttgggcgatacgatcaaccaaacagccaaaatttggtcttcttcttttttttctttcagtccacgctttttctcgatcagcccttgttattctggttatttacgaaaatgccattggatataaatatatacccttacctttttcggtttggtaatgtttggttagtgaccaaattgtctaattcggtttggtgttcatattttatgggttttaaaaggttttagactgcaaatttatcgaactgtatgagtgtacgtttggttttaagtttagtttataaatgcggttaggttttggtttagtttgagttgacaaattccccacctaagtgcgaccaaactttcaaactaagaaaaaataaaagcaaaaaataggatatgatgatatgctaaaagggagagtgaatgagcaccaaaggataggtgaagggtaaatacggaaatagcgagagaaaaaaaaagaagatggaaatattggggaatatagcattcaatagggagatatgcttttacatggtaattacaaaggaataaaggcaaacatatagtaaaagatacgactctctcattccctcttccccaagtattattattgcctgataattgataaactacccatcgaaaataaatatttattatgcacatggatctttaaaaaaatggatttgtttattatttgacctgatttgggcttttaataaggcttcttatttactctgttgaccgtaggaaaggcctgtcattatttaaagatctaccaactgaatttcatcagtcagtatcgatgggattaggtatattaatggtaattgttattttcataatataggcctagtgtgataagacctcaaaaacaataagctttgatattacgatgagagtaggagtatataataaaagcataagattatgatgatacaaaggacatcaaagttggtgaacacctagaacaacaaaaggagtaggtaaaaggggtcagctttgcattgtgcttatctcaactaccttatgagaagaaaataatatttttttctaaagtcaaatgtttgatgagtgtagtttggataatgccgcattaaaaaaaaaaacgtgaaatgacaatcgaacattgatgattggagggcttatttgtaattacgataactatagtcaaacggcccaaaccattaataataaaaggtgaataaagaattttctgaaagacgaagaagagaaacgaaattcgtagaaatgatctcgggctcggcgacggcgagtcatgggagagtgttgcttccgtcacaaagggagcgacggcccgtctcaactggatcaaatattttacgtttcagagaaacagtaccgagacaattcagcctgatgatggtgacgaaggcgacggcaaagtatatggggacgaagatgagggaggagaaactatcggagatgatagaggagaaagtgaaggaagcgacagaggtttgcgaggcggaagagatgtcggaggagtgtagagttgcgtgggacgaagttgaagaagtgagtcaagccagagcagatctgaggatcaagctgaagttactgaatcaggatccgctcgagagtttctgccaggagaatccagagaccgacgagtgtcgaatctacgaagactaaaatttgagttttcgtgtttttaatgattgtagctaatctcaaaacagaggacttagaacagagactgattctgattaataaatctcaatcgtccattgaaaccgttgttcatcgtgttcacttacaccgattgatttggaatgaaactctgcattttggatcttttgctttggaacaaaacggttgttttgattgtttatggatctaacgatgtggcctgttacttaattgggcctataatctggatccgccgagtccgggctttttaaagaactggcgaatatcattacacgtggccagatccataactttgaaaatttggttatttttaatttttgtggaaaattagagaccgcttcttgctcttctaacttcacctctgctttcttcttctcgagtgaaacagacagccaaatcaagatttgacggtgagccaaattccatggcactgtttcaggagaagctttcatcactttcctcaagttattcgtcaattcattctcttccgaggattctcgtgtccaagcctcgtaatagaattgccgtgacaaagtcccgttcgatttgcagagcttcgtggcaagaggtttttgttgaatttatcttcttactagaaatcatcattttgttttctcctcgttctttttgaaactttgctgttgtttttagctcgccggagtgttggttttctcggcgattccattcactgcggttaaagcaattgcaaatagctcaataggagtttctctacggcggagattagaagagaaaaagaaggaagccgtagagaattcttcaagattcaagtctaaagctcaggaagctagaaacgacaggtaagattgagtttatcagtgtttttttgtgaaggcaatgtttgataaaatggtagataaattcagttttctgcggcaacgattatttgatagatacatacaaaagttctatgttactgtaactatatggatcaaacatttccttggtttgttcctgtaagtgtgcagcaagtggtatggaaaagaacgtccccgttggtttggtccaatcccatatgattatcctccataccttacaggagaacttccaggggattatggtttcgacattgcaggacttggcaaagatcgtttgacctttgataagtatttcaagtgagtcttctcctttctatttctaaccttagcttgttctgtaattagaggctgtcctgattcttctaactaactgttgactgttgttgtttctcatgattgtttgtttgttctttctaccaattcatgtgagtggacattatgaaattcactcaagtcgatcatgtttctggtaaatagtagtttagtcctattgcttgttttgcagctttgaaatacttcatgctcgttgggccatgcttgcagcattgggtgctctaatcccggaagtatttgatctcactggaactttccattttgctgaacccgtatggtggcgagtcggttactccaagcttcaggtttcgctcattacttagctctatttgttcaaaaacatattttttcaccatctactatcaaagtactagtcagtagcatgatcgtgtacgctttcattttcaccagggagagacattggagtacctcggcatcccagggcttcatgtagctggaagccaaggtgtcattgtaattgccatttgccaagtactcttgatggtaatatacctcgagacttgctttccttatctcatacatttctcttataccaaaaacgtttttttgctatacaggtaggaccggaatacgcaagatactgtggcattgaggccttagagccactgggaatatacttgccaggagacattaactatcctggagggacgctttttgatcccttgaatctttccgaggatcctgtagcttttgaagatcttaaggttaaagagattaaaaatggacgattggcgatggtcgcgtggcttggattttatgcacaggctgctttcactggaaaaggtcctgtacaaaatcttgttgaccatgtctcggatccattacataacaatctgattgccatgcttcagacatgacaatgtgtgaatatatgtacatatatgtcaaaatagaaaagacaatgtgtgaaaatgtttaataccatatgttacttacttagcacatgagattcgttgttttaagagtattcacattgttttgctttatctcatagtttggtaaccaacatttaaaagataactacattaatcactaccaacgaaaaggttgataatacgacgatatacgtgttccattttttgtgggtgtgatacaaatgatcatgtgtaatgggatattttttttgtcctcgtttgcaattgaatcgcatcgttatcacttgttatcaaaagtttagaaactatatacacgttttatttatggtatggtgcgtcatgcgtgtcttattgaattggggagttggaggctcaaaataaaacgaaatcgtctgtgttcttttttcttctctcaaacctaaattttgctttagttatcttcagttttccatagtttgtaactatgtttgtatagcccattgttttgttgtttctctaaaatacaatcaataatattgattatggtcaacatccaaagtactaatctgatatcgactggatgtgtcctcctgtagttccagattcagtcatgggatcttatcatactgtgaatttaaaagttgtgtaccattgtgaacaaaaaaaaaaaaaaagatatatgtgtaccatattttggatatatgtgtatgactagactgacgatatttttctcttctagtatttcaatccttttttttttctttcacaagcatttcaatcctgtttttggtctgtaatgaaggtctttttttctagactcacttaaatcgcatatacatatccatcttttctatcgtagtttttttttcggatgtgtatcttagaaagttttgaccatcccaaggaagtagaattaagaatctgatcaaaatattcgtttacttagggatttgtaaacgccttggagatatgttccgtcggtgaattatgaaatatatttgttgtggtgttattttcgaatattttttgggagatattgtaaccgacacctgatttctcccgtgactcgaagaggatactaagaccatcttcattggtagtcttttaggagattttcattactaaaataataaaaataaaaaaaaaaagaagagagagagcgtagaaagtttttcaagtgagaaactatgagatactctctacaagctatctttacatttttctcctttcaattggtttaattttttattaaaataaaaatttaatcatataataaaaatttaataaaatactaatattttttttgtttgagaaactttttgagtttcttcttaatggagatgccctaactcaacaagtgaccaaataagttaatttatttatgtgtatggttaagcactccaacgtcaacttaacatgaaaatattccttagcctaactcaacatatatttcaatttagagactatttggctctctgtaacaaccataatccagataattaatagaatatcttgacatgagatgtgtatctatgcacatgagatatgtatctatgcatgtcgatggaaacaaaaacagtttgtcctcatgcataggttccaagagatgtgtcggccgacaaactaaatacgctcgttagtaaatacataaattatacgatacgaaattattaggggtataatttccaaccataaatgagagtcgttaattgatgtgaaaacaatcttgtaggagtagtaatttagggaacaaaacagaacctccacgttacgtaattagacactaaaataaaactctcccaagaatagcgtaaaagtttttaaaatatatacagaatcgaaagcaatcaaatcatatttttcttatcgttctaaaacaattaatcacgaagagcttcttttcggcattataaaaccgaacatgtacaatttcctcatatccattagttgtttgattggtggtttttttttttttttctcgccaattggtggctttatgatcgctgtataactattgtcaacagagcccattactaacgtaacgtgcatgttcttcggtcaacacttccaatatctcaaatcaaagccataaccgtgattaaataactattttatgagttttttataggtaaaattgagtgatatactatatagtaagaaatttcagaagctcactacattttagtatcttgtttttggtcgtactaattgagaaaaatcgttttattttcataatattttccaattcatcgtgaatgtaagcaaaaaggttgaaagaaacgaataacaattattttaaaagattagaaaaaagtgaaaagagagttttgtagtacaagaaatgaaggaagtacaaacagagaaacgaatgaatgggtgtcagtattctcccaatcaaattgacatctactttccgtaccatacagctgtttccccctcttctcaaacctttttccccacttctatgtacaagtacatacatactattagttagattcacacactaaatctcgtgtattgtacttccttagaaaaaaaagtgcacacagagtaagaagagagggtttaagttttttttatacacatccggaaaataaagaaaggagaaattgaatagctacataaatcaatccgtacaatgcgagagatttcatatagtagttttgtaaaataaaagggtacttatgtctttttgtatcgacaggttttttgtattttatgatgccgacttcctccaaacgtggacgcgctttatggttagtgtgtttaagtaggctaaaaatctctaaagtgaaactcaattgtcaacgattaaagaattaagaagatgtaaaaaaaaaactaattttccaaattaattaataagctcataatatagcgtgattcgcgttaccgaatgtaatttgacttgtggtatactaattgtgactttgtttttatttctttgacattacgtaaaatttgtttctaccaattttgataagtgcacggtcaaatcaaaagaggaaaatgaaaacttggggttgaattctcaacttgaacatatatgatagtcaacacgacaatacgttgtattccttatattgaaatgaagctaattaaggtctatatggaaacaaatatgttatttatttatcaatgacgtatcacattttgacgaataaagagattaatgttatcctttacaaaataatgaaataagaaagaaacagaagtttatgtttgtccaattatcctcaatgtttgttgatatacgaattttgagaattcaaactgaatacaagaaataaaaatgtagtgagataataatacaaatttgcattatttcttccaagattgttttctttaagtaaatgaaaagtatcttggattattacagaaatgaccctaaatctttttgaatttacagtttgtaccaccaccgaataaaataagaaaaagtttcgttaaatgttacgagtgctcgttgaagacgaagtttcgaagacgaccaacaaagagaaagatcaaaatttgagagggaaacaaaaaaagaggaagagagaagaagaagaagaaaacacccttgattaataaagtctcagactttttgattcgattcgaaaaaagtgagtttatgcttgaagctgggaattccaaaactcggaattcgtgtaaaactagttcgatttatcagagttatgctaaggtaacatagtcgattcatttcaaatttacgaactttatgttcatctgatctctctctctttctcttctatttttggtaacgaatctcgaaatttcttgtgttgaattttgtagttagtgaaggtgaatgaaaaagagttgatttttgagagaggagagaaatgggtgaggtaggtcctcaagtcgctgctccgatttcagttcatcatcctatggggaaaaaacgcgacctttatgtacaaccacactggcttgtgtcatctcagttacccaaggatgattggcagatgaacaggtggaagtgggatggtcagagatttgaagctatagaactacaaggagagtctctccagctaagtaacaaaaaaggtcttgatttgaatctaccttgtggttttaacgatgttgaaggcacgccggtggatttaaccagaccgagtaagaaggttaggtcgggatctccgggaagtggcggcggaggaggaggaaactatccgaagtgtcaggttgataattgtaaggaagatttatcaattgctaaggattatcatagaagacataaagtttgtgaggttcatagcaaagctactaaagctcttgttgggaaacagatgcagaggttttgccaacagtgtagcaggtgaaagagaatctgattcttttgttcgtagtccatcttcgtttttttgttggttatgattgggtttttaaagattggtactttttagttgttaggtttcatctgctttctgagtttgatgaggggaagagaagttgtaggcgtagattggatggtcataacaggcggaggagaaaaacacagcccgatgcgattacatctcaggttgtagctctggagaatcgtgataatacttctaataacactaatatggatgttatggctttgttaacagctttagtttgtgcacaaggtacttatgctctgcatcattctcctctctggtagttctgttttggaaatccatgttttagaacaattttttctgatctgtggtctgcaggtaggaacgaggctactactaatgggtctccgggagtgcctcaaagagagcaacttcttcagatacttaacaagatcaaggctttacctttgcctatgaatcttacctcgaagttgaacaatatcggaattttagccaggaaaaatccggagcaaccctccccgatgaatcctcaaaatagtatgaatggggcttcttctccatctacgatggacttgcttgctgctctctcggcatctttaggttcatctgctccagaggccatagcttttttatctcaaggagggtttggtaacaaagaaagcaatgataggactaagttaacttcttctgaccacagcgccacaaccagtttagaaaagaaaactttggagtttccttcttttgggggaggagagaggacaagtagcactaaccattctccatctcagtattcagattcacgcggtcaagacactagatcgagcttatctctacaactattcacctcttcaccagaagaggagagtcgaccaaaagttgcatcttcaacaaagtattattcttctgcgagcagtaaccctgttgaggatagatcaccatcatcatctccagtcatgcaagagttattccctttgcatacttctcctgaaaccaggaggtataacaattacaaagacactagtaccagtcccaggaccagttgtttgcccctagagctctttggtgcatcaaatagaggagctactgcaaatcctaattacaatgttttgaggcatcaatctggttatgcttcatctggttcggattattctcctcctagcttaaactctaatgctcaggtatgctgctacccatattctatttgtaaactaaactcaaggtcttagcaaagcaggtctaaagccacttttatgggtttgtaaacaggagcgcacaggaaagatatctttcaaactatttgaaaaagatcctagtcagctccctaacacattgcgaaccgaggtaatatttctggggaatattctgatttccttgaaatgaaaaatattggttgctctacttaaatcctaacagtggtcaatttttaatttcagatctttagatggctttctagttttccatcagatatggagagttttatcaggcctggttgtgttattttatctgtctatgtggcaatgtcagcttctgcttgggaacaagtgggtgaatagttgaatgactggttaacactattcgaattttctctaagcatctaaggagctgatggttttcatgtctcctttttcagcttgaggaaaatttactgcaacgagttagatctttggttcaagattcagaattttggagtaattcaagatttttggtcaatgcaggcagacagctcgcgtcacacaaacatggtgagtactcataacctggtacttctgtgtctgttggtgtgtatggtctgcaagatataacttagtcatttctatgcaatactacaggtagaattcgtctgagcaaatcttggagaactttgaatttaccagagctaatcacggtgtcgccgttggctgttgtagccggtgaagaaacagctttaatagtaaggggtagaaacttgactaatgacggaatgaggtaaacaatttttgtaggaatttagctatttttctcatctttctgtcgcttttctcttaagctttttggtcatactgcagacttcgttgcgcacatatgggtaactacgcgtcaatggaggtaactggaagagaacataggttaacaaaagttgatgagttaaacgtaagtagtttccaagtccagagtgcaagctctgtttctctaggacgatgtttcattgaggtaaagacttagaaataactaaattttagtttcttagtaagtcctggtttttgggagatgttagtttaacaattcttattatgtcaaaatagttggagaatggattaagaggtgacaatttccctttgataatagccaatgccacgatttgcaaagagttgaatcgccttgaagaagagtttcatccaaaagacgtgatagaggaacaaatacagaacttagatcgtccaagatcaagagaagaagttctttgcttcttgaatgagcttggttggctatttcagaggaaatggacatccgatattcatggagaacccgacttttctcttcctcgcttcaaatttttgctcgtatgctctgttgaaagagattactgttctctcataagaaccgtcctggatatgatggtagagagaaatttgggaaaagacggtctgttgaacaaggagtccttagatatgctggctgatattcagctactgaatcgcgctatcaaaaggagaaacacaaaaatggctgaaactctgatccattattccgttaatccctctactagaaacttcatcttcttgcctagtatcgctggacctggcgatatcacacctttgcatttggctgcttccacatctagttctgatgatatgattgatgccctgactaatgatccacaagaggtacaatttctatatttagaatccacttcttgattatttttatttatcattaacccaagttttcactttgtttcagattggattatcttgctggaataccctagtcgatgcaaccgggcaaactccctttagctacgctgcaatgagagacaaccacagttacaacaccttggtggctcgtaaacttgcagataaaagaaacggtcaaatatctctgaacattgaaaatgggatcgatcagattggcctgagtaagagactaagctcagagctaaagagatcttgcaacacatgtgcaagtgtggctctaaagtatcagaggaaggtttcgggttcacgtcgattgttcccaactccgatcattcactcgatgcttgcggttgcgacagtatgtgtttgcgtctgcgtgtttatgcatgctttcccaatggtcagacaaggctctcacttcagttggggtggtcttgattatggctcaatctaaggtttgttatataactaagtgttgttaattcttttggttcgataccaaaagggaaaaaaaaagtgcgatgaaggaaactgagaatgagaggcatagtgagaaaacccaaagacatgtggatcttggacattgcagagatggaatcactcactggtctttggtgagccagagagtacagagaaactggttcaggtcagagcagacatagcttcaacacaacacccaagtttttatatatttggctaattatgttttattcttgcatatgttaatttcccattctcccttaattacagtttttagttgcttaacacaaaagctgttgctattttactgaagctgttttctcctgtgtgtttattgtatctctgtagagttgtgaacgtagttgaacattgttgtaaaattgtaatgtaatacctttttggttaatcctacgtaaaagtagtattagccactacttgctaaacattttaaagggacatcttaaaaagtgaagatgattcttcacaaataaaccacaacggtcacgtgagtctcgtgctattgactactattgttgaggtcggtcaacagtgcattgccccatctttaccttcttcttcccacatttgtttgggatatttttcaatttactcactttatgaatacaaacaaaacaataaaactaatctcttttgtgtgtagttgaaagagataagatcgcagaaaagaagacgatgattcgtcgacttttctcccaacattttgaacaattagttgttatgtgtaattttctatagatagctactatctgattacgtggatcacacttctctttttattattatctctttaggtttcttatcccatataatatgatatcaggtctctttctcgagtaatacattatatatctatgttgattatttactacttgtcatttaagataagatacttaaaaatacttgttattggattttgccggaagacttaactttcaaactctattatatgtagaagatagcggactgaaaaatacgtcgaagacagatacttctattgcataatttttgggtagggactagaaaacttactcgtagtttcgacatatcatccgcaatctcaaattaattgcaaactttttgatcatatctattgaaactatctttctagcttcattaattcgttaccagcccccaatataagctatcaagtatgaatattaagatggatttaacggtgataatagtagtatgtacagtttcttttgtcaacagctgataaaaaaaatgaaagcttctaacagtttgagcctaaagagatcatatatgtgaacagtttcacacacacataagccgtacaactaatatagatatcactttgaccgtaaaaatctaacagtttagatcacacacacacaatcttgaaactagtttaaagcactttcagcgaaaagtactcactagatgataagaactctttggcacgtaacagacgctttcgaaccctacgatttcaagaggtggcttatgtacggtccactcaacttcttcatccgacggtctaagattggtcatgtgggttgaactaccaaaagggccaaaagcgtgagccacgttacattataaaagattttgtctttttaatccaacggttcacaccagaatctccaattcggttctgtctcctctcgtgtcggtccatctctctggctcttcacctctagccacgtgtttctaattttgaccttttaaaattttaagaaaaaaacaaattatttcttgtagctaaaatttagcatccaaattccaaactcagagttctcttctatggccgtatgatacttccaataatccgtatgtatgtgaatatcataatctatcacaaacataatgaatagtagtagatattaagacaatcaaatttggtagaaaaaatatcttcctacgttgggaattatgtaggaccgaataatatagtcggctaattcgatattttgtcgcgaaccacgacataaaattatttatcatcatttgtgaacaataatgattcaaaattatcaataacaccaccttttttttttaagttcctttacttctggggtctctagagacccacacatgtgcacaaaatatacgtgtgtctctcatagactttaaagcaaaattagagaacacttatttttagccaaaaaaagtaattaaagaaaaaactatataaaaacagtttaaaaaggggatgatattaaatgattttcatgtgaattataaaacgtattgagtattatcgtgaccgacttcaaaaaacaagaaaaacctcaacttctctttttcagctatagccgccgcctcctcccactaaactcaaatcctctcatagtcttttcaatcaaatctgctcttcttcactgttgaagctggctatcaaaactcacaataactatggtgattgattgattctctttcttacttaactctgttttagtttctttgcaaattcttatattaaccatttggaactggtctaaacattcttcagggaccgatgatgatgagagcagaagaagataactacaatctaaatcctccaccatggctaatcccaatgctaagagcaaactacttcatcccttgttcaatccacgccgcttccaacaaaagcgagtgcaacatgttctgtcttgactgttcttctgaggccttttgctcttactgtttgctcaatcacagaaaccatcgtgtcctccaggttctttcatcaacttcaaatcatttttttctctcttaccaattcacccaacagagttaagaaaatgggattttcattacttgcagatacggagatcatcgtaccacaacgttgtgagagtaaacgagattcagaagtacatagacatatcttgtgttcagacatatataatcaacagcgcaaggatcgttttcttgaacgaacgtcctcagccaagaatcggcaaaggagtcaccaatacttgtgaaatctgttgcagaagccttctcgattctttccgtttctgctctctcggttgcaaagtaactcttctttcctctgttttcctctgttttgaatgaatatctgaatttgctctgtatagttgaaatgaccatattgcccttttgtttggtttatttcagcttggaggaatgaagcgtgatccaagtctaaccttctctttgagagggaagcatggaagagagtacgaaggtgagtgggaatctgatgaagcgactacaccaactaagatacgcaagacatgtgctttcaaccgtctgatgagtggtctttccatctccaccgttaaatgtgattacttgtcaggagatcaaccgtcttcgagctccggtgatgagagcggttttaaactttctccggggacaccgccgatatataatcaccggaattcaagtagacggaagggcgtcccacaccgtgctcctttctaaaattaatactaacggaagctaattatatagtgtagattatagaaaatgtggttgttatgttgtaactaaatggttagtagtttttaaccttttgagctaggaatatacatattgtaagacatattacttacaggtattgtttggtttttctttttatagtacatatagaaattaggtatatactgtactcaaagggattgaaatatgttttcatatagtttttttgctgtaaatatacgtttgaaggaggtatgtttcttcaacttgtttgtatcgtatactgtgtactatcttcacaataaaatagcaaatatgataactaggatttttaactgaagcgctaatattcgaagaactaaattgtcaatgagaatgatacagacgaataacgagatttaaaataagaaactgtcgatcaagacatgtattagtattgtcagaacacaaaaacattggtgataagctggggcaaaaaacattctgggtctatctatttcaaggaaaggagcttcgactcaaaagaagcttatgtcattagaacttagaagtcgattgttaacaacagttcaaatacttcgtttccctaaattggttatcaagtagtttcaactttaaactcgtgctattagaattttttttttattttcgaacgatataacgtggttcttcgaaacaatacttcgctaaatcctaataactttcggcatttgaaatgctcatgatgtcatgcatctaccttttttccgtggttgcctcaccttttaatggtgttttgatgttaaatttttttatgtataagttgtattttagtttttttttttttttttgactgacttttggatctaacctatgatttaaagatcggagagaccattctgatctttgtatctggcgggtcttgggagatggtggaaaagaaaaacctatgattcgtcaaagatggttgaaagatgaagaacttgaatatgaaggttttttcgattgggacaaatagatgaaaaataaagaaaacataaattactatatgaccttataatatatcgaatgaaagcaatatcattcgactcaggtttgtaatttagtggtttatgttatactgtttccatgtaataatctgaattttaatacgatctaaaatcaaatatgtgtaagttgttgatgaaaaatagaaaattctagagttttataatcttacatggcagtaaagcaaaatttagcaatattgaaatcgttcagattcgggtttacatatagattcaacttgatctcaacaagatagattatgacatacagcgtgagatttttgggacacaatatctcacatttgctgttctcggtcatttgatggctcctccactctaacctttgatgatttaaagcaatggaaaggaaacgataaatatataaatatatatggattctatcgtgttcagacttcggggaatggggactatgttaacgaaactatagagatgattgagacttgagagagcctgataagagtaagtttcaaatttgtagatcatataataaggcccacaagctagttaaacagactctttcatttattttatggcccaatatatagtccttctagagttttaggcagtgcctattagtttcagttgaagtattttagtagatatataattaagatttaagagtaatatatgaagttgatgtgaacacgacgaccacgttatataccgtacgtataagatataaccagaaattaggaaaatttcttgcaaggataggaacaaaagcgtacgtgcaaggtttatcaaaacaaaacggcttaaatactatttttggtagcttttctttctggatcataagtacattttatttggttactaaaacaaatcctattttccagataattaatcatatgaacatcgtcacctgcgcataggacaaaatatcatgaacaagtttagttaataatttgtccagatcctaacacatatctgaaatagtatccaataggatatatatatttaacattattctgagccgtaaaggagttttaaaacttagcaacgtgatatagcgtgaccgttctgaccattcgcacacgtataaacatatatttaaatgtattttcaataagtttgaaaacattttatacttttaaattattcacgtacgtctgtataaaagcatttttctatatagttttcaaaagaatcttaaaacgaaaacaaagaagtgaaatttatttaacttcttagttgatcgaccattagacttgtggaaattgccaagttggaattgactctgcaagcaaacgtgttttaacggaattctatgaaactactcgtaattaaatgacaaattacgcgttcagctgccattaccgagattctaaagatatcttcaagtaaatgacaaaaaaatagttaatgtatttaccatcaacttgacaaatcagactaatcagtgaagacctttttttatgaacattttatgataatatcaccagaattctcatcagtaatcaataaaattagattctaaccgttacaaaatttacaatagtccaacaaaataagtattgcctaaacctcaggaaaatcactcggatgattggattatagattcgagtatttttgtaatggggtcgggggatattaagcattaaatactaatgtagttagttagttcatattagtattaacggctgaacacgtgaacgcttctttctttttgcatggcctgcgaaacctttttcgactttactcggttcgatggtaataactaaatgcgtacggtgttccctagcattcagcttcggactttattaacataattcaattggatattatcctgtatatagtttaagtttttgaatagtttatcaattcccattatattatagtgatggaaatataatactaagatgcaatgataaagttacttaatcaattaaaatgtattctttttttagcgaattattgagaagcatattttaaatacaaatgtcaaaagtacataattaatctaatccaaacacatgtttatagttgcacattaagtaatgttatgacagcgaagtgacagaaaacctatgattacataatcatttatgttaaatagacttactaaaataatcatcggctttattaactaaatacactactccgcaatggggaaagatttttcttttttgaaaaaggggtttcagcaatggggaaacttttgaagtttaatacataaagttcattttccactaaaaagtcctttctatttcatatatacatatacaaggcagcatgagtaaggtgatattttttaataagaactacattggtaaagtagaatagtagattgcagttgagttgtttcctgtgaattggataattaatattagaatcataagtatatatacgtcctaactacttacatgcatgatactgtctaattggtattcgaattttaaatttgtctcatatatatattttataataaggtgaaatctattgaacaaaaaatgttaccggtaagtgaaaataagataaaggcttatggaaatatcttccagatttacaaggaaaaaaataagtgaaattaaagcatttttacagttttacaagttgtaatgttcatcaatcatcactatgacactatccatgaaatgtgaaagatgttccataagatcgattgttatataaattcgactcaactcaaaaacagaacctaactttactcaaaaatactagtattttgtatatttaaatatcattacgactgtactaggaaacacacaaccttgaaaatagcatttcgttatacataaaagtcattgatttgatcatttgcgtttctttgtaccactagctttatcaaatagtatttgcatgatgatagtcaaatacaagttgctgtggtctttcacatttttaaaaaggagagaaaaaaggtagctgcggtttccttattccccacgcttatttatttattgtctttgtttggtctccttatcgctaattttgagtcacgtgttacggctgagagcttcgaagcccacgtcattgctgacatatcttcattcgtacggatcatgtaatctgttaaatttcccaaaacgtttgctacctaaacccgtgaattatttggaagtcaaacttcctctttaatttcggaaatatttacaaattcaggtcaatctaatgtatttcatacaacgagtgtaaatgtattattttgacaaatttgcgtatcttctagttgggttgacaatttaatatacttttaggtcaattttgcatagtagagatatggataagaaagtctatctatatacacacgcacatctacgtattataacaactgtacatcacattcacactatatacagaacattcatctaaaacaaccgtatttattgtatccacacgttttactatgggtgtgtggtccttttaattatcagttactataaattataaacaaaattccactagctaatcaatatgaaattacatttgagtttagaatagtcaataggaaacgatttaaccaaaataaaataactaattcaatttaaatcactgtttttttttgtatccatcaacaatcatatgaaccatttgactacattctctggtcaatttgaattggtatttactactactaatagatactcttataccaatttagataaataaacttaatcctgagtacggactaaaggacaatttgtacagtgagttaaaaatagaaaatttacctaacaatactttttaaatcagtcaaacattttttgactttaataagaaataatatttaatattggccttgtaaaacaagactactctcacaacagtcaacacacacagctaagcatacgcgtcagcttccggtttaaacaaaaaaaaacacaaaccgtaatttggtttccgtttcttcctcttgtaacgaccggttaaataaaatgctgacgtcaccatcttcttctatatatatcctacctggaaccaactctgtatatacgcgtcctcctctctcttcttcctcttgctatcaataaatctctctttctctctacaaacaaaataacgagaacttcaaaaatcaaatgggtctttgtgtatctgttaatcgaaacgagtacgtttcttcgtcgacgacggctaaaatcgtaacaattaacggcgatctccgtgaatacgatgtaccggtgttagcatctcaggttctggaatctgaatcgacgtcttcttcttcatcatcatcatcttcttcttattttctatgtaattccgattctctctactacgacgattttatcccagcgattgaatctgatgagattcttcaagcgaatcagatctatttcgtccttcccatctctaaacgacaataccgtctctctgcctcggatatggcggctctcgctgtaaaagccagcgtcgcgattgagaaagcagcggggaagaaaaatcgccgtcgtagaagcggaagaatctctccggttgtgacgttgaatcaggctaacgataatcggatcgccgccgtgaacaacagaattggaggcgaagcaacgaatatgatgatgcaaaaaggaaagttaccgaatagaacgacgccgtttaaagatacaaacggttattctcggtctggttcggttaggaaattgaaaagatatacgtctggtcgagctaaattggcggttcgatcgtttagactgagactctctactatatacgaaggctcttcgtttaattagagcgattataaaactaagattacattctttttgtttttgttgttatcgttacgaaaaatgtttgtgtaatgctgtttcaatatgatctgtaaattacagctttcactttgcttgtatattttcccattttgttatgtcatgtgtacttatattttataagatagcttcaaaaatcaaatttcagtcacactgttgcgtagtttcatgagattctatcatacacgtactttcttatgatatattattaaattttgttgaaacgataagatgaaattgatccttgtaagtcatgagtcaccagtttgatcgatccgatgattgagtttataacattatttttatgtggatcagtctaagctccactttaggaaacatggttttagacaaatgaaagtaacaaataaaaaatatttcatgaggagtcaaggagataatccttgtaaatttccacaaatggaactaaattgttagggaaagctaaaaataaaaatgacttggagaaaaagtttcgaatttccattgtaaagagtttatttaatgggtgtggtgggatcggaaaggagaccagtggaagctttggcttcacggccaatgggatttaacgttctaagtctattttaatcaatttaagcttcagtctttagacttttgatgtaagatatttgcaatgtattaaactattaacaaaagcttttttataaaaaaatctcgatatcattatccacatcctggttagttcattgttcaatcaattagttacaatgatactattcagtgctactaaaagaagtttgagtccaaatgttagaatttagatcaaaacatgacgtacaaatataatctaaaacatataaattgtttgacaaaaatatttagttgtacgtgttcaaaccaacacatgatacatgttgatatttagttattcacttgttctatacacttttgttagcataaagaataaaatcatttaatttagttctttttttgtcaaaagaatttaatttagatattacaaatcttaaaaattaaaatcaaaactaatccactaatctttgatcatacattgtccctcctcataaattaaagtaaattaaacccaaaaaaaaaacgagatacaaattcctgaaaatatttggctcgcactagcaaagtaatctgcaacgaaaattcatcttcttttcctttgaggcgcattgatctcaatctcatgacacatccaaaatagggctattgaaaagtctcgtggtatattttgtcatattagtttttttttttttatggaatttgtgtgaacccttaagattcgaaatggggctgctagtcctccgtgtgaccggaaagtctccgacaatgactggctgtttctggcggcgacaacaataactaatttttcttctgatttctcgtaaataattatgtcaccaacttatgtacaagactccaaatgaaaatatactcaaattttcccgatttggtctatatccccgaaaattacaagtctacacacgatcggaccgttgaatttggccttacgggaggcaaccattattattgcaattctttatttttttaagtttttgatatttttgtaaccttatcgccttatttgacccctttgtataaaacaaaatattttagaaaaatgtcaactgtcaacactataacaaatagttcatcgatttgaaaagttcgattcgatttttggtatatgatacgttgttttgttatgtaaaataaataaaatgaaaataagaattaaagaatccgaacatttgttttattttagtctttatccgaatcgggacgatcacattcacattcacattcacatttataatcctattatccagacttcaaaattatgacgtgtatgcacaccacacaccctggtcacatatactctatgtgtttcaaataataaattggttgtttttgaatcgtagacacaaaataaacgaggatttgacttttagacatatatcttgtttgttcatactccattagtcgggcgacaaatgaaagagtgactggaatcgtagcatacattttctcggctcctgcatttatgagaaataatacagtggagttttaatcagcccattaaattagctacttgacccatttaaaacaggcccatcctcgagaagcttttctctattctctagtcttctaggctgcggcgatgcgtacatggactgaaaaactcaggtaaagaaaaagcaaatttcgcaagaggttacaagtgaagattatattcttctattttcaaagagaactaagatttaacccacggtttaccgcgggcaatcggtttatttggtttttatactaaatatttgagtaaatttgatatcctaaacttataaatataatttttttaatcaaacataactaaaaagtaattgggatttttttgttgttatttagtgataagaagaatgtattaaaatgtgtttaacttttttttgcttgttatttatttatttttgttaaacggtttagattgaagggaattaattttattgaacggtttaggtttaatcggatcatataaagtttaggagattgttaagaccaaattacccttaatgattttgaatagcaaagaacaaaatccaaaattgaaatcaaaattgaggccaaattagacaaaatttcaatttgtactttccttttaataataagaggattgctcgagtcgtctactatttagaagaacatacccactatatctgaaccaaaatcatgacaaacaacaataacacaaatatgaacctctaaagtataactttattatttctcattgttttgagtttttttgttttttttagttatcatttttttatcgttgtaaagaaaattagataaataaaaaaaggaatataaatattttaaaaactcaacttttacgttagtttgattttttatattatacagcttgaaacacggtttttcatatttgtaagattaaagtatatcaacaaaaaagacgtagaaccaaaaaaacagttcaaagaaaaagaacacaaacgcagatattgggttcttggacccacttttttgtttggccaccaattatatcagttccctctattcccttctccttatcaacatcatttactattttcataattttggatcttgtttcgcaattacatgaaacgtaagactaaattcaggttagtttaccgccagttggtgaacacactactaattaaggaagaatcactcgaaaacagagaagacgaaagtacacgcatgcatgtataaatgtacaataacaaaataataacttaaaatacattaaaacgaaaaaaaaacatcccctccacttacatctcataattataagcatccatatataccatcaaacttactctcattctcttctcaacttacatttacaaagaaaaatataaaaaaatgagaacgattatcgatttaggaaaacaaaaaagtcatctacaaatcattgattctccgacgaacgttgactgtactcgtgaagtcggacttcgaagaaccctccgttcactcatggagtgcgtaatcccatattgttgcacgtaccaacctcctcccaccgaccaaaacgacaccgtctctgtctcttcatccacttcttcctccgaccaaacaggcgttgtcgtcacgggtactttctatggtcaccgacgtggccacgttagcttctgcctccaagacgacactcgtccctcctctccacctcttctcctcctcgagctagccgttcccacggcggctctcgctcgagagatggaagagggttttctccgtatcgctctccggagcaaaagcaaccgacggtctagtatctttaacgttccagtttggtctatgtactgcaacggcagaaaatttggatttgcggtgaggagagaaaccactgaaaacgacgtcggatttctccggctgatgcagtctgtttccgttggcgcaggggtgattccaaatggcgagacgttgtatttgagagcaaagttcgagcgagtcacgggatcaagtgactcggaatcgtttcatatggttaaccaaggaggtggttatgggcaggaacttagcatttttctttcaagatcgtgaaagtaattaagaaaaatctagttatgatggatgttatttgtaatgttcgttttatattgtgtatgttacgacttaggagatcgtttttacgaacattataaatataaaatttgtgtggtttatgagaacaatgataattgcatccctatataacaatcataaactaaaagatagtaacatgttactattagctaatttagcttaaccttttcccgaataaatttaaagaaacgattcaaaaataattcactacaaaaaaatgatcatttcatatcatattttaaatatttgtattacgtaatgtaagtaacacattacttgtcagaaaaaacggtatagtttatatctttaatattcagaaaactatacacgaataaagaatcaattatctaagaaagttaaatcatattcattttaccaaactaaacacataagctgatcattctacaatttttatgaatagtaaaattacctatccaacaccttgactttgaaattttgataatgatatacatcctgatcaataattctgcaatgttgtgtacacatgaaatgttggtagggagatgatgaaattgtattggtgtatccggtgtccctgctttgactcctctcatgccattttgcatttgtaatttacttcgaaaactgagtaatcaatcctcatgggccaccggcgcgtggacagtacgcacgtgcactggaggagtctgatcaaggcgacaattgaaagcaacgttcgaccaaacagcaacaatcgaaaaatctggcttagctccggtgtctgctttggttccgaaccagcaccgttccatctcctcttctaccttcccatcaaattagggattttgctctttccaccaaactctcaacttttttttacaccaaattcattaattccattcattactctcttgttttttttttaatacgtagtatacatatacactatgcagctaaaaattatggaaagtcgtggtatcgtgaaaatacgtgtcatatgagaatatatagtattagtaaataatatacatatgaagatagataaatacgtacacattcatttttattgtatggattccggtttttgaatatatatacacacacacactccatacacagatgcactaaattaaaatatttattacacatactagaccacgtctcataaaatgacaaatacatgtaggaatcatgacatccagcaagggatctaagactttgattatctgattgatatgtttttgtgccccctttggttccctcatgatttttcttcttcttctcaaatctcaattattagttttttttttttttctttttcttttgcgtctgtcgtaaaactcaattataagtgttgatataaatatcttcgacttttattacttttctgaaagaaagaaagatatatagactaaaaaaaattataatgaaactgacgagaattagaaatttatatgaatatatatgcacacaaggttcaatagtttaaagttttaaacacaactcgttgacataatggctccaccaccatctcctcttagtatatttccacgtgcactctcaagtctcaaccccacggctctctctcttcatttttcttttgtttctatatatacttttatgaatacaattgctcgtgattcgtattgagatatcaatccaaaaaaattatattttgtttaacttattttttccttgcctgatcttatgttgatctaaaattttaccacgctactttatgtgttatttttatgttactgttgttctctatctcatacaatttgttaacgatagcaaactaaaaaataaaacgaccaattaatagaccgagtgataatgtcaataaagtcataaagatgtaatgggtacggttgagtttcattacttgtaataataataagatagttgcaaggtttggtgtatattgtgtttaaatgaaataattttttgagctacatgatttatgtttagtcgtggctgcagatattttgagatgtacgtagaaattaaacggaactgaggtgttaaaaagtcaatggcatttggtgcctgcagagaaagacgggcgggctagttgataaaagctcaataaatatgggctggtttagggttaaacagcgaggcccatttgtacaaaatattgacatcgattatttttgttttgcatttgtggatccccaggctgagattacaactcagaaaattacaaaaaaaaaatagataataataaacaacgattataatgatgattctttcaatttgttatgttagagaatcacaatgcttccacacgtgcattttatatcacaatttagattatgataatttgaacaatctgacaaataaggattatttaaataattgacttgttatgttattacaaaataggtactatgagttagacaaaaaaaaagaaatctggtggaatggcactgaatcttagatagcacgtgtcacgtcgaaatattgcgtgcaagtatacatgcgccgttactaacgctgttatagacttatagtacactgaaactgttcatatagtgctgtaatattttcgtgaacttatgaaataggttcaatttcttttgttaaaatttgggtgtcaaagcgggttaatatattttatgaattttaatagatagtgctaaaaattggggtcttaaaatagtaactataatgtcgtcgtaccattgcggagtttgcaagccgatctgcaaactcttcaaatttaaattatttttcaaattttttttcctgcttagttctttatcaaagtactaggattaatgagatcgattattaatacttattagtacagaagtataaactagtactgagtgattaaggagatcgagtgggaattggcggtttatattaataaactagtactgagtgattaaggagatcgagtatacaaattactagtgagctatttttaagatgctagtataactttatagtatatcataactgttttttcatacgaacatcggtttaaatgaagtaagttactcaaggctggcctttcatgtgtttaatagtactaaataagatagtaccagtggccggtaaaattagctagctgttatcaattgttatataatatacatgttcatttattttatgtattattagactatgagatgatatgagtacagaaaaaaaatccaataaatatgtatataaatatctagaaatgggtagataaactatttaaatgagtcactcaacgtgcctgagtttccttttcgatttaattgtcctcattgtgaattggcataaaagtcggtgcgaaggaaagccccaaattatttaacttgaaaacgaaagtttggtccacctctctatattcatttttctgaaatgaaattaatactcaaatcaattttgtcataaaaattgtccaattattaaagtattcagtcgtgtttctatatatatcactgtctttagtcagctagtctaatattgcatatttgcattcacctctatatatgtacacacacatctacgtatggagaaaacattgtacattcactacattcgtgatctcatttatctttagatggctaaaaaaaactcagatagaatatcacacttacccaaaatatactattctttcgtacgaaatcttattactagcacatgacgtgtgtgagaaaaagtacactcattggacattcaaaggtgttaatgttaaaattaacaattgggttttctaactatgagccactaaatcatcttctaaagtcaattataaattatacgtgacgttacttaatattggaaataaatattggagaacaattataagtttgaaatagaaatcataattaactattttactactccaaccatttataactacgaagctaccttaaaaaagagaatgacatgggtatgactttgcccgttttttcttaatgaatttgttactctaaagtcataagtctctaatccgtattaatagcagtaattaatggatacaaaaaaaaatcaaaaagaaagaaaaatagacagggtggcatcataatttatggggacagctgtcgaggtgatgcatttatgaccactaacatgcaatggcacggatgcaaattttaattgttagattcttctacaaaatttacttaattcaatacttctgttttcttcttcttcttcttcgtaatttaatagattctgcatattgtttaatatttattttacatgccagtgatgggttgtcattattctgattcatttttctataaaatcattataaaagtattttcaacttcttgacaaaaataggtgtttaattattactacaaagttcaggtcgattgttatttcgggctacataaaaaaggtttgatttctcgtatgggagtgattacaacatatttattggtattttatgaccccatgtcaactcttatgtagtaatttgtccccacttattgaattgttattagctcaaaggcattaattgcacggtttctaacttttcttctatagtagtatgtttttcacatttgaaaaacactaatcattttcattttgcatggaaataagaccaaatattttcattaatccactaaattgcatttgcaacacaagcccaaatcattatatatataaatataatatattattgtgatgagtaaaatatagacatgcaaagtgactatgaactactgtaattatacactgcaagaaaaacattgccataaatatgaaaacagaagacattgacagatagtaataaaaataatactatatctctaaatataattcagatgttaacgaaagtcttgtggagtaaaaactgggtttcacacacttcacttgcctctcaatacccgggaaaacaaaatgtcggtttcacttgctacttttcccggaaagttacaaagtcattcccttttcaggttgtgaagtcacattaacataagagaagaagcaaaaaggcttggagctttattttttgcttttttttttctttcttctagaaaacatgatcttgagtttccgagtaagattcttttaaaaagagtttgcaaagaacgagaaaaatgatggctctgatgaattgtgcatattcatcttcttcttcgtcttcgtctacttcctctcccacttcttcatcatcttcttcttcatattctccaaggtatccttatttccattttgcacaagagactaaccaatctttgagtcacagttaattgaaattttctttgtttttgttgtttgtaggaacagagagagcatgtttttgcagagtgtagttgatgcgtcaccttcaagtttctcttccgacagaaaatctgtacggtttccaaatcatttcatctggggtttatattggtttttgatgcaagtttgcattatgaaagtgaaaaggtgtttctaattcccttacagattttaccaattgagaagactttaataagacatcagaattccagtctctgcttgatcccaaaggttcgtttataactaagtaatcaaatctttaatattattactgctttcttgttttactatgtcttgaatcttgatttttatttcagtcttcagaagaattgaagaaggagattgcatcaattgagatagagattctacacatggaacgatatctcttatctctttacagaaaatcatttgagcaacaacttcctaattccttctctaatctctctgttactactaccttacctcgttctgtgactacttcaccaacatcactaactcattatcaagcttaccaaaaaccaatctcatatcctcggagtttcaacactagtttaaaagccttatcttcaagggtaaactttaactataatcaagtctttcttgtaaacaaaacatttaagtgacttgtttatgtgttttctcttttgcaggaagggactagagtagtttctggtactcacagtcttggagagcttttaggatcatctcatatagttgatcataacaacttcataaacccgaataaactctctgaagatatcatgagatgcatttcttctgtgtattgtacactttcaagaggatcaacgagtaccacttccacttgttttcctgcttctccggtttcctccaatgcctcaaccattttctcttccaaatttaattatgaagataaatggagcttgaatggcgcaagtgaggatcattttctgaatcactgtcaagatcaagacaatgttttgccttgtggtgttgttgtcatagaggctcttagagtacatttagacgatggtagtttcggttacgctgctcttatgcttcaaaacttcaggtaaaatatatatagtttcaaaatatacaattggattgatctttatttgtattatgaacaatttggtatgcagatcactggttcaaaatcttgagaaagttgatccgagtagaatgaaacgcgaagagaagctcgcgttttggataaacattcacaatgctcttgtgatgcatgtaagtaataaacaagctcttagcttatgataatctttccttgttaataatcttttcataccataattttcttctttcaaggcttacttagcttatggaactcacaaccgcgcaagaaacacatcggttttgaaggttaaatctctatattagacatataacattttagtaaagtaacatatatttgatgtttttcactaagcaattctctttacataaccacaggcagcttatgatattggaggctatagaataaacccttatatcatccaaagctcaatcttaggaatcagacctcattacacatcaccatcacctgtaaaccatttcatcttactttcctttttttgcttcattctcactttcacttttcaccacatagtaaatgcgtaatttacattttgcagttactccaaactctgttttccccttcaagaaagtcgaaaacttgcagtgttagacacatttacgcattggaataccccgaggctttagctcatttcgctatttcttcaggggcattcactgatcctacagtaacaactataaaccatttcaactctaaatgatttcagttatactcctagattggaattaactgtataacattattggttaggttcgagtttacaccgcggatagaatcttccgggatctaagacaagcgaaacaagagtatatcagaagtaatgttcgtgtttacaaagggacaaagattttgttgccaaagatctttcaacattatgttaaagacatgtcaatggatgtgtctaagctcatggaagcaacatctcaatgtttaccagaagatgcaaggaaaattgctgagaaatgtttgaaagagaagaagagtaagaattttgaatggttaccggaaaatttgagcttccggtatgttatcgccggagaattggtcggagcaagaaataagacgtgaagggtttattcaagaaaagtgttttttttttgcctcctgatgtgattaaataatctgattacaattagtgttcaatttcattttttttttcaagtgagaaattgtaaaaccagtgtttgtttgtataatcttaataaaccgagaactactaaatactaattaaggttttaaaccgtgtaacgaaaataactgggagtaaaccgatcgagcaaaccgggtcttaaagcgaagatacttgggcctgggcctaatattcattccactaatccagggtttaataagtaatgtatcaaaacacatggcgtaattttgattttgataatactacaagggcctaataaataatttggtttttgtatcttgacgccgatgatttgttttccggtgagaggaaagttagggtttgagtaagagatagagtaaacaagaaggaagaaattcacatgtttaatctttcccttcttaattatcttcacttcagattgaatattattctttcctggtttccaaatcttcgatctttcacactaaatttgttctaaaacattgaggaagacgacggtgaggatggaattagagcagcttaagaagtctgtagaagagaacccagatgactcttctctacaattcgaactcgtaagttgttttccgaccataaatttagttcctttactattggttctcttggtatcttctgctaatggaattttttttggaactttgattttgattgcagggtttgtatctgtgggataatggtggagattcagagaaagcggcggagcattttgtgttgtcggcgaaatcagatccgaataatgcagtggcgtttaagtatttagggcattactactcgcgtgtaacgcttgatcttaatcgagctgctaagtgttatcagagagcagtgttgataaaccctaatgattctgattctggagaagctttgtgcgatttatttgatagacaagggaaagagattttggaaattgcggtttgtcgtgacgcttctgagaagtctcctaaggctttctgggcattttgtagattgggttatattcaggtttggtttcaattggcctcatctgttgctgcaatctgtctttattgtcttgctttggtgatcaatggctatggattctatcacagcttcatcagaagaagtggtctgaagctgttcagagcctacagcatgcaattagaggttatcctaccatgtctgacttgtgggaagtaattgtcctttttctcttcttctagttattaacatttccttacattgtttctttactatatgaccgaatttgacaagaattatttttgtctgtctgtcattgcaggctctaggccttgcttaccagcgacttggaatgtttactgctgctatcaaggtaaagacactgtttcctcttttttgtacctgtattttcccagtttcttgaagtggtttcgttttattgttgattctgttgtgaccgtaattctcaacgatacaacaggcgtatggccgcgccatagaattagatgagaccaaaatttttgcattagtggaaagtgcaaatatctttttgatgcttggctcatatagaaaggtaacctttgtatccgtgtctgtttaaaatgacctctttggaaggtttgtttgagtctcatatagtatttgtatagggtgtggagctatttgagcaagcactgaagatttcacctcagaatatttctgtgctctatggtcttgcttctggattgcttagttggtcaaaggaatgcataaatttgggcgcatttggatgggcagcttcgttattggaggttaataattctaaactcttctgattttgtcctgatctcatccatattgaatataactgtatgagagaacgattaatggaaatccactgtaggatgcccgtaaagctgcaaaagcaagcagtgaactggccagcagcatgtcttgtatatggaaattgcatggagatattcaggtacttaggcggtccttgtattttaagtgtaaagctcgttcgttatctgggtatctaatgtgtaatccttgagcagcttacatacgcaagatgctttccatggtctggtggaactgaaaactcagaattcactttgaagacatttagtgattcaattctttcttggagaagcatttgttactcagctgcattgtcagccaaagcttcttaccagcgagctctacacttagccccttggcaagctaatgtttataccgacatagccataacttgtgatcttgtttcaagtttaagcgatgactctgatacttcaagttcttggtaagattatactaggcgttatttggcattttcttagtttttgatgtttgcccttgtaatagtctactattctatcaggaagctaccagaaaagatggtgctgggagcattattgctggaatgtgaaaactcggagttctgggttgctttgggttgtatgtctgataacagtgctttgaaactacatgctttgatccgggcattgcatttggatgtatctttagccgttgcttgggcttttatgggccaggtattgttccttaacattttgtctttctggcttcgtatttgatgtcctggctttatcaaggcttgcatttttgtttcacatatgttcatgatttcagttacggttccccccttttgattgtaatttcggttgcttaaacagattttcagggaatcggatgaaatgaaatttgcaaagcaagcttttgattgtgctagaagcatagatcctacacttgcgctaccttgggctggctcagctgatacttatgcgaggtagatgctttttatgtaaaagagaattctcatgttttcgaactacaattttgcccacatagactaattaacatctcagggagtcaacatcagatgaggcttttgagagttgtttacgagctgcacagatatcacctgtaagtgctaatttaatcgtggtttacttacttgtaagtgtgatggctctaattgaggcgtgagataattctgtccagcttgcagaattccaagttggtttggcatggcttgctttgctgcagggaaatatatcatccccgcaggtataaagacagacatatatatatacataggatttttattaatccaaagttagctttaagtaatttcccctcctgaaactgtgttgcagatttttgcttgcattgagcaggcagtgcagcgcagcccttattaccctgaaccccataacctccatgggctagtttgcgaggcaagacataattatcacactgccattgcttcttataggctagcactagctgcaatgagtatttatcccgaaagttcagtaaaatctcatgctggaaaagtatctataaacttggtcaggtcactcagcaaggtgagatgcgtacccttctttccattaacatgtcttcttaacagctattttgagtttggatttaactttgattcaataatcaataggaatgtaaatattgtactcatttgaagttcttttacaggcaggacgattcaaagaatctgttatggaatgcgctaatttgaagtcaaaaggtttgtacttacaccattcatcccccagtttgaaaggctgggttttcttgcaactcttactaactttaagtcaaatgctactaagtttactaatatctaaaaaaaatctccaaaaggtttgcttgatgccggaggtttgcaaatatatgctttctctctgtggaggactggtcagaatgattcggctctttcagtgattagggatctggctggtaggatttctaccagggaaaaaacctccatagccttcccaatcagcttcatctgtagtctactttattgcatatctgggttagattctgctatcaccagcatccagaaaatgccaaaggatttcttccagagttcgaaaatcagctttatagtatctgccatccattctcttgatcagagtgatagacttcagtcgattgttgcaagcactcgtagctatataacatcacaagaagaaatagttgcaatgcactatttgatagcactcagcaaattggtgagccttttgatctcggttatcatgtcggccccttcgtcttggaattctttgttgttcataaacttgattgaaatgacaacactctggatattgcagctgaaaactggagcaggagatttccttggatatgagaaggggattgcccacctcagcaaagctattcatatgtatcctcatagtaatttgataaggtgggttttgataaagcgctctaggttttaattgtgtaatgatatgttggtatcgtaatcgtaactcggaaataattttttgttggaattaggaacctgcttggatatattttgttagctggtgaaggaatgaaagatgcatgtactgctagtagatgttgtatcataaatgtctctgagtgtgcaaataaggaaggtctgaagtccgcattggaggtccttggtggaggatcagttgcttgcaatgtaattggcaatacagctcctaggttctcatttccgacatgccattgtcagtatctgaatgctcctgttgttgttgtagaattgcaaaggtatttgagaatctttctacatcattttagcattttcagaatctgaattgatttactctcaaagtggtgtctagtcgtcctgttatcattgacaactcaatttttgatccactgtgctcagaatctttcgtatatgacagagagctaagagcataatactacagaaaatatctacacttaaacattttttaaattgtttttcaatacgcagattcttgcatcaagaaccttcgaacagcagtgtaagatacttgcttattctgaatctcgtgcagaaggcacgtgagcagagatttcctcgccagctttgtagggctattgagcgtctaatatctgtggcactctctgatgagacatgttcgaaagaaggcgaatataaaaaattccagcttctgctttgtgcttctgagattagtttacagatgggaaatatagcagagtccattaaccatgctcgaaaggcttcttccctttctcttccaagtagctatctatttctaggacatttacaactttgccgtgcctatgcagcaaatgggagtaccaaaaacatgcaagaggaatacagagcgtgtttggaactcaagactgactcaaatattggttggatttgcctgaagctcatagaatctcagtataatctggaacctgatgctaacctcttagagatgagcctacaagaatgctcgagccagaagaagaattcatggaaagaatggatggctgtatacagtttagctcgtggcttagattctacagggaaaaaagactttttctcagcagaggaattc

SEQ ID NO: 1255 - DNA, 39456 bp, Arabidopsis thaliana
gaattcttgattcactgtcttcatttattcggaagagcctcttgactttagtgccgactgcttcttctagctccaactgagtgtactcatccataagtttttctggtgttagattcagacaatgaccaacactcgcacaaccgactttagttatctccattctttcttctgcactgttgttctaagtgttgtgttcaaaaaagtttccatgtaaagttgctgcttgtacttccttctctaaggaacctttcacatcatcatctttgtttgagtgaatctccttccaacattcaactgagttttccaagattgctgtgattaaaatcagaaagaaacacggattagaacaaaattagtttagccataaaactgaaaaagtaactcaaatcaaatgaatacaagtatataccttctatagagctacactctcagatctaggagtgcaaataagagtttctctcttagttttggtagttttctcagcaatagatattgaaacgatattcttaacaaggtaacggccagtagacacgactagctcagcttcagtgctgctcactggtacttgcactgaagcaggtgataagcgcttgacaaaaagtacagagtgtgatgatacttcctctttgtcctccttaactgcagatattaaaactgtgtctcgctcaattttctcttcacgttgtccttccataagttcagaattcaactctttagtgcttattatttgagaaactatcaactggtttttccagtgtagaatccagaacattctcataatcataacagatcctgcacctttggtttctgaggaaataaggtgaatcatcaatcattccttatggcttatccttaatgcactcttgattcattttcttcaactactattggagcctcaaatgaattatgtctcgaagagttccttgtcaatctaacatttagcttcttgaatcttgacattttcaacagaggctccatttcgttcacagtcaatactggaacaacttttctgtgaattactcattgcttccagtattcaaaatgtatatctcagagaaggacaaatcacgtcgcaacgtaataattttttgcaaataatctaaattaatctaagagtcatttttgaggataaaatcgagttactgacatcttgtgtgtctgtccttcataccaaattatccggtcaaaaagccaccacaccggaaaatattattttcttatcatcgccatgttttgatttttccacgtttacaccttttaatctaaaaatcaatatttctggaagaaaaaaaaaaacaaattaaaattgtcacacaaatcacaaactgaaatctcaaaatcgaaactaaaagcttctcagatctctaactatagctcaaggcggaggagactgagatcgatcatctgaatcgccgaaacatgtcgagcgatagcaatgatcttgacgaagatgagcttcttcaaatggcgttgaaagagcaggctaagagagatctcacctatcagaaacctccttcatcttctgctcgtaagcctgttgccaatttagtgcagcagcctcgacagcagaagcctgtggctgcggctgccgctccgccgaagaagtctgctgcggcggttaggaagccttccatggatgaggatgaggagtcggaggtggaattgcttagcatttcgagcggggatgatgatttggagagggaaagggaaataggtggttctagtggtggtgcggggagaggaagaggtagcgatgtacgagagaagggaagagcgaggaaggaagatgatggtgcttgggatggaggagagcctgattgttggaaacgggttaatgaagctgaggtatgtatttgtggcgagattcatcagtgaatgcttatggctttgcttgttcgatcaagttcaagagtttgaattcgatatattgatctatttgttgaattgtacgacactgaacaataccattcgtgggatacggtgaatgctatccatagtttctggtgttgagttgatatagagagcttgataattagcatgccattagtgattttagaaccatagcatcatatggatgtataagtggaaagatgaccattttcactgaaattccggtggcattttggcagcttgctcgtagggttcgtgatatgagggaatcgagaacagcacccgtggttcagaaagtagaaggtaaagcacctgcacctgggaagaaagtggctctgactagtttgcagtcacttcctcgtggaatggaatgtattgatccactaaaattagggtaattgctctcgtttcgttttgcttaccatggaagccagtcagatgctttgtactctgtctttgatatggtagaacatatctaaacctgaatttgtctacttcataggatcatagacaataagacattgagattaatcactgagtcgtcaggcagcccatcaaaagctgagaaagtggataatactcttcgcggtatgtctttctttaccatatctacaactcgagtgaacagtagcacttacaattttttggagggctaattcgatgtacaatttccagttgtctaattgttatgtatctttttctgagtatttgcagaaaaattggtttacttctctgatcatttcgatccgaagctgtttctttcccgtattcaccaagacacgactgcagcagatttggaggctggtgcccttggcttgaaaagtgacttaaagggtcggaatctgcaaaggaaacaattggtgaaggacaattttgactgcttcgtctcatgtaaaacaacaattgatggtatgtattattacttccaactgaataatttatgtttttttcttctttcattttcatgttgaccactgattttcttaatagatattgagtcaaaactgaagcggattgaagaagaccccgaaggttcaggaactactcatttgtttaattgtatgaaaagtgtgacatcgagggccaatcttgcatttgagccactttttgagagacaggttggtgtgattctgatttacttcttttgcttgtcactctctttcattttgctgaagcctttttcaaaatcacatttaggctcaagctgagaaaatcaggtctgtccaaggaatgcttcagagattccggacactgttcaatttacccagtatcattcgtagcagtattagcaagggtgaatatgatttggctgttcgagaatacaagaaggcgaaatctattgctctaccttctcatgtatgcctgaattttcaatcacactctcttgagacagatcctatccacattcctataagcactgagccttctttttattacgatttaatttaattacataacaaggctcttgacaatatagaaaaacaagctgctttcaggttaatatactcaagcgtgtactcgaggaggttgagaaagttatgctggaatttaaaggcacactatacaagtctatggaagatccgaaaatagactttacaagtgtatgtcagttataattcattttattttaatgtcaactagtaattaaactgaacaatccttcattcaaatattcaccaaatgcattaaccatactactgatatcatgtcaatattgcagccatcatgaatgttaacttttatttaggatatcccgttttacattttcccagttgttgtacctactaaataaaatgactaaatttttttccagtctatttttttgtcttgatatctgaggtctgttcttattttagctggaaaacactgtgaggcttttgctggagctggaacccgaatctgatcctgtgtggcattatctaaatgttcaggtcggtatattcgaagatgtcactcttttactacttcttactatgttctgtgtggaatctggattcctaatagatttgctttgagtatcagagtgacttttagcttataaaatctttcatttgtttcaacttagcacatttatatgtctcctacactttttgttgcaatcctcgtgtattttcataattggctctttaattacagaatcatagaatccacggcttgcttgagaaatgtacatatgatcatgaagcaagggtggaaattttgcgtaacgacactcatgagaaagccatctcagatgcaaagtggcaacaaattcaacaaaatggcgtttcatatgtgagtctagcattgagaatgatatatcattaaaagactattcaatattcagttctttagatgataacgtgccttgttttttcatcctctagtcagataccgcctcttctaatgaaaataatgcagttcaagttgacctacaatcagtggaattccccagcgaagagattgatattttgaagggaagatacatcaaaagattgactgctgtgcttgtgcatcatatccctgtgttttggaaaacagctatatctattttcagtggaaaatttgccaaggtatccgctattctttctgcttagatccctatactgacccaagagtagattaattctgtagttattatttctttcttgaattggaaatagttcttcatttgatttgaatttaactttgatttgcttagtcctcccaagttactgatacttcagccaataaagctgaggagaaggtcacagaggcaagatattcaactcattctttggaagaagttgctgggatgatacgcaagactatttctgtctatgaagcaaaggtattatctttgttttctaattaagtgacctcttcattggaacttttcttcacattagaaggacaatcctgtggtatctgtgctataaagtggctctaaatattttcttctcctgattactgctgttgtaggtgaacagcacattttgtgattttgatgaatcatgcattctccgcccatttatgagtgatgccattaacgaagtatcaaaagcatgccaagcttttgaagccaaagagtcaacgccccacagtgctggtatttgaacttcttctgaagcttgagcttgctgtttaatttaagtagactaagatgctgtataacctttttggttatggcagtcgttgcactgagaaaaatccaggcggaaatcactaagatttatatccaaaggctttgctcttggatgagggcctccacggaaggaatatcaaaagaggagacgtggatcccggtttctattcttgaaaggaatagatctccatatgccatctcttacttgcctcttgcattccgttcagttattgtctctggcatggaacaagtcaatctgtaagtttcaaccgtattttggtaacatatagaaaatatttacattgtgaggtttactacactgtggaagtgaaaaaccccagttttttctatttgttgtatttggagttccagacgtctatgtttccagtacatacatcaaggtctagtcttttctgtatacattagaaaaaacaaaatgccaatagtcagtaattgtgattctagcttgtcataccgtgattaccaattctatgctgagacatgtaaaatcaaatgactgtaccatgtttgtatgataggaaaggggtcttatatgcttctcattgctattcaggaaactgcatatacaaatgtgtacttttttcataccacagtgtttactttgttaacctgttgatttccgtgtatacctttttcaggatgattctgtctgtcaaaagtgaagctgccaaatcagaagatatgtttgcccaaattgaagaaatcataatatccgttagactggcatttttgaactgctttctggattttgctggtacgaattttaaccaagcatccttgataatatcctcatgcaaacaccggaatgcaggcaaatgcacactttaaagtggttacgttgatatgctaatttgctttcaccatatgccagcgcacttggagcaaattggtgctgatctttcccaaagcacctccagacaagataattggaaaaacggatattctgatgagcatcaggaagaaccatcagccaacacctacggaagtgtaattgatcctcacaggcggttgttgatggtcttaagtaatataggttactgcaaagatgaacttgcttcagagctttacaacaagttcaaatatacatggttacagtctaggttagtccctgcttaataaacgtcattagtgctcttctgaacatcgtctttactaagtggtaaacaagttgggcatactcgtgcatacttaaatgagtcaaactggataataggtattaacggttaaatttgatgtgattcataatcaaatactgttctcatgggtggattttgtatatggtgttatagctcactaaactaagatttttgtgttttcacttattcagagacaaaaatgaagacagtagtgatcttcaagatctaataatgtctttctctggactcggagagaaggtcctcgagcattacacttttgctaaggtattaatttttttccagccatattagcctatgtatgcttttgctaagtgttataaatagaactttaaatttccgagaatttcacctgttcaggcaaatttgatcagaacagcggccacaaattatttgctggactctggtattcaatggggatcagcacctcaagtgaaagtaagaaatctatgcgaaacgatatctattagcttcttgatttgaatgaagaaaagaattacttaaatatttactccaatcttccagggcatacgagatgctgctgttgagctgttgcacactcttgtagctgtccatgcagaggtatactcatgaaaaaaaattattggtcgttttgtggttctttagacattttgacattaaaatgtgttcctcgacagtgttcatagtgtaaaatcctaataactttgcaccggaaaataaaactgcaggtctttgctggtgctaaacccctcctggacaagattcttggcgtgctgatcgaaggtctaatcgacacttttctgagtgttgtggaagaaaacagatcaagtgacctaagatcaattgatgcaaatggtttctgccaactgatgtttgaggtaacttgttcttttcatcattagagatgctcactaacaaaaacttcatctcataatgagaaacaaagttgtttttacagaagcagagaagctttgcagatttgtgatttgctaattctgaattttcatcacaactgctgcagcttgaatattttgaaacagtactgtattcatattttacaagcgctgcaaccgagtctcttaaatctctacaaggaaccgtgttggagatagctatagagagcatcagtgaagcagtcgagaccccagggcataatcgtagaccaactcgtggcagcgaagacacagtttcagatgacaagcaatctgtttcagcagatgacctcctcgtaacacatacatttcctttctcttttcaacagatttgatcaaatatcaaaacctcaattttgatcattttgttttatttcgtgaacaggctctaacgaaacagtgttcaaacgaattgctacaacaagagttggagagaactcgtgtgaacacagcatgctttgcagagtcagccccattagagtcaacgcctccattacccaaagctacctactcttcctttagaggatcaatggattctccaagcagaaactacagaggctcacaatcatctggttctcccattaatgcccgacccagacgaagataataagagaccaactttgtttatttaataatttcttctccgtttatttgtacgtaaatgatcataattctcttgttcctggtgcatttttttgtttgtttgtctgtctttttcagactcttatctttatttgtgaactcagataattgggttgtaattagtatatcacacgatcaaagtatctgaaaagcattggaaatttaagcaaagtagcttcttcaagcttgttttagttaagacaagaagtgactaaatacaagaatagtcacaaattccccttacgaaaagaggacacaaaagatttgagtttgaactcaggctgctgtcctcagcggtggagacaccaatatcactccatctcctctcacgaatagaaactcaatcgtccgctttgtagtctgcaatcagagatagtaaacaaaactaatcacatacatgagagacaaaagccacttatcctaatcagatcagaattgtagcccgcctagaggagtcccaacaactaatatgtgtgtgcctaagaagcttaaagaaagagacttctctactagaaacagtcagttacatggaaatgccttcctaatttcgatccaatagcttatatcttccagaacaataagattcgtgtaggatataatctcttgtctaagtaaatgttctacattgagctgaaacttctgtatatagtgaaagctaaaagacacttgtacacttgttctctaacaatatccttaacttgagatagaaactcatcaagatccccctcaaatacctataaagttaactattgagtaagaaaaagcacgtacccgaacaatctcttcatatgtctcgtcatcgatttctactgtagtgatagtttcttcaacatcacccagaatcatattcaaatgctgatcaaacgcctgcccaaagaattaacaacaacaacaacatcaaacctaagtgagtaactcaagagtgtagaaatcttccaaaatttaagaactttgtcaaaattaaatttacacaaaccataaattcccaattgcaagctcatcgccataactcgagaaaacgtttttagaaactgaaacttgaaaatcaaaaccctagactttcccccaaaaaaggaccaaattcgacaccaaaacagtgaaatcggcaaaataaagttacaaaattcaaacgaactatgtgtggaacgagtattttaagtagtgacaagttcaaggtactaagcagggcacaagaaaacgtacgtgaagcttgccgcgaagttcgcggtctgaccggagcttgacatagattctctcgtcgagactcagcctaatcagatctagtggctccctcacggtggcttcttcctcgccggacatcgtgtagacagagataccttcccacctgaaacacttctcggagggttttggtaccgacgaatcgtataaccggacacaaactctgatctcgcggacacgaacttaacaattttgttctacgaataagattttacaaatatatggcaacagcccaacagaatattaggcccataaacgaacgttggcgaaaaaatgttttttttttcaaaactatcggcatattttattatttcaaagattatcaatgggttctactagctaggttctacttctaccttgagaaaattgagttgaggtcttgtatgtatagatatttcagtaaacaaatattaatgttagattttaattttaaaatgtaaattaagatattaaatttgacgttttgtacttcgattcgtttgttttctacttacaagcgtttcacaacttttttcgagttgtaacgcttgacagtttcacaaagtaagcatacgtgtaaaatagaatcatttattgtgactaatgtttttaaccaaatatggtatcttctaaaacgtgataccaatcactttttaatcactatatacaaatttaagtttaatatatttatatataaatttataacttttttttatctgaattgtaacacttattggttccataaaataaatatatgtgcgagagtataataacttggacatgatttggtgatgaaattctacaatattgtgtttttaaaactcacattgtatctactaaatttaaattaatataaatttatatgtccaaactaagataacataaatttaaacaatatagaagaagaacgacactattgttaataattcgataagatactaaaaaaaaaaaaaatatacactttttaacctttttaatgtgaattgtaacgcttctacaaaataagcacacgtgtaagagtataaaaacttattgtggatttagtaatgaatcatgaaatgttgtattaatgattcaataaggaagtaaaaaaaaaaagtttaaaaaaaaaaactaatacttagatttcccttgacaatcatatcttttaatatataaaaaaacatataaatttcagttatttcaaaattcaaattcatactctacccatagtgactaccaaaatcaatcgtaaataaataaataaaaaagaaatggtgggtccaaatatcttctgatacattggacataaataacttttgtgatttgtcactaaaaaagatttagaaacaagactctcttcttcttcttcctctaaatgttttgtccgccacacgcattgtctcagtgatcagagttcttcgtctctctacttgaactctcatctctaaaaccctagactctctcgtcttcaatcgttttaaaaaggtccgtttagttttagcatgaaattttctctaaagataagttttttttttcgtcttttgttagcgatgttttatagtttatcgaattcgtagtgtttgattgcgattgctctgtttacaagcttactttgatcggatgatttaggtttcatatttggagaaatccatctaagaaaagtttgattttgaggagaaagactgaatttttattttctctgattcagatttttcttttggaaactgtagaaatggaaggaaattgctcgcaaggacgctttgattctcaagtttcttctatgagagatcttcgtccaaatgctataaatcagaatcagaaacaacaccatccaaattctcgacaagactcaggctttaacaatactatggatacacgtcacaacaatgtcgacagaggaaagaaatcaatgagtgaagatgatgaactatgtttgttaagtagtgatggtcaaaacaagtccaaggaaaactctccttggcaacgtgtgaaatggatggataagatggtgaagctaatgataactgctctttcttatatcggtgaagactctggttctgataagaaatttgcagttttgcagaagaaaggtaagtggagatcagtttctaaagtcatggatgaaagaggttatcatgtttcgccgcagcaatgtgaagataagtttaatgatcttaataagcggtataagaagcttaatgagatgcttggtagaggaacttcttgtgaggttgttgagaatccttcactcttggataagattgattacttgaatgagaaagagaaagatgaagttaggagaatcatgagctctaaacatcttttctatgaagagatgtgttcttatcataacggaaacagattgcatttgcctcatgaccctgcggtacagagatctcttcacttgattacgcttggaagccgtgatgatcatgataatgatgaacatgggaaacaccaaaacgaagatcttgatgatgatgatgactatgaggaagatcatgatggagctttaagtgaccgtcctttgaagaggttaagacaaagccagagccatgaagatgttggtcatccgaataagggttatgatgtcccttgcttgcctcgttcccaagctgatgtgaatcgaggaatatcgctagatagtaggaaagctgctggcttacagaggcagcagattgagtctaagtctttagagttagaaggacgaaagcttcagattcaagcggagatgatggaactggagagacaacaattcaagtgggaggtgtttagtaagagaagagagcagaagcttgcgaaaatgagaatggaaaacgaaaggatgaaacttgagaatgaaaggatgagtcttgaactgaaacgaatagagttgggtgctaaattgtgaagagtcttaggaattaaggatcaaagaaattaatcagaaaaagttgcaacaatgattggcaatctaatcagttgcttaactttgcagtagacattattattagctaaggtttaaagtttgaggtaagaaatattttcatattttcagatgtaatattcttatagaaagtggttctgttctctatgcttgattatgtcctcattgtcctgtaagtatcaacgacagtgacaagaactgagagtaactattcaaaactccaacctctaaattggctctctttagccttggagcttttaggtaattgaagaatcttttattttcataggcggaaaaagaaacctaaagcttgggccaaaaatgttgtttgggctagtaagaagaaacaaattaggccatgccattatgcttagttgcttactgatgtaatacccacttgaataaaaggaaactttcatgactttttttttataatcaagcctttcgtaacaaagtgaaataagaaatgtgtgatcgaaatttcagaaaaaaggcaaaagaagaatgtgaagtttgtgtttttttttttatccatctttcacctctttattgccctttccttgttcacaagagcctctccgagctctctctttatctttcaaatttgttttgccttttcttcttttcatttcttttttttccatattatcattacaaaaatggttcttatttgaccaagaacgcattaaaagatgacattcacttatatttgaagggaaattcgtaaaatcaacattttaacagtgaatttgcttcagtcgtacattaaaaacaaacaagcttttatttgacgctattattaccttcaaattttcatgttccaactccaactcatcacctaatttttaatctttaaaattacctttttaagctagataaatcagaggctaatgacaacatcaaagtacacaagaatggtaaaaaaaaaatatcaaaataaaaatcggaaattagggacaaaaaaagatgagctggagacagaaaaaatgagaggtaaaaatcacatgggaagatgaaagtggcgtagataactcatcccacatgcctctcccttcccatgtgattttctatatttcctttcaaccccttaatttcttcttatttctatttcttacccctttctttgtttttctcaccgaattcacaatttacatcaatcaaattatgtaactaatcatattcatcgtgaatttgactttcactttatttctctcgtccctgtttaaaacggatggttgaaaatagcaaagtttttttttatggatctaccaactttttcaaaaataatcccaagattttaatcacacttttgaagttcttaattagtggacccagcttgtatcaaccttttatttgtttagtatttaatcaaatctctactctactataagttaattgctagctttacttactcgtataatttttcttgcggcagaatcgatttatttaatttattattttaaattattatacaaatatatttatatcctccgggtgatttgtgaatccttaagtacatattattatatctatgttgctccatgaaatttaggtagactatataatatttatatctactgatgtagacacgttaatcatcatcctcatcagtctttcatacaatccattatctttcacattgtatctaagtttagtggtacaattatttattaagaaagctataactatatattaagcaaactaaaccgcatatttgtataatgtcggttctatttcaacttataattttgtcggttgtataaatcgaaatgaaccgcacctaaaccgtatcattcataatcataattgatagaaagaaccataattaagaatgaatcaatataaaaaaggagaatacaaattacgacagcgaagcaccttcacatgaatccaaaacccgccgttatatatctcatgatttgtgaagataaaaaaatgaaatcaacagatatgcagatgacatatacagataaattgtatacgtccactacggattttatcttcaacctatgcaaatagtaagattaaggttatttggaaaactgattgagctggcataatttaaattcgaattactagctagtgtagttaataaaacaatgaaaacaagtactatagattaagtaaaagtaattacatagttcttgtacactaatgccacgttggaaaatgagttagaggagattaattagttcggagcacacaacacatatttgtgatttttcacagacgctgacacatattttgtgattttccgtgcacacacatacatatgtgtgtgtatatatgtgtatgattttccgtgcagatgcagtcgtgtgagtaatgatggtaatttactaaagctgatcgtagaaattgtctgctaagtttaaaacctctgaaaaaatagtagttgagttcagtacaactacatagttatgcttttatttgtattttcgccatagttttagggagtaaaaaggttaaaaacaaaaaaatatgaaaatagaaggataaagttaaaatcaaaacaaaaaacgtgatcaaactacaaattcttttcacctctaatttttttttatggtgtgactagtggagtaattgcaaacgttttatttctattttcgcaatagtcattggaagtcaaaatgtaaaattattgtagtagaaagataaaattacaacattaaagatagttaaaacttatggtagtagaaggatataacccaaaaagaaaaaagtgatcaaactacaaacttttttcacctctattttcttttgttgttggtgtaattggtgcagtaatttcgtcttttagatggctacttgctcaatccacttgcattttttccctccaccttaaaattaccatggcccatcaataattgatttacttaattttatggttatttgtacactaatgtctctgttcatattttctagggttttctacctaattcttaaactgttatttgtaattaatctgctcttagcagggttgtaatttgtaaaaccaccatatttgaaataagtaatcataaataatatcattcgttatggataaataaaaagttaagcgcttatatgcatcattgtgcgcatgttgtatttagtaattaaattatacggataaacgttgtgtattaattaataatcacatgtaactcaaagagtatatttttatactctttgcttgattttgtgacattttactctataaaaaacaagagacaccactttcctttcatatacatctttcacaaaagcatagtgtgaaacacatattttagtaaagaacatatatagatgcagattatataatggtacgcaatgtttttattattatttaagactcgttattatatataatggtcgttttcaactccgacgaagtgcacctatacgaaaaagacccacgacagataaaatatactttttctttattaatacaataagataaaaattgtaacgttaagggtcgagccatgcgaaaatcgagtggctactatataatttcgtagaaaaaatcatattcaatgcttttaggagctaccaaaaggatggtccctgatatcagctttcaatacattttcatgtaattcattaaatatctgaatctaacgctgttaacatttactgcctaatcatgccgtgaatttcgatgaacattccaatcgttttacccccaacgctatgctgagtaggctgatgattagtcttatacgcaaattgcgcatttgacaatctacattttactataaccccaagttactatatatatcgtgttagtaaattcgtatagtatatactaaaaagaagtttttcagcttttagatgaagtatgcagtttagtgaaatagtttttaaaaaatacagaattgtcaaaaattgttttattaaatggataatcgttatgcaatagacaaagatttatgtatcacgattatgctaactgcaaaatctgcaaactatgaaggcgttgcagcagaataatcattactattatagtaattatgctagaatgtctcattttactagtcgtttagttcttgtacttgtttgtgctaacctcttatctatatatacagaagagcaatcttgtcaatgcatgcaactccgaatctgtttccattaatattttaggaatatgttttgttttgtttttgcgcaaattacgttaaccgtagtatgttgggattcaaattcatgttgtgattggcccaaaaatattactatattttgttattgttaatacggaaaattttgacccaaattaaagttaatatgtggttccatcacgaacttaaataggtcattccaaaacaagttcgaacgcatcacatctaaatgcatatccctctttggagaaacgatggattttaccaccaaactacatattggtaaaagtaaaactattcctaacttcatgtaagattttgtaggttaaattaaaacgggacgttgggagaaattaataccctgcactattgacattgatggtttaggttgtcatcgttttaagtgtttaaataattgatttagttaaataacggccgtcaaatcggtttgagatgacgcaaaaaccatcaatatataaaataaaaatgaataacggaggcaatgtaatgtatggcctcaaacgggaaatggtcaccaatctatttacttcaatcccgaaaatgacttccatctaaccactttccttccaacatcctctcatcatttatatttattatttcgattactttgtatcataacaataatttattacaaaaaaaaaatcatcaaatctctggattgattttgaaatcgagcccgtgtttgtagagtgtggaagaagatcagtagtgaattgatattaaaataatttgcaggggggacaaatccagatcagtaatgaggatggtttagtttattaatgatttaaagtcttaaaatgttgagagctaataaaatagattaatagcttaaaaagcctcaatgattaaaggtcaatgggatccacgttagggacaatttagtaatttcaaataatacgtaagtcacccgccactgtatacgttccaaaaagcaagttcatcctcatctccaccaactttttttacgttttaccttttaccttttacccctatctttttttatttgttcttctacttgtgatctttgaaatataatcctgttaattatccctattttctaaattgatgtttatcctgttgcagcattttgttgatttatacaaagacacattatttatcattacaagatcataaacaatgaataagcaatgtttgaaccaacatatagcttaataacttatgtctgtttgaaataaaaatgggaatgtcgaatgtgtttatattttcttttataaacttacattatacgaattcattactgcaaacatcagtatgagaaaattatatagtcttacgttttttgaaatattttataaacttcgaattaaaatatttgtgatttttaaactgggtttttaagacaatttagctggacggacaaaaaccaactaataatcaccaccgtctttgtgcccagctgtcaataaatctctgcaataatttcttttttggtaataaataactattggttaaaaactaaatccttcagtttccttcgtatatatctttttgtgcccacttttttcatcattgcatatacaacccatgatgataaactctggtttttaacaccacactattactctagctttgctctactagaaaatgactctctccgttttttttgtttaatgttttgggatgaaaattttatttaatatttcatttacaaacctcatttttaaaaactctaaagtagaaataaataatatttttttacgtaacatagctatcaaaaataaatacagtcaaaagtttataaccaattttctacaacagtccatggtagcaattacaaccatcacccattttttataaccaaattgaaatcaaccaaaatttacttcatatatttactttatttttcatacattttgttacatagattgtatcaaatatacttacaaaaaattattgaattacaacttctaaatttaacaattttatcaattaaactttatttttacaaatctttgaaatcattcaaaattttatttttgtcttctttttaatttataataaaattaaataatatatctttacgtaacgctcgtagttggcaaaataaatttacaattaaaatctttactaaatttttcttctacaatagtccacaacaataattttacattttggactttaaccataatttttacaaatcttagaaaatcattcaaaatttaattttatcttctttttaatctatgataaaactaaataatatatttttacgtaacgctcgtagttaacaaaacaaatttacaattgaaatctttactaactttttcttctacaacagtacatagcaataacctcacattttggaatttaaccaaaaacgagtaattatatttattatactatacgtaaccgtggttcaatattattaaagaaattttttattataaatataaaatagtaaaacacctttaccagatttaataatatattgatacaaaatcctatgaggtcatttttgatgatacctacaattacaagccccctataaaatcaatctaaaccacaattacagtatacaaatcttggtaagaaaatacaaagtgaaaaataatttaccccaaaactcggaaaatagaggagagagaaatttgagaagattccattttggcacaaacagaggaaaaagtatcaataaaaagaaaagaaaataggtaaaaaagaaataaatcgaaagaaatatataaatgttagaatggctccttgagattgacaagcagatctcatcaccagacaaatataaaataaagtaaagaaattaacttaggtatttacaaaactctctaacaccataaaaccctgcgcccagagatttcactcttcttcctcatgtaaactctctctttctctctctctctttatctctcccattttttttttcttctctaaatttttattttttctcttttttatttttcatttctgtaacttcttctccgtcaaagacacagagagtagaaaaaaaagaaaaacagaggaacagattaaaaaaaaaaaaactttattaaacgatgatgcaactgggtggtggtactccgaccactacagcggcggctacaaccgtcacaactgctacagcaccaccgccacaatcaaacaacaacgattcagcggcaacagaagcagcggcagcagcggttggggcgtttgaggtgtcggaagagatgcacgaccgtgggtttggaggaaatcgttggccgcggcaggaaacgctagcgttgttgaaaatacgatctgacatgggaatagcgtttcgagacgctagcgttaaaggtcccttatgggaagaggtttctaggttcgcgttttcttctccctttcctctttattcccttttcctttttttggtatacttctttttccactctctctttttttcttctctgaattttttgttttctaattgggaatgattatgaaacttgttttttttttttaaattgaacgagtgttgtttaaagatctgtgttaattgtctgagatttggttcaattttgtcttttgggatttgcttgaatttcgccgaatttgtaagagttgtctttttggtttgtatagttcagtgagattcagattcggacagttcttgaagtgggtttcattaaaaatttaaactttatttaacagttagataatataagttgggtcatgttatattcatgagattgagaaagcaagactcttttgtcacaaactcatgctgattgatccacttctcaaccatatttatcctttttctttttttccataacaaaattagtctatttacttcatgaattttttgatgaatttgtgaatcttttttttttctttggttctgataggaaaatggcggagcatggttacataagaaacgcaaagaaatgcaaagagaaattcgagaacgtttacaaataccacaaacgaaccaaagaaggtcgtaccggaaaatccgaaggcaaaacttatcgcttctttgatcaattagaagctctcgagtctcaatctacaacctcactccaccatcatcaacaacaaacgcctcttcgaccacagcaaaacaacaacaacaacaacaacaacaacaacaacagctccatattttcaactcctcctccggtaacgacagttatgccgacgcttccttcttcatcaattcctccgtatactcagcagattaatgtaccttcgtttccaaacatctccggtgattttctatcggataattctacatcgtcttcgtcttcttattcgacttcttctgacatggagatgggtggtggaactgcgactacaaggaagaaaaggaagaggaaatggaaggtgtttttcgagcggttgatgaaacaagtagttgataaacaggaagagcttcaacgcaaattcttggaagctgttgaaaagcgagaacacgagagattggttagagaagagtcttggagagttcaagagattgccagaatcaaccgcgagcacgagatcttagctcaagaacgctctatgtccgctgcaaaagacgctgctgttatggcctttcttcaaaaactgtcagagaaacaaccgaatcagccacaaccgcagcctcagccgcaacaagttcgaccatcaatgcagcttaataacaacaatcagcagcaaccgcctcaacggtctcctccaccgcaacctcctgctccgcttccgcagccaattcaagcggttgtgtcgacgttagacacaacgaaaacggacaatggtggtgatcagaatatgactcctgcagcttcagcgagctcgtcgcggtggccgaaagtggagatagaagcattgataaagctgaggacgaatcttgattcgaaatatcaagaaaacggaccaaaaggaccattgtgggaagagatatcagcgggaatgagaaggttaggattcaacaggaactcaaagagatgcaaagagaaatgggaaaacataaacaaatacttcaagaaagtcaaagagagcaacaagaaacgtcccgaagattccaagacttgcccttactttcaccagcttgatgctttatatagagagaggaacaaattccacagcaacaacaacattgcagcttcttcttcatcttccggtcttgttaaaccggataattctgttcccttgatggtccaaccagagcagcaatggcctccggctgtaacgactgcgacaactactcccgcagcggctcagcctgatcagcaatctcagccgtcggagcagaactttgatgatgaagaaggtacagatgaagagtacgacgatgaagatgaggaagaggagaatgaagaagaggaaggaggtgagttcgagcttgtgcctagcaataacaacaacaacaagacgacgaataatctgtaatgatgatgattcgagttcgaaccggtttggtggtgaaagattagtaatctttttttaagttttgatacagaacatgagaatttaaatattggagggtttttttttttttttttttttcatctttgatttttaagttatactgaagagagatttaatatgttaaaacaaaattaaaataaactgtgatttaattattttttccttgggatatataaataaaaaatgttaagatagggggacaatgtggggttttcataagcaaataaaaataaaagaaaatgtaattgtatatgttttcttaaatgaatggttcttgttggtggtgacgatgtgttatttgtttttgtacatattattaccattattgttttgtctacattataaaaattaattacatggtgggactgtgagacgagagttactcatcctttttcagtaacagtttccttggtaggataaataaataactttattagtatatgttattttattacaaaaaataaaaaagaagatgccaagttcacatgcacacaatgagagagagcgtggggtttggggtccacgtgtaaaaaaaggaatcttactcttttatctaatctctgtctcttcttcttcgttgccctaaaacgcaagactctctttttctgtaagggtgatttcgtaaattattactgtggagtgcacgtgacagatccaaccattcatacaaaaacactcttatttgagaccgatgatgattcgctgtgtcacaatttaattcataagtactatcgacacatgtttggtcgcatttcctgatctgtctgtttaaccgaaaaattgatgtatctaccgatgatcgtgactcctctttaacgttttttacgtatgcttactttacttgtaatatacatgtgcataaacactcgctcgtgaaatctgcaaggattatcacatcatacaaattgtgattattatagctgttttaaattagcattactattcataccgaacacaaattttagttaaagtttggtttgtttggttcatgaacattcaagatgttatggattttgcacatgttaacaatgaagagcatcgtatatataaatatatctacaataatcctcgctgtttttattctgtatgttttgcaagctatatactacactaattaaattaattattatgaatttgttacctaatcgacattgaaaattacctctatgtagagacctattttgtgtcagattggttaagagctgttttcttctcatttttgtgtgtgtgtgtgtgtgtgtgtatcagtgtatgtgcgtatttacatatttcatttttatcattatttgtctatgactacttaaaacctagacacgaatctacaatatcttacccaaccttcgaagaaaggaactaccatttttttgtaagtgcatgttgtcttttttcgtcccttgcattataatgtgagcccacctttaatttgtttggtgtctgttatcgtttatttggatcagataacaatcactttatattcttttagctagcataaccaagtcttactttgcaccgttgaattatagaatatcaatagctagttaaactagtttgaaattgcgagattaaaatgatcaaacaaggcaataagtagactttaaagtacacgaaaaggactcgtaggaaatatttattcttatttaatacgagtattgaaaattgaaatcgcaggtccaccgtccacggatgtagaaagttgatttatgaaatatttatacgtccataaatttttctatgtgtttattggatgttattttgaaataattcaagatatttttgtataggtttacaatttcattgtgtgtgtaataatttctcacggagcgacctacttactgtcaattctatatgatgtctacatatagagttgtaatgactaatgaggtttgatgtattttgacttagtccattttttcgtgtgttagataattatacttgtttacaaaaaaaaaagataattatacttatgacaaatgacatttgatattatcatgtagcaaatgcgaggatgatgatatgaccaagaacttattatcgctgtatctcaaatttttattgcaactcaaattagatgcaccgtctcactgtatttaagactcaaacattagacattttccaagcaaaatgcggctttaattaaatgtaagatagaaagaaatgcatatgcactggttatcctcgaagagaattacaaattttctggaaactgaaaatgtgtaggtatggattcaggattcttaagaagaaaatttgtatcatcatttaactaaatatgcagatataaatagattattcgttgtgaataatcactcgttaacattgcacagttattgcaatttgcaagatataccaggaaaattttgtaatgatgattttaaaccatagatgtgtaatgaactcgaacaatctgtggcactgagtaagtacctacatgtaaagcaatcaacaagtggacatcattttatcgctgtatctcaaaataatgttctccacgattattgttcagattgccattttttggccaaatcttttgtttatgctatttttgatatgggcttttggatttgccattttaggcctaatgcaattacgtttttgtccttgtcttcaacctttgtcttccatttcgtttttgcttgttgccggaccacaattatttgccgaccaccaccgtcgggcttcatccacgcatctacttcaactctatcaccaccttcagttttagttctattaacatcatcacttttgtctccgattcatgaaacgtcatcaccataaacaccatttcattcaatgattttgaatgaaaaaatattaaaccctaaggggataatgtctagtaaacccaagggcttcaactataaacattgaattaataaacccaagagctttaattataaacactgaattaatcaaaccttctaaattatcttcaaatcgaaaccaaatttgaaaattataatcatatattcatgaaatctttgagttttttaatttctcctgacaaatcgaaactcaaagataaagagattagtttcaaagctttcgtcctttggtgttgcttaaactggagttgtcatgagatctcgtcatgaaaaaccagatcgagaaattaactttgtggaagaacaattctgaaattttttttgcaacaaaacaagggtaaaattgtcttttccgatgaaataaaaatggcaaactcacaaactgtttaaaaaatggcaaattcaacaaatgccatgtgaaaaaatggctttcttgtaattgatttttttaccaaaataaaaataataaataagttctccaatcattttttccacccaaaatttatttcgtgtcacataaattatttactttccaaaacccacaaaatattgttttgttgttgcatttaaccaaaaatatatttttgcataaaaaaaaataaaaataaaaagtccataataatggataacttggatagtttgaatataatgatgcagcagtcaaacgtttctacgatagccacaaattttttaagttgggttatattgcttgtttggttacgacttacgagtttaggtctaatgattttgaaacttaattgtcaaaaaactatttaccgacaacatgataattgaaagaaaaaaaatgaaacttggaaaacccgaagtgcagagaagtgggcatggaaaagggaaaatgagatgtgagaaagaatggtggctacttattaggaacggaatcttcttctttttcttttccgcaaatgtttttataatttctatttgcatctctttttttccgaggggctaaaacaatgatgacgacccaaatacagtagatgtgtgtataatcataatccataaatgagagtgcaatatgagataaattaattactttgaatccttcggaattgatgagttcttgagcattacgggaatacaacaattacaattcaagatattttaaaaaagtttcccctaattgacctaaaagaggtgatatatccaaaaagaaagtgattctttttgctataaatggttttttttgaaaaataagtttcggcaaagcataatatcaaagttagcttttacttttgttttgacacgacaaaggtcaacatttcgtggggggacataaagaagttttaggcaaatgatttctcatggcgttgaagagcaaaagtctattttctatgactctaaaatatgccacggaacatctttaactttgtttttcgtagttacaaaactcgcatatatataaatccattctagtgttactggataattcaaacgttaagtttagcctccagtggttagtacttgtttgattataagaagacagcggaaaaatcataaactccatatacacaatttagtacttaatgttcaagctgccaaaggagcaagagaatgttctgccggtataagtatatgatctgcctagatacatgttacatgcatacataagcatgcaatagaagattaacataaaaaaaaaactccacaaaaattaattagaaaacaagtttatttatcatcatcaagttttgtttaattatgctttactaatttttatttttatttctgtttccttttaaagttatcttttcactggacaatcttaattaatgtagtcttttcatttaaaatacgacactattattttctggcaactgttcaatactaacattaattccaatataatgtgtgtttgttgggttccacctcgtgacatgtaggcacaaattacagaaagaaacgcaccaacgccatctaccacacggactatacttttcattacacgatttaaggtaaatttacatattagaaatttagaatgggataagaaataagaagttaaagttgagattcatattaaaaagaaagaaaaaaatgatgaaaacgacgacccaatttgaatttgtaggtccaaaagtttattacttgtgtcgggtacccatggatatagatggatgcttgattacccttggcttctcccaaccaattgggccaattttgattcaattttcatcagttgatactatagtgaaacttctggttctataaattactagtattagataaacatctcacatatttctttaaaatcaattattttattaaatatatcacgaaatggaatactaataactaaaaaatcaagccatttacttacatttgttgtatatgctttttttttttccttcaaccccattttacaggaaagtgtatataataaaatgattataaaaccacttaggtgaaaagattattgttaatgtccataggtgaagatgttttgttcaacacaatctcgaactcacttgtctcattgtctccttctccctcttcttcttcatcgtattcatcttcttcactctctccttcttcttcatcttctttatcaccaactttttccctctgatcagtctcaaactcggtctgggtttcttgcgagagaagcaactgtctctgtggagtcaccattagaggcaatggcaatggcattgccccacttttgttcctctcgttgtacaaagcttcgagctggtgaaaataagggcaagtcttggaatcaaggggacgtttcttgttgctttctttgactttcttaaagtacttgttgatgttttcccacttctctttgcagcgtttcgcgcttctattgtatcccaatcttctcatccctgcagagatctcttcccataatggtcccttagtaccgttttcttgatagttagcttcaagattctttcttatccttatcaaggcctcgacctcggttttaggccatcttgaagaactaggagacaccgaatgattgttatcgtaattccccatctttattgttgtatccaatagaaccgccctcggctctttactctcaaacgttattgaatgatcgctttgatattgtttcctttgtgatggtttatgattatgttgttgcggttgttgtggttgtcctcctgagattttgtgtaagaaggatatgattgcagcgtctttagctgcagcattggacctctcatggattaatgtttcgtgttctctgttgattctccctatctcttggaccctccaagcttcttctcttgagattctctctttctcacgatactccagtgtttccaagaaccttttttgcatcttctcttgtttctccattaactcttttgtcaacttcgtaaacaaccctttccaatacttcctcttctttctcgagctcttaacctgatgatgatcttcttcctcgtcagatgcagtagatgaagaagttgagctcgagaaaagattcagcgatgaaacattgttcatcaagtcatttgaaattggcggctggctaacagtagtagtattgttgctgctataaaaaggaaaaggcgtcgtggaagatggttgcttggcgaggaaggtagggtttgtggtgatgggttgtacactaacctgatgatgatgtttcaacggtgaagaacttttttcggttgatggattgctagagctaatccatggtatcaaggaagaggttgcgggcgcgttcgtgatcactgcagaagatttcgcgggttgcgactcaggttcaggttgataggaactgagagtctcgaaagcttctaactcttcgaaaaaccggtaagttttgccttcggatttcccggtacgaccttctttggtacgtttgtggtacttgtacacgttctcgaacttctccttgcatttctttgaacttctcttgtaaccaagctccatcattttcctaattcatgtatcaatcaataaactcataattaagaaacaaatattatccaaactttttcttagctagttgtatgtaatacatatacctataagcaaataaataggcttgtagtcatatatttcaaatgaattaccgaaatatatgactacacatattatatatacatcccataaatatgtgagacgaaaatatatgatcataaaatttctgcttaaattttctactttataaatatatatgcatgtaacaaaatataacaaacctggaaatttcttcccataagggagctttgagagtagagtcacgaaaagctttatccatctctgaacgtattctcaatagagctaaagtctctggtcttggccaccggtttcctccgctgccggctccttcaccggtttcctccatcttcatatctttttcctcctcgacggaacctcccacgccgccgcctgagctctctaacagtccttctgagtttccagacatagctaagactcgaacttgaatctttcttgagagagatgaggagagtttcaagagaagacgaaggttgtggttgaatttcctttttcttttctttttaaattttttttgtctattgtgattttatcttaggggtatttaattgggtgggatggaccattttatctagatcttataaatataatacaattttcttcgtataactttattttgtatatatatagtttttctttctatattacaaaaagaggagtaggacttaaaaggggaacttttttcgctttccttctgtcttttaatttgggaatcttctcattgcttataagaaaaatttggtaccaaaaattaaagtatttcctataaaacaaaccatattgtatattttatttatttcgttaagcaatgaataaactactatatgtgtgtctggttcactgtaacatctgattaatgattggtttaatcggcaaactaaaatttcagaaactgaccatgtattaaaatgaagctcttaaatcgaatttttgatcggatatatacacaaacaattgttgactgtaccaattttaatcctaattatttaatacgaaattttaacgtggataattggacggtgtttaactgtcccactttaccacttgtgagttgtgttgtgacctgtgagttacttaattagaataattatctctattacacgtcttttaattattggagtgactttaatattaggttactatataagcatagagtatattcatagtaaatagaacaaaaaaaaccacaatgatgatgaattgaaataataacaacaatagtataagattgtgagctgtggagaagcctataagaatattattacattaatctttaaatgattgagatcataatggatgctttttcgtataaattattatataaggcaaaaaaaataatcaaaggtaatcagcaagaacagctgcagatagagacgatagggataatattcgggtaatgtaggcccacgtgggcccataatagcttctcaccgccgctggatcaaatcgcaaattggtcacgacaccgactgttaattttacctttttatccccaaatgttgacctctttaatcatgcaactagtagtttatacaaaaccagtaacacacacgtcattgttcaccgtatgatgtttttccaatgtaatctataaatggtgaaacaatacattttgtaatttatactttgacgatttgatgttatgtatatagagcggtgtgtgggcgtaattaatatacgtgggaggttttgatgtaacatcaaattacggtattaaattagacgaggagttagataaatgtcgaggttatatatggttattaggcggatatcaaaagcatttatgagaaaaagcaagtagagagacatgatttagttagcttatgacctaccttatttaatgttattgaaatattccggtgcctaataagtaataatgtaacgatttttttacgtaaatatttcattattttgttgtttcttcgacaaccactggttttaatttcgtttttcgctcttgttctaaaaatgcgtacctgtatcatgtcagtataaatcaacgtgttttccgtttgtagacacatttgtattagataaatcaaaataagtaacgtaaaactacatcttaattggcaacataaatgtaaaaactagcgaaccttgtacgtcacatttaaactgaatttgcttttcactggtcagttttatttagactatacattcgtacaacgatgaacttattaaatttttataactatgataattttgtagttattgacaagctcaaaaatattttataattccatctattttaatggtctttttaatttgaatattagaaaaagtaattgacatatactataaaactctatgttacaatggtgagatgaccagacttaattttagaaacaaatttattcaatgcaatcacctcaacaaactgatgatagtaaacttctgcataagtatagtttgcattttattaaaattctgcataattttggcatttgtattgtgaatctgtgtggttatgatcacaaaaagaaaaagatgcaaaactgtataaacatagaaaaagcaatcacatttaagttatggagatgttttgtttaagtataacaaaacattaataggagaatggacaatcttactggcagtttgttttttgtctgaaacaccaaacttatctcccacttttttcgcatctctcttctttgttctgttcatttttctttataatttctttccaaaattatatattcgtacgtattattagtttctttttctagtctataaggtgaaaaaataaatataaagagagaaattaaaaaagcagtggttacaaatgagctggattcagatgtatttccactacgtatggctctgtaaagtgaccccaacttgatccctttctacgtatgtataattcatacgccgtttacacttatttaacatataattaattatacaatatacatctcattgttgttcatataatgtgaaattgtaaattacacagagcgagtaatagtgaataatgtgatcgtttatttaaaagtaaaaaacttgttagaggctatagaaactgattcaataactcaatatatttcaccgaaatgaccgatgaataaaacaaaattgttttacatttaatgcgatttgtcacctatagactcttattgttcgaggatggtaccaaatgattccaactccataaagatttacctgtactctccttttacaatcgacttgacccaataaattaaatgctattaatttctacaattttttatatctacatattgtttttctttattgcaaccaaagtattccgtattatttatagtacaatttagtaaattgtgattatgtaaattataccaaccaaaatcgagagaggctctagccgattaaaagctgggacacatttgagcgcggcgataccaaacggaggcgtaacatcaagagccgctatatattatgacgtgtcaatttgtggacggttcgatcagtcctaggtgacgtgtaacgtttttatatgtgcaatttgccacgtaggatattattttctccgcttacgtggatttttgaagcctttttattttgtccgaaataagttgctttatttccaacaaaccatgtgaaagcaatttaaaatatataaaaaattccttaaaatagtgaaacagctttattccatttgacaataatatcacgtcgagaaaatgaccgtagacactaatttttgaaaacaaatctgtgtatttttttatctgtattttcataagtggtacagaaaaataactacattcgtgattagtatatattttttaattacgagtattcatcttattgagtttcttctataaaggtaatagctaatattttaaatattgatggtcaacctcatttgtcatgccaagttcgttaccctctatcgttatcagacaggtcattgtcaactataataattggaataattgacatattttgatcttaccgtaaccttgcttggcttgacccaaataaaaaacgtaaactacaatggattttttttaataaatagatggacccataattcaatataaataattttgttgtagataggacttgaaattttactatttcggcttcttttcctccactctctagtgtcaatgattttgtacgctagctgggtttcacaattatccaactaaaaatgatttttaacttttgggcttttacatattaacacggccttatgataaggcccaatacgttacctttcaaatccagttattatcatcccgaataaatatgtactttagagtttgagcccaacacaattttagacaacaaacaaaaaagaaataagttgatgttgaatatatatatatgagtacgaagatgaacttgaaaattgaaatcatcagttgtttgagggctttattaagttaccatgataattaacaaaaagtcagtttataaaaaaaaaaaaaaaaaagtcattcatcgatggtaaagttccttcttcttatagtcaagatctttaatgaagaattgtgcatggaccaactcgatcaccagacgtatataacctggtttgattgtgagagaacctggtttgattgtgagattcctcatgtggagttcaaaaaatcatcatgatgaaaattgacaaaattgtttaaggttatatgttccttaacatttacgaaattatgcttcgtataggcatctcgctttagagattcttttaagcacacacacatactatgtacgtgtctgtatgtatgttgatcaaaattttagtaaccaacttggttttattatattctctggctctctgctgcgtgacattgaagccctcctgatcttaggtgaataggtctcactcgcacgcaccacgtttatttctttcttttcggtatttaaaaatactactaatcattcaacctgtttttgtatactagtggctttgcttttgggttttgttctgttcgtgccaactttcatttaaactatttaaacacagtgcaatgatatatttagctactttatctttcaattggttttacttacattgttatctttgtaatttcctattccttacactacggccggtattagttgtaaacctggctatattatattttagaatgatatagcataccagtaagacagtaagtactttacattatcatacataaagattaatcgaacattttacagtgataccaaaataatatgaatagtcaacattttcatgggtcttgtttacaaaactgcaaaaatatctgcaatttcctaaggattttcatttatatttctgtcactatctctttttttgtcaataacatgcattacaatgaatttaaactcgatggtgacacaataacaatactagtatatataaaccattaaactgcaaattatagttgaatatcactagtttttcaaatgaaaatggcgaataatagtaaatggtattaatgaataatttgaaaatggtagtttagtggataaagaagaccccaaaaactgccactaaccatgattttccttatattttcaattttccatatcatatgagattaggcctctatcttagtccgagggtttaaaggtcaaagtcaacctcttcgatgtgccttacctgccacgacgtatcgctttccaaaatttccgattcttacaaatctacaaaatttattctttttgtcgttttcttacaagaatcgggaaatagttgtttctagcttgcaaatctttcacagcattgattcctacaaaataaatagtaccactcttgtattttaataaattgaacacatctctttctccacctatgccataccaatgatcttttatttcttcttttcgtatgtggttcttggtttattaattatcataataataaacaacagatactatagtcgacatatatatttgtatatgtttgttatcgcatctatctataattctcaatgtcacttctaccaaaaatcgcgaagtagtacatgatcaggggtattataggtacttgacacgccatgttagatggagattttgtctttatgacgagtgtgtgtgtgttgctcaactaatctcacatcacggattaatcaatctcagccgttcaaatatatagaataaatagccttttttttaccttatccatttatccatatctatttgttgttctcacgtaatcaatcttcccatttttttactaaataattaataataggtgaaatatatatatattttggttatgaaagttgacaaataattaagaagtttgaagaaatcgaccaaagccaaatgatagtggaattcaaatataaagtgaagtccaatcaaagggatatgattttgctacaaaaggatagaaaagctttatgagtttgagacttgtcgtttccgcatagatttgcactaatgaacttattgtggctggcagccaaacacatctgtgtgactttcgatattagtaataaagagtttaaatagttacgttggtttaagaaaagtttacaaatttgatttcatctttgggcagatagccatcaattattttattaatctacatttaaagattgttttaagagaaaccaaagttgaataatctcatcaaagaacggtaggtaaaccctaccaaatttaacaacccttaaaaccattttctgtattcacattcattttttgttatactcatcatggactttttttttttgttttggtaaaaaacatgtacatatttagatgctatcaacaacatgaatgacttacaagttaagaaacaaatctctttttttttttgggataaaaagaaacataaatcttaccaagagataatctctacaaaattgttttttcaggatatttccaagaaatgagaggaggtcaacgactaaaaacaacttgctgaatatttaaaaatctttttctgcttagtggaggcatttattttacattaatttttatgttttaaaaacataatgttattatataattaaatttcttgcacaaacagagaatattattaatatatactgtgaagagtaataaaacagtttcgtttcattaaatatttgattgaattataaaaatagtgaaaaaatagaagatgtgttcgtgttcgtggagcggaggacaacgtagttggtttccgcgtgctgtacgagacagataacttctacagagagaaacaaagatcgagacaaaaagaaacccttaaaggatttgaacggagaagacgaggaaaaacaaagacacaactctgtaagttctgacccaattttttttatgttttgtctggaaagtttcaagatttgatttttgtggttctctttacattttctgggttttgtgtaagcatttgatgtgtggagtgtctctctttttgttattcgaattcattatcaatcttttgtgtgtgtttcatgtagatttgctcaatttttaatctagatctaaccaaattaattaactaaagatttagataagaaaagccctaatttgtgatctactatatgatccagaatctggagtctttgtttctacttgatatatgtaaatcttgaaagtttccttttttttttcttctcttcttgaagtagtaaagactttatcttttctcaattgaatccaagaatgattagagggtttatttattttgggaccaataaacagactttgttcttgggggcagagactgtttctttcccttttcttttttttcacttctttagaagattcttcatttgaattctgtccttcaattttgaagttgtcttgttctcttttttactaaatgtgaatcaaaagaatgttttcttaagttttaaaaaagcctgtggtggttactgcttttggtccattgataagaagaatcttcttttcttctcttctcttctcttctcttctcttccgtgtcattgctttgttattaagtatcattcagaatttgaatcaaaactctacttttgtgtcttgcagaacctttagagagagaaaaacaaatgtcgttccgtagcatagttcgtgatgtgagagatagtataggaagtctatcgaggcgtagtttcgactttaagttaagcagcttgaacaaagaaggtggtaaatcccgtggttcggttcaagattctcatgaggaacaacttgtagtaacgattcaagaaacaccgtgggcgaatctacctccagagttattacgtgatgtgatcaaaagacttgaagagagtgaaagtgtgtggcctgctcgtagacatgttgttgcttgtgcttctgtttgcaggtcatggagagatatgtgtaaagagattgttcaaagtccggagctctcaggcaaaatcacatttcctgtttcgttgaaacaggttagatttcaattctttactaatgtcatcatcacatatgttttggttagtcttatgattggttatttcaagtaatttcttcttcggtgtttatagcctggaccaagagatgcaacaatgcaatgctttatcaaaagggataaatctaacttgacttatcatttatatctttgtctcagtcctggtaaaacttcattttctctgtttttgttccaagtttttctctgttctccaaagcaaatctgaaagcatgaatatttgcagctttgttggttgagaatggaaagtttcttctttctgcaaaacgcataagaagaactacatacaccgagtacgtgatctctatgcacgccgacaccatttcgagatcaagcaatacctacattggcaaaatcaggtaataggaaagactttgcctagttataagacatttagaaagcgaatgtgctaatgtttccggcttaacgcgtgattatctcctctttggcaggtctaattttctggggacgaagtttataatatacgatacacaaccagcatacaacagcaacatcgctcgagcggtccaaccggtaggtcttagccgcagattctactcaaagagagtctctcccaaagtacctagtgggagctacaaaattgcgcaggtttcttatgagctaaacgttcttggtacccgtggtccgaggagaatgcattgtgcgatgaactcaattcccgcctcttcccttgcggaaggcggaactgtgcctggacagcccgatatcattgtcccgcgctctattctcgacgaatcgttccgcagcattacctcttcgtcatcgagaaaaatcacttacgattactcgaatgattttagcagtgcacggttttccgacattcttggcccgttaagcgaagaccaagaagtggtattagaagaagggaaagagcggaattcgccaccacttgtgcttaagaacaagccgccgaggtggcatgaacagcttcagtgttggtgtttaaacttcaggggacgtgtaacagtcgcatcagttaagaactttcagctcattgcagcaaaccaaccacagcctcagcctcagcctcaaccgcaacctcaacccctaactcagccgcaaccgtctggtcagaccgatggtcccgacaagatcatattgcagtttgggaaagtgggaaaagacatgttcacgatggatttccggtatccgctctctgcgtttcaggctttcgctatctgtttgagcagtttcgacacaaaacttgcttgcgaataagtcaaaaactcagctttgtatgtaatgttatcagatttgctttggagattcttgttttgtggtgttttattttcaccgagaatctcataattagatttgtttcaagctttcattgcttatgctgtttattggtgcaaccaaaaagtttattcgagtttggtttttctccatagtttgatttgtattcataacggtcaaaaacataaaacgaaaataacaataaatcattaagaagcattggttattgaaatatatgatatatctccgattttcacattgataacaagtttgatattagaaaaaaaaggataatatataagaacaaaaaatggacaaactgttttatgtaaaacatcaaattatgttaagggcaggaaaggagagatgagagagcaaatgacagacactgagaagtgagcacactgcttgccgacttgaggtcagagcaggttttagaaaacggcaagcattccttgtttggaaaagctagatggcatataaccagcgttatttgttaccacggtggtacgtacggaccgacgcgacttcccgttagaagaaacatcggatgatatgaaacacgccctcacgtatgtgaaagacagaaatttcaatggctgtcttcgagatttatagttactttttcgacatttttaattgtattagttgtagattatattagtgtcaaactattgtattatattcatctagaattctatagtttaaaagaccaatcgtctgtcaataaggtgtgaagagtccatcaagtagagagatccatcccacgttagcacatcattttaaatttacgttctttatgaaacattttgttcaagttcttgaatagtttcgataggtggtttaaataaaagtaattaatgccaaggaagtatgcttgtgtttatttccacgaacaaaagatatgattcagcccttttttgttgttaatatatttatttggtggtcgaattcgaactcacaatgtcataaaagtttagccaaacttgttaatgaatattggtgatcttgttttggaggtgtggaccaatcaaacaacaaatcaaccactatgtgtggatttttgcgaggaaaataaaatgattggataattaaaataagaattgacctaactacgatagttatagtttaattaaccaagttatgtgacataatccatttcttaaagtataatttcatctcatcttggtgatccaaaaggcaaaaatgtatttgaagggccatatcggatagtcgtctttaaaagggtcaatgactcaatgtggctcagttctagttgccgcttttgattagtaaagatcagtaagattttaatttcattttctaaacagatatctgataagtgataagctaaatcataagactaatttggtctataaaattgtactattttccttggtcagacatgattcgttttcttttggacctttttgaaaacaacattaagattattttcttcttaaccgatcttaatcaagaaagtgtattatgaatcttagtttgcaaatgacatattatcctttatcgagcacgtcaatattgaacgtcaaattaatcacggtatgaggtttatgtatgtgtttaaatatattgtcaactagctacaagagtggtgaagcactaaatcacaccaccaaagcttgtgacttggttg

SEQ ID NO: 1256 - DNA, 46855 bp, Arabidopsis thaliana
ccaaacatatgtcaaaacaataaaagttagaacttttttgtagagaaaattcacacaagcttttactaaaaatacattgccaatttatttccaagatattcagatctattggggagttgtgttcaatcaaaatggtcccaaaggtggtccataaagacatgattagtcgtttaattagcttctttagtctatgattacttgattagtcgttcgttctaataagattctcgctagtattcttccataatggtttatcattagaaaaaagaaatatatattgtatgtgtatatcagaataaaagttcatgtaataactttagtctaccaaacctagctagttgtattattattttacaataagactcacacagccccactcattcgcaatcataacatcggcggagactttcgcgaccaagcaagcgggaataagtttcatagctccagacaacgatggttaactgacttgtgttctcctcgttgaagatgcaaataagtgcgatgatgatgagccaagcatttatccgaatcagagtcttgttaacgatattgagtcacggtttgaatgtgaccaaacccttgctatgatccctgtcattagaagccaaaaacgtggaagctaaggggaggatattcatacacgaagtcgcagtatttcttcttgttgtccacctcatccacttcatcttctcatccatatcatatatgtcgtcggacaccgtccatattgaagatgaatgagcagttgcggcggaacttagaggttggagactatgtcgactttataagagatcaaagaagcatcacaataaaagagagagcagaagagtatcgccatgatccctgggaagcgtggaactgcaagggtgttatataggcttatagtgttgtagttgttgataattactatattttgatgtttgcattactgtctgtctatatggagccatggaggtgatatcataatccaagggagaattaagagctaagagaaaaacttatgctatcatctagctacacatgatgcataaaatctgtgcctaattcatagttttgataatatggaaaccaaggaatgctttgatatatgacaataagctatggatcatcattccattgctaaaaaaagagagaaaaacaatggagttgagaacaaaaatatgagatgcgggaattgaactaatcaagttataatctacttgtacacataaccatgtcccactcacttctctcaacgcacttttggatgcatcttggaaatatgagaacaaaccatacgaacactaaaactaattgtttcgcttttgtatgatcaacaaaacagacttgtagtttggagttgatgtagtcttactgtaatgccgtctctcggtattgacctattccgacgcagtttcctcaagaacaatattaatgcaaaaagcaacaattctaaggcaaatacataagcaaggcaagcaaaataaaattgttgtctcttcgaatttcttagaataacttatgtaacaactcctcgttacttgatgtttcattaattaacggacaaaacaaagaatgacacatgatattttcataattaattaaacatattaccacatccacttttatgaaaccaaaagcttaataaaaacattatttaacctctaacaaattttaatttattttatagacaaaatagacacttttttctcttgaaaagtgattcttaggattctctcatatttagtcattttaattttttgaaaaattgaaacctaaatatgtttgtttacatttaatttgcactaaaaaaacaaaaatcattttccgagagacagaaaaaaataaatagtaataattaaaacctgtttacgaggaggagaaaaaataaaataaaagaaaataaataaaagcttaagaagcgtctcattgctggatatcccgcgcaacgttgtaacaaaaatcgtcctctcagttccaatctctctcagattctcctcctcatcacaattccccactcctttgattcttgtcccagagtcacgtcctctcctattcgggtctctacagagtctaactctgacccgacccgacccaattcactaaatggaggacgaaccaaagctcccaaccgatgacggtccaactttcaacgaatcgtgtaaaatctcgtctgagatattgaccgccggtgatcggaaattacttaaagttgaactcctcaaagaggagaccacgctcgtatcgtggaagaagcttatggatgaggctagcaaagaaaacggcggcttgttcgtttcggctcccgaacggcttcttaatgccaaccctaacctcgagtttcgccttgcaccggtgagttcttagctgcctacatgcatattctcatgtattcatttctctgtctctgttagaccaatttttgtattgtatcatcattccgggagctgaattgggaaatttctccttgacattgagtttagagctagggtttcaataaactaactcttgaaaatgaaacaaaactaaagctgtatagtgatttcaatgtggatactgatcattgtctaatgatttagcgatatatcgaatgcagggggcacaaacagagaatgaaatggtgaatcaacctcatcctaatcgtcttaactctgttatagccaagattgagagactttatatggtaccttttcttactactgtttctattgattatctgaacaagtaagatgaatgtttgatttcttattcggaacatttttcataccatgcattagcactggttttgcaacagatttctgattagcgtatacttcataaaataaatttcagggtaaagacggtagtgatggggaagagttagacggtgctcctgacgatgatgactatgacactgaagattcatttatcgatgatgctgaattggttagtgtagatatcctgactatggctttcttatgtgatcaaagtgtatcttgatagctgagacatccttctttctttctttcttttttcccattgtaggatgagtattttgaagttgataattcgccaattaaacatgatggattttttgtcaatagaggaaagttagaacgaatgtaagttttttgtcctctttttgttgtatgttgtcgcatttctctatggcaggtttgtcagttttcatttggtgatatgttgtggagaataggctatgggcagcataagtgtgtgaacatatatttggcatcaccgttctcttccctctaattaggtttatgcaatgtttactcagggcagaaatatttgatagaattttcttgataatattgctacttctctgctaacatatctaggttatggtcaaaacgcaatgaatattttgtatcgttgtggtctctgattataaataggattcaggtttccctgtttccttatgagtaggttatcttccattaccattcttaccagtttatctaaattgtgtttccttcctacaacagtgaaccttcagctacatcgaaccagcagcaaccaaagaaaaggcgaaggaaggagtcagcaaaaccttgtggcgatgttgttgatgtatccagaaaacgagccaagatggctaagacggctgggggaaaggtacattacttgcaaataactttttgaatctattttagagttccattccagacagttgattatttgaatgtgaaagtccaggatcaatctgcttctcctgggccctcttcgaagaaaatttccaatgattcaaagacggtgcaagattcgttttcccctttgaaagcgcaaaatggcaatgattccttagttttggaaaatgtgaagcatactgataaagcgaatcaccagccaatgaatgccacgagtccgaagtcaaaggcagctggatcttctggcccccttcatccgaagtgcagcagcaaaagtgttcatgaacaatctaattcccctccaggaaaatctcggccaaatgtttcggcaaaatcagcagtagttcgtcagcaagttaacaatggcatgcctgacctggacattgcaacggaaagcaaaacatctattcaaatatctgtaagtactttccagctatcttaagtttattagattcctcattttagttagtttggaatttgaagtaagcatgtatttggggctttcatcttctacatccaagagtgatgcttctctaatctttgagactgtagaaatgatctgtaattgtaaagatattagcatttaattaggagagttcacgcattagatggcttctatctgtaattagttttcatctcgactctgggttgatctttctggctaatatttgcttccatgctttactcttgcatatcttacaatctgtactcaattttttatttttggaatggagcccccatggtatttacattagattgctctttacctttctctatttagaaaaaaagcggttcaaatggccggcctaaatactcgacacttgagaaagccatcaggaatttggagaagttggtcgctgaatgtgagtttcaactgtttcgttgttctctacatgcatgagaagctaaataccatttagtaaactatcatatccaatttattgcagcaaggcctcctgctgccactgagaatcaagatgccgatatctcttcccaagcagtgaagaggggattgccaggagatgtaaaattgcatcttgctaaagttgctagaatcgcggtaatcaaactcttctgtttctaaatatgtatataaattttaataatctttcagatgtatgaagaagagtagcaattttcttttcttgaagtatgcgagccaaggtgaaatatcaggagagttaatcaatcgtctcatgggcattgtcggtcatctaatacagattagatcacttaaggtattcatctctatctcctgcataccgagacttgttatcgtaatggagttgtgattcttactgaggcattaaagtatttagattttttcgatttaaggtgaaagctcttccattccagaaagagctaacaagatctgtatttgttagtgaaggagttcaagctcttacggtttagtaattgttattgtacagaggaacttgaaaatcatgattgattcgatcgtcactgcaaatcgagaaaaagatactagatttcagcggatcaagagtgaaataactgagatgttaaaaacacaagttccacttgtggaatcccaggttctctcccttctactctactagtttctctgatctgattttcaaaagtatttcgtatctgctatgttgcatagatacttttgttcttgtctttattgttggatttaaacatcttctttcgatgatgcacgaaactcagagttctctctgattatgattggccttggataagcacttatatctcccttttattgagacattgataaacatctgatattttgaaatattccttgcgctgacataaattgtttcacaggaaacaaatcaagaagctggaacatcagacgattttcaggatgttggatctcttggaaagtcacctgtgaagaagtttgtcatggatgtggcgctggaggaaaaattgtgtgatctatatgacgtgtttgttgaggtaattaatattttccataaccttacataaaaaggtgttccaacttgttagatgcagaattgtaagtgtcaacatagtttttgctctgtttttggtaatactagggaatggatgaacattcaggttcacaaatcagaaagctttattcagatgtaagttcctctccaacctttatattttgccattctttgtctatttgctttccagatccattcaaaaacattagactagaccttgcctaatattcaagattgtttaccaaaccttcctgattgattttcttttggatttattcttgctccagctagctcaactgtggcccaatagtttagttgacaatcatgagatcaggcgtgccatttgccgggaaaaggaaaggcggagagcattggaaggaaacattgggaaggagatggtatttgagaaattcttaacttttttacgccatagctgtttgtttgcttctaacgtgctaacttttggatgtgataaatatccatttgtcatcgaatattatcatgaactcgcacatttcgctcatgtttatcattcctcaacttttattttattttaggatcaaacgaagataacaaagaagaaacagacacaattggtccctaaatctgagggtattacttatcccgacaagacttcaggtgttgaagttaaagcaagtgttgtcctaactgcaaccaccacgtccttagtggactgtcaacctgcagcagactcgtcctttgaaaggtcaaagcagcaacatgagaaattaaagcgaacttcgagcttaagcaatcctgcagcagaaggaaagaaagtcagaagaaagacagaaccagctctagaagaaactcacctgcccgcagagaaacccctcgttctggccctgaagcggcagacacatctaaaatccaagacacataaacaggtacaggtacatccacagtccaaggcacataaacaggcacaggtacatccaaaggccaagacacagactcctccagacctgaacctgccaagttaggtactacagcttagattttttttctcaaagtctggctctagccttgcctttgtttttcgtagctatagtttcgcttctaatttttgcgcctagtattgattttctagtcgtttcttacgtagaagacgaagtccctctcctcgttacaaattaaagatgttaagagaagctccaattctttcaatctgttttttttgacggaataaaccaacacatgtagcctatttctaaatgggtctaaatttgtcggcggcccaataaggggtcataataaaagaataaaaagccttaaaaaggaattagtatgtatctgaaatcaagctcactggactggacgaccaaaaaaaaagcgcaccgaaaattcccgcgttctcttcttaccagttaccacgccgaatcactgacctcaaatccagagcttgacgaatctcgtgctatgcgaatgctactaggttctaatatccatcttcttccgacgattctagggtttcaattttctccgataaccccgtgaagctcttacaaagtcgagaagtgcgtggttaggttttccggcggcgatgaagacgacgcaactgttcaaaggggcaaatgtttttatgtctcggaatctggtgcctcctgaagtcttcgacacacttctcgatgctttcaagcttaacggtgccgaaatcttcctctgctgcgacccatctcggagtggtccctctgatttccatgtcatcgcttctcccgatcatgtgcgaaatgttctttcttatatatccctgcaattgcttatttcgttatataatctgctcttattgccatttttttggggttttacaggagaaatttaaggatcttaaagccaagggttgtaacttaataggtgagatgagatttattttatatttcttgtcacttaataaatcaattgattctgtgtttgtgaattttcttaattggatttatgtttattgcgtggcaggtccgcaatgtgcgctcttctgtgcaaaagagggtagaccactgccacaaaggggattcacttgttgcctagccatggatggtctaaaagttcttgcttctggttttctggtagatgagaaggtacttcttttgtcagtgtaatagatgtcgtttttagtttattagtatcctttattccccttgtactgtaatctccatgggaatggttgtgagtctatgttcgttcacctatcgattatgagattaacagtgtgcatatgacatagtattgaatacttgtgtctctttgtttcccattgcgcaactaaacaattttagaaattttggtttatggttcaatttctgtgttaaaagaaaaaaactgacctctcttttgatttagttgaaatgtgtttttagagtgtacgaagcatgtagattaaaaaatgatttctgttgagggaattgttttttcagttactctgaaggactaatccctcttaattgattgattgcaattcttttgaaggtcaagatcaaggagttggttacttccatggggggcgttttactttccagagcttcttctgatgtgaacttcgtcattgtgaaaaatgtcttggctgccaagtacaaggtctattgttcaaagattgcgatcaatattcttttaccttctgaaggttcacatctgtagattatataactagcttcttatcagtttcacctttgctttagtaacatatcaataccgctgttttccataatgcatctcagaaaattattccaactatgttagataaactaaaagtgtttatcagttcatttagctttaccccaattagatgaatttttctctgtcgatgccggtaaattaaagttagatagaatcatagaagtggctgttgatcttttgcacggtgcatgtgagaaattacattttcccagcagtacatagtgcctacattaaaagaagagaggccttttcgcgtaagtaaagatgtaaaatgcccctaatgaaggcctcaaaatataggttgtcgtcatccccctattgacgggttctgctttgttcatttttagatggtagctggatgatgtatataatacttaggctaatgcaggattgcaggtttacttctcagagtgaaaaacaccgttgttttctgaaattatttttagtcagcgtcgtgcctctactgacttatcattacatattatatcctagagcagagtgaactgatgaggttcatgaggaagctgttatgcctatttcattgggtctgataaatatatcttattttaacttgcagtgggccctgaataagaagccaatcgttactctgaattggttacatcggtgttggaatgagcaccgtgtggttcctcaggaaccatataagattcctcctttttctggattgacaatctgtgtcacaagaattccagcaggttagaaaaccggtatattcaacatatgcgaattaggttctttgttgacagttaatcagtgatttattatcagatgaacgcaagggaatggaaaaggtaatttcagaatatggagggagctactctgctgagctaacaaagagttgtacacatttgatcgctgatatatcctttgaaacaaaatttaaaaatgtgctattcctaggacatatgttgattttgtgtgcgcattcagttgtgctgataaattagcagtattcaaggcttaccaatcgggttctctgaagttacaagatatgtgaatataaccattacgtggttgatatatagatgccttaaattccaagttcctgtgcactaaagtttgaggttgcgttatttggactttaatgaaaaatgattccttgaccttgcatacgctgctgaaggtgacaaatacaaagttgctcgaaaatggggtcacattcaaattgtcacacggaaatggtttcagcagtccatcgataaaaagggtgacgttgggtgcttctgcattttatacattctcttactgatcagtgatcggtatattggctctctataagttaacagattcattcgatactgatatgtcaccttgttatgcgcagtttgtctcaatgaagagtcatatcctgttctcggttccatacccttgacaagaggagtgcgagatttgggggttcataatggtctagaaaagtttccttcggctgcaactgcgtccgcggcagattcatatgtttcttgtgctcagtctagagactcagatatagaagcttctgcttcacaaaatgtttttcccacttctatgaatcccagtaccgatgttaaagaaccaggtggaggcccaacggcaaggccgcaagagcaaaacattgatggttgtactgccagggattcagaatccgaagacaatgacttgtacttatcagattgtagaattttcttgcttggttttgaagcttctgaaatgcgtaaacttgctaagttggtccgcagaggtggtggatcccggtatatgctgcttaacgaaagaatgactcatattgttgttggaactccttcagagaggtaaacattgggttcgattttgctctatcagctttttccttttttctcttgtagcattggtcgagttctgttaggtgggtctctctaagcatattctctgtaacataatgatctctacataaaatattcttttgtagtgagaaaagagaagcaaggagtgttgcagcttctggtgtcattcaagtagtcatacccagttggcttgaagattgtgatcgtgagaaaaaagaaatccccgttcataatatatatactgctaaccacttgattcttccaagaggtctgctgttatctcatttaaccattttttaattatctcagacacatgtcatctatctaatatgcatcaagacatatcaatgcgttatattacacttttctaagtgacttttttttgtgtgcagattctgcatgcttgaccaaggggtcatttgcaaggatgtcaagtatggaacagactaaaaatactcacgaccagaccatggtatatgattcttcttcaaggagtatcaatgtctcaaatgggccagcaactttactgggaaaaaacaaagaagcaatgcaggaatttggcagaaaagatgagattcatacaggaagaaaaatagtatcacccacgcaaaaagaaacacttatttcccttgtaacttgtgaaagcaaagaacaacggagtattcaatgtgaattcagtggtcagaacgatcaagaaagaaagtcatctgtatttaagggggaaacattttgtttctcgcattcttttcctgaagatagggtatgtggttatcaaagaatcaattttccttgttttgcactagtttcttgtctgagaatgcatctccgaggtctattgattgatgtgttaccaatttgtgcagcgaccgcaaatcgtggaatgggtgaatcaaggagggggagaggtggtaaatgatcctttgataaataacgcacattttactattgaatgccatggtgggttccaaagtaccgagactacccaaactatctatgtctcaagtcattgggttcgaaattgtttaaaggtattattcttctcggcattcatctgttagttaccgattgtattatttgttggaaataatattctggtgtactcagtgtccaactgtcataccatcatccagttaaagcttttatatctacatgaatttttcattaaaattgatttgtatctattatcttctactttctagtttctattatatgcgtttatatcctatatatacttcatttttcaggcttattgtctgatttgttatcttgatgatgtaggttggttgtttacttgctgttagtagtcatatcctctactcacctcttccctgccagacacctttgcctggattcgaaagcctttgcatatgtagttcccaacataatgagaagaatgtagaactcctgagaaatttgagtgtcgttcttggagcagattttgtggaaagactaaccaggaaagtgactcacttgatatgcaactttgcaaaaggagataagtatgtgagagcttccaagtggggaataatttccgtgacacctgactggctttatgaatgtgttagacaggtgggcctccagggattcaatatctttgaaatagtttctttgacatgggatcttaaatttaacggatagttctttttgaatttcttatgtgtagaatcaagttgtttgtacagataacttccatccaagggaattgaccactcaagatcgagaagcagggtctcagtttcatacacagtttgtaccaatggcctcaagggacagtatgtctctacctgtaagtcactctgaagacagggaaaaaattcaaagttttgctggcaaaagtggttgcgggaaaggtgaagtatataacagacttggagaaattggaaaggaacaaacttttccgtctaagaaggcaaaacttttgagagatggtcaagaaagtgatgtgtttcctgtgagagaacttccaagcaattgtgatcgtccttcgcattctggagatggcattgtgactggatatgatgtagcaagtggtcgtgaagttccagatgtggctgatactattgaggatctgttagagcagacaagcaaagtaagtactttttgcttctttctccaattatttaatccaagtcatattttctctgtattcacgtctggtcttctgtttagattcaagatcagaagtctcctgggaggattttagaaaagactgtatccttaaagtttgtgtgctcattcattttttttttcgtgggtaatcaatatttggcattgtttgactccttgatgacaaaacagcatttttcaactagtgaacaatacaacactgggaatcactctgtcactggcctgtctagacactggataaacaggtatgttcattcattaaatgcaaatccgcactttgcagatattttttggttttcgaccttaaatgcaaatcacaagtttgcttggggtctaaatacgtacatatgcatgagcctcaaaacctttttcaccttgtttgactccccaatctatagctattacttgatattgccatataagagtgtatcatactatcatgattgtacgaatggaatatatccaccactatgctgtacgtatggaatgtgagcaaataaatggtgtgcaattatgagtgtaagcaagttaatgatgtgcaatcgatttgagaaaagactgtttcaaatctatatgctactcgtatatgatgaattaacgtttgcctaccaaactcttatctatttttcagggtccataagaatgacgacatgggcagtcctccaggagatgcaactactgacacttacggaaactttagtgagacgcagacagaatcacaggttatatataactcttgctctgattatattataccttgaggattccattcacaacctgaaattgcggagttacttacaaatttcaagaaatttgcaggttgttggttacgaggaagatctttcaggaaggcagatgcttatagacagagttagaacacgaagcagcttaacataaagagacagagtgaggtgctcgttgagacagaaacatcaaccatgtgtgtcctgatgagaagtccgatgaaatgttggaaaagcattcattaaagaaacatcaaggtcattgatcatatttatatgtagatcacagttttttttctttttataaagtaattttgttaagtttatgagaatgatgcagacattcctatacttccggttaccgtttttgctgctaggttacagatttatatgatgttttttccctctaattttagtcatccacaagagacaaaagaaaaaggcacacacatttatattcaaaaactaagaacataggtcacacaagaaagattcatacatcacatggcaaaacaaaaaaaaacaaaaaaatataaagcctggagagcagatgccaaatttttaactatataatttggcatttatagcttaagagaaaatacataatgggtgtagataaaacagtgatagtactgtaaaaataaataaaatagtacatttagagagactttacagctagaaaacgaggctctttaggcatgaacttctggtttgcataaacatccatgtaatctccaaacacaaactttggatacttcttctcacttccttcctcttccgccaccgcggctggccctatcgccgccttgtacgacggattgtagaaggaagctatagaccttctgtttccttcctccctcgccaacaccctgtgccacgcactcttgtacctgccaaccacattttggttaaaactttatactcaaaattgtatattttgtactagtgttgtcgtcgtgtcaccactgtttccggatcaagtcgagattagtgttttggttcgtaaaagatgagtgaaaaataccttccgttgctaagaacttcaatctgatcaccagtgttgataacaatggcattaggtagaggctgaacatcgatccactcgccgtctttcaagacctgaaggccatcatattcatcgtcttggaaaagcaaaacgacacctcctgcatcagtatgagctcgaaggccattgactagctcaggatgaggacaaggagggtaatggctgactttagtcccaaagaaagctgtctcttctccatcttccattccttcattgaaagctttctttatgtaacctttaggcaaacccaaattctcatccatcacttccatcatcttgctcgctagcttcctcacttcttctctgtattctcccatagtctctctgtttttacgtacaaatagaaaaacacaaaggtgagatttttgaaaatgggtttgaaagattttgactagttttaaaagagaaaatgtttacttaatgttggatggccattcgttttggttatggtccaagagagtgaagacatcttcccagtccacgttttctagcttctcgccagagttcttttgaaccaattcgttgagcaacttcacgggattagaagtcttgaatgcttcttctctctctgttttgtagcaatctgagctcagcttcttcaccttatttagaagctccaatggaataccatggttcaccagctacatacatacacagataagcacatgaaaacagagagacagagagagtgtgtgttctgttttttgttagttagatccgaacctgaaaaaatccccactcttcgcaagctctagcgatttcagacagtgtcttctctctttcttcaccattgagtttggagaaatcgataacaggaatcgccatttcagatccgcaaagagagagagagagacagatgtgtttttggcaagtcaaaaaagactctgtttagtagtaatcttctgatttagttgtgaagattatggaaagcttaagcctccatttatactatttctaaattttcccatgtatttgttttctttaacgaaaatgaaaaaaacgtaacagtgaccagttgactattgtatttaatttatcgttcatttttacgttatgttattttttaaaagctaagcatgcataagtacaaccgttgaatcttatagtttccatattgaaaatatcacttacaaaaattgggatgcacaaaaccaatgcgtttatgaaaattttaaatatcctttagttacagttagtccatcttctgactttttatgttttaaaaaacaaaagttactaatagagattaaggaattatatatagttattgaacatttgtataatccttggcattagtaaaactatatattttataatcttaagtttaaattgtatgctacgatatgattatggatgaaacagaaatcccttacatatatagtaatgatatggttactccagtttgaaattcctttattaaacagagtacagactaatacctcttgactttagattacgatgagattttcacataaatgattaatgagcaaaagaagaaagagacagagacatggtttttatttaatttatatgtattgcctcttttatagcttatgagttatgaacatggaaagttataataggttagctaattattatccaaaaataaactaataggccttgttttcatggtacgtggacaatttagattttaggggaacatggaggattttatctatataaattgtagaagacattaaagaacatatacactactaattttgcataaagctaactaaatagtactataaaactagaagataattatcaagaacatgtataaaattagaggaaaaagttattaattagtggaaataattgtatgtacagcacagccatctctgctgtacacatgagcaggtgatgtctcgtttttgtcctcatcccaaaactcagttgagcacaataactaacagagtctctctaattatataatttccaactaatctttaatattatcaacacagaggtgaaataaacaaaaaaacagaggttgagatcagtatcaccaactaggatcaaaccatataatttgtgccaattttcttacgattaattcggcaggaaaggagtaggattagctcatgtcagaaaatgagaaaatttgaagtggctgactaccataatattcttaatgatagtttagtcataaaagtagagtttctttagttttatggttcatgaagattttttacaacgttgttttcaaaacagttaagactatttttcacaacttgtatcttaattagtgataatttaataacgaatcaggagtaattgtgttttgtaacatgatccatagtataaatatctttgttttgtttctgtactgatgtacttccctaggtgtacttttggtatagcaaattatatatgtggtttattccgtttgttttctttaagttttgacattggattcttgttattctgaaggttgaagtattgtttctaacacgactttttctaaaatacgaaaaattcattgatttattccatttgaccatatgtcggtgtatatattatatatttttgcttcatttttatcaaaacgtaaatgatcaaagcttgtcgtagagttagaattatatcttaattatttgattttgctagtagctagttatgataattgtttgctgtttgtttttctagctattgcagcattataaaccctaaaatagtaacgtatatgtgaaccaaacaattcaaataagcataaactcatttttttaagaacctttctttcctaattaatctataaaaaaattaatttttttttaattgaaaaaaaaagacaaagccgtccatgatcacatgggactacacttggaagtggcgttatagtttgtttaaatgttaatcatcgatccatttttttatcaaaaagaagaaagcaaaatcatttattatccaaatgcattcccccgagccactgttttagtaaagatcaacgagaaataatactgacaacaatataatttactcgtttagttttctttctacaaacaaactgatatataaatgaaaaaagttaagaaaagagatagatatatgttggattaattagtcttgaaggacaattgagtgtgaatcacatggtgcttagtgatctttgtctcttttatgttacagcaatcgaatctatggactaaaagcttaccttaattataaggttaatgaagtagtggcctcatattgtttgcgcaccaaaaacaaatttctatcaatcagtcaatcgaaatgtgttttaaatatgttgaaaaaatatagtaaattacataccgaaaatacgataagaattgttcatttgttttttcttgggttgaaattataaagtttcaaatttgtgaaaaaaaaacagaaccccataaggaaatgatcacttttaagtttttatttattaacattcatagcaaaaaaaattaaaaaatgatcacttttaataatcagcgtaaataccaactagtcaagttcaatgtatgaacattttcctctatattatatgagcttgatttggtgaaaagaaaaataaaatactaattaaagcttgtaagaactaatgtcgacagtgctataaatcctcaaatctagtggactactacttatataaagtttgaatactaataactaaaaaaacattatcttcttggtttgcttattgactctgtgttatattaattcatactaatatatttcatcatttaatttgtatatttacttcgtgagaaaatgagaacacattcgctaagtgtgcttactccgcaaagtaaatagtgagacgtggtcggtttcgtttccataaattttggaccaactaatttgaccttattaaacttattattacgtctctaatctttctcttatctctttaaccgttaccgacattttttggggatcttcgttcttcatttcccgacttcaattatacaattatttcttatgatttttactctcttttgcacaaaaacacacaaaatataatattctttcatggaaggaaaaactttaacataaaaaaacttttgaatacccattggctatgttactaatacacattccgagattaattttagtccaaatgcaattagttctgctagtttgaaaagtgactatttttgactcgaacaatatgagatacatttctaacatctagtatatgatggtttaaataaaataaaatagtctacatatcgaaacgtatgatgtatgcaatttgatgggcacagaatcaatgtacatagaaccacattacacgtcatggtctacgattcttggctttccatcgacgcgtaggagccaacttcaaatgcaatttattgcaaactaattaactgtattatcaaaagtcaaaactctctttttaatcatttctttcgcccatcttcacgtttccacaacttcaaattacaattatataattggtcacttactttttgattttataaaaccagataaagaaagtagaaacttcaattacatttgtctatggtttcattttggcactaggacatacaaaattatatctttgtaacaaaaaaaaaaaatacataggacataacatcaaataccaaatttagaatgtataaccaatcagagtgactaaagtggttggtaaaatgtaatcaatctttcccttgaagacctttactaagcatcgatcgtgtatgagagctaaatttgcagccacttttttccattacttggaacaactcacaaaacccctctacaaagccctgtttaagcacaccatcaatgaggattttccaagcgatttcatcatcgcaatatccacatcgaagcagtttttcgaaaaccgagttgactctctctttttctccttcttcacacagcttgcaaatcaacattttgcaaaactctagttgtggtgaatgaccattacatatcatatcttccacaacttttgcagcttcctcatacttttgcagcttgtagtaacatctaagaagaccattacaaatcttctcacttaacgatattcctcatactgtacgctggtttggaaccaatccactttcttccatcaaactaagcaatctatatgcactatctaaattaccagagctacactgtccagcgatcaatgtattataagttatcaagtctggaaccaaattctgctctagcatcttactaagcagtcccattgctttgtgcacattcttcttacaaaaacctttgatcaatgcattgtatgtaataacatttggcatcaacccattctccaacatatgttctagcaatccacttgcttcatcaagtgtatctccactacaaaaactctgaataagcacagtatacatacaatcatcaggcttaatgccactctctgacatctgcttaaacaaattcatagcttctgacttctgtcctgatccacacaaagcatctataagcactgtgtatgttcgaacattaggacaacaattgtcatctttcattttcaccaataagctcaaagcttcatcgatcttctttgcttcaaatagaccatatataagctgagtgtaagaaacctcatttctatggcaaccgttctgagtcatctccttaaaaaccttaaaagccgcatcgacttcttttcttcgacaatgtccggtaataaaagaagtatatgtgaaataatcaggatcacatccagcttgaataagccaagtcacatactgctttgcttctactacatatccaagcttacaatacccattaaccaatgtgttaaacgtgtatatgtctggagaaaccaaatcctccaacatttcagtataaagtctcttcatttcttcgactaatccaaatctagctaatgaactcaacagattattgtagcatttaggagtaagtttatatttaatctcgaagctatcacctttacgcattgtcctacagaaatcaacaacaaacaaagcgtctcgcactgaattgcagctctttatcattaagatcgtgatcttaggcacctcataaggtatttcctggctgcagagaagagtaaccaaagacgcgtatgaagtaacgttgtgcttgaagtttggtatccgagagatccaatccgagaaactgagagctgtctgaggatcaagattgagtgaaaacagagaagagacatgagaaggtgtatagaaggggtaagagattttagagatggattgttctgccaatttggttcggagacaattgagagtaatcggcatggaagattagaggggttagactctgctgttgagatagtacttgtaactttgtaagcagagatgcggcggtggataatggccttcgacggagaaggtagccggaagaagtagaaggagatttggaagtagtaatctcatcgtcggttgattcgacggtaagttgtacttccagttcaagcaacagtagggtttagggtttatgaatcagtgaatgcaagcaaaacctcaaacccggtacaatgctacgtttggtattctgcattggtttattaattaaacccaaactcaagtggcatgtacaatactacgtcagttgtttgtataaaacgacagcgtttgaaaccgcgactggtccgtcagggtatatatgtaatatatacgataaacatgtattttatggtcaatgcgaattcccaattttcccatttcttaaaatctcttctcgatctcctttgtttccgatttgccggtcttcgaagtggaactgtggcagtgacgagcgtgaggagaagatctgatctttagggctttcaaggtaactcatcacattcttctatctgttgatttctcgttttccgaccagtggatcaatcgatcagttttgtacgaattcgtgtctgattatctgttacggtcttaatttgattgtttagtttggatttagaagcatggcaggagctgttggaacatcaatgttagggtctcttattgtgtttacagtgatcctctcgcttcaggaaatttacagaggaaaattagcttcttcagagctgttcacgatccttggtggattcacaagctctctcctctttttgttttctctcactgtaagttccttagaattcctcaacttgatctcgtcttcatggaaatgcactacctttacaactccaatgttgatctgtgtcgttaaatttgagatcttttgttttcttctcgaattcatctacatttgttgttgacagtttggttgatgcggtttcttttactttcagttcattggaaattttcaggaatcttctggcatcaagagtggttggggtgcaggtatgtccttgcttcttcatgaaatcaaatttgttcatacgatcaaaaccattgggtgtctactctaccccattttgtcttccacttcagaagtttgagggcttaagagtggaatttttgaatctttgatgatgatgctctaagtttactttctgataacatattacgaaaactcttacttttatgtgttacaaatactcttttagtgaatcagttgttggaaccaaatttttttcattcttatgtctttttctgtatcacctatataagaatcacagtgataaatggctcgaatttgtttgccccctcctgcttctgctgtgtgaaagtgggtatactcattactcaacaagggtttgcaatgtattgaagccaatttttgtttccatggcagtcattcttgcagaaatcatagctcttatcgctgctggcacggttcatcgggtttgtatcacaacctggtaagtggaaattcactagttctacttggtatatccatttaccctgtttaattacttcattcctctcttgctaaaagcggtgtggtgattgtgatgctgtttcttgatctgcctgcagtttcctgttctctgctgggctattgtacgaggtgaacaagatctctggatacatgctatccaaaaccgagtcaaagtctaagagacactgaacctgataatggaattgatacggcttattattctggacttagatttgtttggcacttgaagatgcaaaaacactttcaacatcatgaattgtgatacttagaaaccctaaattcaaaatccacatcttatgcttgatgtgagtattaggtctgtttcctttgcagcttataatcatagagataatcattttagttgtgtcttatgttcttggagaaactgaattgtgtcttttggcctcgacatcgtatcatccgcaaccagacacatcaaatggtttgtatcatctatattttaatatctcatgtatcgaaaccgcaacaattgctgattccaatttaaattacaactttaccaaggtaaatggagcctgagccaaatgcttaggatcagctgttgttagcgtactaatctgtggttcacaggaaatctaagaaagtcaatcacacaacggctcattgaccaaaacgttcatcttctcattaaggaacttgagcacatcttctctctcttctttgataagcagctgtcttaatctaccaaacgttacacccgatggtcgaatccccatctcgatcatctcctctaacaaaacacaagctttctgagtggtacgctcctcgcacaacccattaataagaaccgagaatgtatgcatactagggaacacccctttcttcctcatgtatttccacactttatccgctgtctccatctctttcttttcacaaaacatcttgatcaccatcgtgtaagtgtctgcatctggttcacacactttaatcatcttcctaaagacatcaaaagcttcgtctttctcccctcgttctattagatggcgtagaatgatgttacatgacttggagttaggcgtcacacctttactcttcatttctttcaaaaccctatacacattcttcatcctatttgctttgcaaaatgcaccgatcaatgaattgaaaactgctacatcggctttcattccacttctttccatctcgaggaaagtatcaaccgcctcttcaagccggttctcagttccataagtatgtacaagcacactatagataaaagtggtcggcttgcaaatgcttggatccatgctcctcacaatgccaagagcttcatcaactcttccagctttacaaagtatgtcaaccattatactatacgtcactatatccggatgacaacccgcatcaatcatttcccggaagacctctcttgccttgggcaagttgggttctttcccccatccctcaagcaatatgctatacgttttggagtcaggcgtaaagcgatccctcatattttcgaaaacttcctgtgctttcctcacattcttggatttacacaacgcactcaacaacccgttgaacgccacaagattcggcggcaaatcatacttctccatcacattaaacgcgtaaatcgcctcatccactttctgcgccctcgcatacttcctcatcacgatacaaaaagtctctacatttagcatcttcttcttcctcattgcattgataagatcccacatgagcttgtactgccttatcttcgccgtagactcaatcatcatgtggtacgcacgaacactatgctcgtaatgccgttgcttctcagaccattggaagaacctgtatgtcaacaaaccagcattcctgaatctatttaaaacatcttctacaacttcttgtgaaacccttaacccactttgatctaaagccgagtcaagcaccaattgcggagaagacatcaatactttagatatgttcttcgccacatccgcaacatctctcacttgttcgcttgaactatacagcctcgcagacagaaaactcttacagcagaatctggattgacgattgataattctgatcgtcatgttgaatctaacccagaccgtagcagaagaactacattcccatcgcataaaagaaaaaaaattaaccagctgacgaaaatcaactgatctaatcctaaaacgcttcattgaggcatttcgtcaaacagttgatgaacattatattattgtgcacataaacaaatacacaaatctacttgatcagaaaagattatgtatttacctgtatgaatcaagtggtgtctgttttcaggaactgtggtttttgtcaccggagaataatccacgcggcgacggcgtcgaatgacgaagactgaagagcgactagtatacgccaacgttttgaaagtgagataaatttgccacgtgtcatttttgtcaatgtcacgtgttcttttactaagagccataaattggaacctaattaatggtccaaatccaacaataaatcacctaaccaaaaaaataaaagatttttacattcgacgagaccgtgatcgaaacggcgatggttgaccagagtcctcgccgtgttgtcgtggcggcgctcctattgtttgtggttctgtgcgatctttcgaattctgcgggagctgcgaattctgtgtcagctttcgttcagaacgccatcttgtccaacaagattgtcatcttctccaaatcctactgcccgtaattaaatttcactctttctcctaatttgaaatttgcaatttaggcaactttccaagttttggttcatatctagctttccttattcattggcacgatggcggaattcgaaattccaagactttgtgttgaaagttgtgaattttgttttggatgtgttaggtattgtttgcggtcgaaacgtatattcagccaacttaaggaagagccatttgttgtggagcttgatcagagaggtatcactttctttctcacccaactgtttatgagaattgaactgtttcttaaaacttctgagagatttgtttttgcagaggacggagatcaaatccagtatgagcttttagaattcgttggtcgtcgtactgtcccgcaagtttttgttaacggcaagcatattggtggatcagatggtatgatgagctcactatctcctccaagtttcattcttttgtccaaatttcccttgtaactcacaagccttggctgtttatcttgttgcttcagatcttggagctgctttggagagtggtcagttgcaaaagcttcttgctgcaagttgatatttgaggacctcgaatgtggaatctacagtatgtgatttacaggaattagaaatctttgctagttgtagactgaataagcgaattgatatgtatgactcagttatgtaagttatgatggcattgataaagtcttgatcttttgttactgcactgctctggtgattgtttcgcttaaataatccatacttgtgtgccttagtgaatggttcatacggcaaatatcagatcatggaaagaagagcaagtacaagaacttgttattgaaattttaccacaatggtaatatactattatggtgctagttcatgattctgttgcagcacatgactctgtcattaatcgaagatttactcattaggactacaattcttgccttcagggtacagagaagattatagagaagaactaacagcattattgcttctatctatataaaaaaaagctgatcaaaattcccaaattcatggttcttggttctcttgactgttcttgataaatccattgtgtttaaaactgacttagtcatcgctttgaattggctactattcaagttgatcagtattcgcttcgaaatggcttgtaggactttagatcaagaagtactccagctatggaccctgcagctgcagcaatgctaactactagacaccctaagctgaagacttgaaggcaaacccatctggtgctccatctaggtatcttcttctgcgcgatgtacatttccactggaaaatacaccgtcaatggccaaaaccctagtgccccgagcagacccacaacgtcgttgaaaaacggaagaagcattgagataactgtcgttatgatcacaaacactgtcctccatatcaacctgagtaagccattccacgccacacagaagctttgattattacatacacatcatgtttaaaactcagatcccattagtttaaaggcaagatttgtacctgaagacattcaagcggagaggcttgaaaccaggaattggaattttgatatcttttgcaatgaactcactatcagggaattgaatggaagcttgcttctcgatgaaagcaaacagaggttggcaatagacttggtatgcaccaataaggtgaatcacaatggctgcatttgcaatgtcaagaagccaataaggattataaaacccgaaaccggttaagagatttcccggagacaagtctccaaaggctgcatatcccatacatccacacaacatatagaacatagtcgttacactgacgctcacaagtgttgccttcttcatcgtcttctcttctgatggtggtgacttcactgtgtcctgtttcagatcccagaataaaaaaagcttcatgatgggaccagtaattaatggctttgatcatcaagacttgtaaagaaggtataagtacctgaatctcgatgaggataatggagtaagagtaagcaaaagcaatgtctccaagagcttgaaaggtcctccatatcttctgtgtctctgttactgctcctatgctaatcccagtgagacttcccttcaccttcccattaactgatgaaaccaaaacacataaaacctattagttttttacctatgaaagttcttatttaagaccctagaagctttatggttcaagaaacgaaccgacaacttgggctatgccgagggcgagaccggctgaggaataagtgaaggacataacggcggcgaggattgagagccaccaaagttgatcaaaatctggaatctgagagaatagaatctggactaatccaaaagctatcatgtaaggattactgttcatgtgacatggatctttccctccactcttgtggaaacagtttgatctctttattgccctgtttttcaaaaacaaaattttgtttattttttattatcatcaaaacctatttggtccattacctaacttcgtagttttaagagttaattagtgagaacactcacatcatgcttatagctgaagcaattgtgtagccaatagcaacaccaaagatattaagatactgaacaatcccacatagcgtcaccttcacgccacctatacagaacaatgaaaaatgttaatgctctgttctgatctgatctccattgtccgatttctactttgaagttttgtatttaccgagatttgatcggacagcatccatataagtgtagttcctcttgccggagatagggtcgccggagcggtaacaagcagcaagaagagaagaagtgaaataagtgacggcagagaagagcaacatcaccaccggtccggcgagccaacctagctgcgccgtagcccacgctagtgacaaaactcccgaacctatcactgccgttattatgtgtgcactcgccgtccaaacactccctaaaacccaaaatttaaaaactttcaactttctcgttttttcaacataactaaatcagagcaggtttcgagttcaaattaatatttttttgaataattagagaaccaagtctcaatatgaattaaagagaaagagagaaacattgttaccagttcttttgtttttcccgtcgtcgtccaagtacttggagccgccggtttgtggcatatcgacggcgagaactgtttggtggttttgaaccatcttttgtttgttttgctctgtttttttggttcttcgttcaatctatgaagttacatgcagagtaagtgtttgaaagagttgatctttagaaggtaagggaaatgtttaatgactttgttaaagaactgtcttgtggatgaagataaactgagagtggagtgcagatttatatacacagaaactggtaaaaacactcatttgaggcaaacacagtaaaaggtaaaaagtgtattaaaaaaaatatatctgtcttggtaaaaagttggtaggaccactattactcaagtgttactattgaaaaatttgacttcatgatttataattttatatgaatgattcgataccaattggataaaaacaaaagaaaagagaaaatatgggcaatggaaaattggaagtccaagatgataccatcgttttcatttggacttaaaatgtcattgttcagcttttttgaaagaaaaaaacaaacattcatgtacgtgtgtgtttgaagcttagtgttattttcacttacaactagattttattagagtattttatgagattagagaaaataaaatgttgttttaaaaataataggcattttggttatatcatttgattatttacgtatttcgctaattttaaattttattaaccgtggacaaactaaatttatttagaaaacagcttggttttttcttgaatatttcaatgtaaagtgttatcgcattaagatgttaaaagaacattcatggaatcatgacatatatatggagaaatctatgccgactttaaataatgagtacacgcaatcatgtgtagatttcaaaatgataactcaaaaccaaaaggtgatttttatagtatgagcaatagtaacgcacatatactatatcttacctagaatccgaaagtatatcaccccaccatataagtttctgtaggtaactaacttatgaggcgtgtaagctatatgttcttctcgaaatgaaatattttgattactttgccaactaaactcatttaaacataaatgacatacacaaacttgtattggcttgattcgtgggaaaccaaatatcctttaaggacttacgagaagatttgtattcagacaagtcatcattcaaaggaaatagtctccaaatataaagggaattatattcataaaaatagaatctatatatacattgttgcagtcattttgtgaaataaatcctggagttggaatttatttacaatggctaccattggcttttaattattgtttttttagcaataaattgattaacaaataaaaaaacattcgaaatatattccaatcccatatatcacgcagatttttccaaaatttgaaatagatttcgacaactatttaaaacaaaaaatgtttgacaacccaaaagacaattgcaatcccttaaaatgagcgaaacgcaactaaatatatttcttatctattcactaaatcttatgtctccaaaatttgaactacatttcgacaactatttaaaacaaaattttgtttgacaaactaaaacacaattgcaatcccgtaaaatatttattttaattataaatttaaattagcggggtaccgcggtttatttttacaggacgagtttggtggaacgggtttagaaggacgttacttaataacaattataaactataaaataaaaatattttatagatagacataatttgtaaaattttatatatactaatttaaaaaaataaattgtctccgcggtgtaccgcgggttaaaatctagttcattctttacaattccaaagtttataaccgcaaaaatgcatacaaaatgtaccagtttttttatttttttttccatgtttacattgaaagataattaaaagtaataacaaagatctaggagatcatgaaaaagaatatggttctttggttaagatcatccacttgatttaagcgcacacaatacacacacagccatcctcaatgtcgattaacgaattaaaagaatgaatgagaaacgcctttcatcatagcaactgcactttcttcaacttgatcccttattaagtgttatcttcattattatttttattatctttgtaagagtatacatcgccatgagtactatatcctcctaacacttacattctcccttttcacttttcagacgccgcgatttatcgcattcgaatttagagaaagaggagcatcggattcgttgcttactattatcagttaggtttctatttagataatgtactgtaattagtagtatttaaataaaagttaagatcttacagaaatatctggtttggcacttccaagataacataaagaaaaggaatctgtattctcgctaagtattaaattctaattatactaaacacgaaatagtttttacatggaacaaatgaacttctcccatcatagaattcatgacaattagaaaacttaaaattttcaagctgaataatgctatatatatagtgacgtggttttaatccgacttcaaatatgatttaacattttcatcaactgtttaaattgataaatcttattaacatgtattattaatggatacaagaaagaagtacatattggtcaaattaaatatctaatctaataataataataataataataataatactatagtctcatgtatatactttttggtttcactttttagttcaagaacattatgtaatgtctttaaaatatataaagatgagtcgatgacgcttagtttcttgaattttgacatcttttaagcaaggtttggcgaccagttgacttaagacaactatcttgtatgaaatatattcttatttagagaaaaataataatcgtaactactataagaatcttttttggttgtaaacttgtagcttttcgtaattaattgaccaacgcactccgtgactacaaatatctaaagacgagttataatcgatcctcctcaacattatataacatctatatcttcttatacatggtaaatcataaaatttggcccactatatatagatcgtatttatcaattgtaatgatcattgaattttcttagcattacactttttaaaaagttttagtttgaattagtagccgagccatggagaaagttgtttattaaaaaaaaaaaaaaaggtgttgcaatgtcgttacagctgaaatgtttgaacgttaggtagcatatgcgatacttgaatttatcatatttcatatctaactgcacacaaacaaaagcgtttctttgactcgattactcgaatataatgtattatttgtgctttgcaatcgactgacacttgactgaataaactgtttcttttgaaaaaaaaattccacaataattttgtgattagcaacaaacaagtaatgattttgatgattctagtcaaaaaaatgttaacaaccaaaaatgttaaaataggaagaaatatttatacttatagctagttttccctcacaatttcattcttcaacattcttttatatttgttacatttactaatcgatcacatccgtatagtactaacaaagatgtttttatttcccatttagaagtagatcagagatgttttgacttagaccacaaacagtaaacgtgatttcatttcctatttaacgggatgcatgcatgcatggttggacttggaccattgacaatcataatatccatatatatctgatgtatcattctcaatgttactgtataagtcgatttaaaacacttatttaacccataataactcatattttcactaaaaaaagagagatgaacaaggccgagatgttggtaaccacatggacattttggttattaataatgtcttgtggattattgacttgtctaacatctgcaatgccaaccaaatctttgtcttccaaactctatgaatcaagcttactcataaaagtaaagtcgataccgcagagagaatcggtctcaccaatagcctttggaaccttgccaaagtctaagtctccgcgtccgccttctactccatccaggtcacataatcgacgaatatcaccttcagaatctcctgcttcgctgctagattacaacaattttgtctcatcagaaccaatttatcaatattgagacaacaagctctgtaatagcattttattaaatagatggtctccgtgattgtcaaaatctatcattctaaggcggtttgggttggtttttgttttacatgtgttatgttcattagaaatttgagaaacgaaatattttagttgcattttttagttgaaataaaacagataattaatgcttgtttcatatcgtttcataacaagcatgtcccatcagcataatctcacatgcctaatcaaattttaattcatcccagaaactatcaacattctatagttgattcatagaacaattaaccaaggttgttccaaatctttgatcatccttttaaggcgttggaggtggttggtctgcacttcaaccaccacaacgacatccatagctcagaactctgttcacatatatacacttgtaacgaaacaacactttctattgataagtggtattttcatctacacatcatctctatcggactgagtacattttgcctgacccgactgatgaatttttatcaacaatatgtacaatacacgagggtaaaaaaaacgtatccagaaacactatcagaggaaaagctcttgcggtagtgacgtgggacaaagcttctttgctgcaaacttgtactggcaggagaagaaaagagagtaaacacttgcaagtattttgatatgaagctattaataataaagaaagtggaaggctcgttactttgtgttgactgtacttctttctgattgcaaccacatcagatgagagtttctcattacacagctgaagaagattcttaacgcatgcttccatatgtttagccctgtacgatgtgtaatgctctagcgtagcattctgcaaaacccgaaatcagcaggttttaatagaacgcagagttgaataaagctaacaactgaagaaaataggaatgaaaatacagtcttgtggtcatacccatggttttcttgaagggtgtagagtgtattgtgccaagaaaactgcagaggctgcaacaagtgatggagcgtatcgaagcatagcgtaatctaacagcgataattcggtgagatagcaggccagacactcagacagcagtgatggtacctaatagaaaccagctactagtcagaaacgtatataacacatcacccattgcgttgagagctcatttttaattttcatataacagaatacctcctttctgccttgagcagcacgaagaaagcgcctaaccacatttttaaagtctagatcagcagggaaccacaaaaaatgatgaatgaagataacatcaatgtgacaagaagatacctcaagaaacattttgctgttggagttgttaattcgaacttcaagtagttcagaacagaagactccatctccaaaagctgttaaaaagcttaaaggttaacaacaatatcaaaaccacaagaagaagagtttgtccagggatgactaaacatgcaaacctcgttacctcatttcttaagtatgtgttatcagtgatgtaacagaaatcctccacttgcggcacacacacttcttcatattttctggaattccagtgtctctactagttagaaattgcatacttttgaaaagaaaaagaatgaagccaaagagtaaaatttctagatttcttacgctgctatcatcatgcaggtaacaccaagtagctgcagattttgcttgttgattgcatttcctgtaagataccgatcaacgtagtttactgccaaatacaacgtctcgggcgaaagcctatactcttcagcaacctgtaggtttatgaaaatccagaaaacagctttgtaactacctattgctataaaacatttggtgtattctattactaaacttattgccttatcaatcaaaactaaatatcttgccttaatgaaccaggattcatcaaaagcttacctccacaagccagtcaatcagtatagaacgcatgctagcattgatgcttgactgagttctttccatgtaatctagagccggtcttttgttcacctgcagagcataataagcaaaatttcaactttgacaattcagaaacagaatcaaatcagtatgagaactgtggcagagtaaaacaacagccatcctacctcagatacacgcaaatgctcgtagatatcacaagcaaaagaagcacaaagctgtggatccatcaagtcactatcaatgttaacaatctcatcatcatcatcatcatttccatcatcagtagtgctctcgaccatgtaatctacaacgtggttcgtcaaagagtcatgagtggaaattgacgggtcagattgagtaggagaggcatccaaggataatgcaggtgaagaacatagaagactatcatcgctttggagcaattcggtgtcttcgtaaggaacgattatgtttgatttcgcatttggcttgggaggtaaaccggaatcgagaattcccaaattccaattacgagataaagcaggttttggtgctttcttagattggccgatcttatttgaacaattcaccttcagagattgaaacatttacagattcaattccaggataaaccctaaaaactacatttctcgacgaacaaacacaggaattgaaaaaggaacaaaaagtagagagaatcgaagagaaattttaccagagtagacgacggtgaaggatttctagatccattcttctgatttgtgatgtcgccgaggggagcacgacggtttccaacatcgcggagtgaggttcgagtcttggctaagttcggacgaggaatcggattctcctgagatagatttctcgacgaagaagacattgttgatgaagcaatcgaaaatatctcaggctcggcgttctcgttttccggtgagatttagggtttctcttctgcgagagtgagagagagagatcttgaaggagacgacgagaaacaaaacggaaaatgaaaaacgcggaattattttgttttctttgattaggggttttctattttatatttattataagaaataacggatcaatcttggccgtcaattaaaactcaaagaccgttacgattacacgtatttgatcatcagtgggtcccattatagtttagcgcgaaacttttccctgacttacataggcattactaggcaaaccttctccatgccctagaggggtttaaacaagagcaaggaacaactatctattgcaagtgatatcatatatcttcttatcgttttgtacatacagtctctttcagcattgatttccatatcacaaggtgatgagctcctgcaggtaaaaactgttagaacatcgcactcgtgtggaaatctgattcaatttcttttgagtattgcagagtgctgctgctcagtttttggatcaacactaactttgtgagaatcttctcaactacaaccgcagccatcaaagtagcctttgattgcacaattcgcaaaagttgtgattctgatatatcaaaaaaggaagtagatgacatagtagttgcagaaggatatcatcctgcatctcagattatcaattatgttcctctttcatttttccagtgatccatgttctcacaagtttaagtttccctattgtgttacaaccacttctaaacaattctcttccagtgctttttgacatggtctttgaggctgatgaaagcaaaaggctaaaatctgccatcagcaagctaagagagataaagtgtctttagcatcttttatgatcaaatgaatctgttagtcactttatgttagtcccggatggttaaaaatgagggttcttcatccttttattatgcgctcaacgttttgtatacgatgcagatgagtgcctgcagcaactggatgtagaaaaggaatacaatttgtggtgtttccgcaattccagtagaatcatttaactgacatggtgtggtcatttgaagtttggtttcctcttatgtgacacgtatcattattgtcatcatgcctaattgctatatactgtttttggaatcttttgcaagacaagacaaaagttttaagtggttatcccttttgagtccatgtagggaaaaggtcagttgatcatttcaaagtttgaatttttaccccaaattcgtttggtttagtatttgctttcacgtctaaatcatgaaacaccgcgtgctctaactctgttttagagcacttgatatttaaaatcttagccctttaattttgtccatctattactacaaatagtctcatggtcttactctttgattaaagataacaaaaatttcaagagaaaaaactaataaagtaaagatctttgtgtgtattgtggtgactggtgaccattgcataattgaaaagttaagtaaatgggtagggaccaatagaaaaaccaagtcaaattacatatagagataaacttgtctaatctctcccgccacccactcctatcttcctctaatctcgcctctcatctctctctctttatcactctcccctctcgtcatataaagacattaaactctaaagtcatctctcttctatctatctctctgtctcttcttgagagctaaaaagaacatcaaatggccattatcgacgttgatgattcattcaagagaccaggaactataccttttagctgggagatccgacccggtgtacctaaaacccgaatgtctcaacccggtaacacaactcctcttcagcctccaaagaaactctctcctctccgttttaaaccattgtctcactctcagccgcttctcccgccggcgttatctccaccgtcttcttctttcatctccaattccaaaagccgtcctttatctcctctcactccccattccttttctacaaccccatcgaagctcaagccaccacgaacaccgtcgtcgctttctggattttactctccgggaccttctttccgatcatcgccgcgtgctttctcggaacggtggcagctccaccgccctaaccggattcgacccgaatccgaaccagaaccaagttccgatttttctgttgccgggttcgggtgtttcccgtcgcctaagtttaggttgaggaaagttaagagcggtggtagtcggagaaaatccgggtcgagatcggagaatgattattattgctccgacatggagacgatgtcgccgtggactgtttcaagccgtagatcggtttctccgagatgggaatcacccaagtcgtcgttttcttctctccgattctcgccacgattcgccaacgaagctgaatgggttgggtttggactcttttgagcacattttcaatgaaatggctcgcgatcggttctttagccatccgaaccaacggaagcctcttgaatcgcgcaaatcaaattaaagcaaatgttgggctaaaatgggatttttcaaaagtttagggtcctatatctaatgtgctttagagttttcacatctgtgtaatataaatttgtggatctgtggatgtctaaagacaattcacattttgaattttgaagttttgagtgtggggaaaaaagattgtaagatatgaaaagtaaaattagtaaatgaatttagaaatcacactaaaaagttaacatttttttgctacatacaacttcttaaactatggaaaaagggtcccaataataaaatacaaaactactatcaatctaattaaatattcaattttccaattaagtatatggccgaatcagtcaatttaaaagtatagggctcaatggaaatttaaaaaacagtttggggttcctgggtaaaactttaaaaagcgatcctgagttgacgtcactgttaaagctttcagctttgtaatgaaaactcaaagtaggaggacaccatgaaaccgtcgcaaccgctatgtaaccgcattgttgatcagcttattactgccatgattcagaaccgtccattcgacgccgttctcgcttcttcaacggtggcgaaaccatggactcagcagctcgtctccgatgtcctccattctatccccagattcttctttatctccccacgatccatcggtcggcaaaagggttttcgtcaccgttcaccgttaaagcagagaaacctcagtgatgaatcacaacgacgtcgttctgaagttctagttctaggtcccggtgcgtatatggatcctaagaaagtctctatcgggttgcagaaagcattggagttcttcttttggatcgaaacccacttcgggtttgatcataatgagatcacttgcagagatatggcttgtctattggccaaaggcaatgactttaagggtctctgggattttctccggcaagtctctagaagagagaacggtaaaaatgtggtcacaacagcgtctataacctgtttgatgaaatgcctaggagaagaaggttttgtgaaagaggcattagctacattttataggatgaaggaatatcactgcaaacctgatgtttatgcttacaatacaattatcaatgccctttgccgtgtggggaattttaaaaaagctcggtttctattggatcagatgcaattaccgggttttcggtacccaccggatacctatacttacaccattttgattagctcctactgtagatatgggatgcaaaccggatgcagaaaggcgataaggaggagaatgtgggaggctaatcgaatgtttagggaaatgctgttcagagggtttgtacccgatgtggtgacttataattgcttgatcgatggatgttgcaaaacgaatcggattggtcgggctctggagctgtttgaagatatgaagacaaaagggtgtgtaccgaaccaagtgacttataattctttcataaggtattatagtgttactaatgagatagaaggtgcaatagagatgatgaggacaatgaagaagttgggtcatggtgtacctggttcgagcacgtacacgccgctaatacacgctcttgttgagaccaggagagcggctgaggctagggatttggtggtggagatggtggaggctgggttggttccgagagagtatacatataagttggtgtgtgatgctctgagctcagaaggactggcaagcacacttgatgaagagctgcataagagaatgagggaaggaatacaacagagatatagcagagtcatgaagatcaaaccgaccatggctcgaaaagaggttgttcgaaaatattttcacaagattgacgggaatcaaaattttgcaatggaggaaatctgacacatggtataattccggctcaaatttgcatggctttcatgatacattagatagtttgattgaaacactaattatagacttaagtttatgccagagccactggaagatctaaccgatcaagtgactaaatgttttctgtggaactcaaaccttgtatactgcttttgtaatatttcacaaaaacttttgttatttgttcataataagaaagaaaaagggaacagaaatctatactaacgaattggactctcatgagcattgtgcacgaacaagcagagatttaacagtgtgtggacatgaatcaccaccaaatgttttgctccatacaggtacagaacacctactttttttcagacaagcctgcacaaattcacaagaacctcttgtttgggctttaacgatttcagagaacaaatagaatttacagggacaaaagtagcttaccttctgtacaacagctaaagagttgggtgagtgacagcttccaatagaatagctcccgcaacttccatttggagtgccaaagcttgcaaacaatatctttgaaattttcctgccagtaggacactggagctgaaccttaggcttcctatcataccggtatgttagattttttcggttgaggcctttctttcttggagatatgacaggatgaggatttgtattggagacatgaccacagacttcagtgaccgacactgtgtctatagttataccaagaggattcccttctctttcttcttccaaaatgactagtaagttactgtttggtttaagaaaagatctcggtatatggtacctaaagtaggagaacatagcttcaaaaaataatatccaactaatataccaagattatttaaataaggagagtgaacaatatcataccatatctgagaagggttccccttgtaagtgtgaaatgagacccagtaccgacctatactctggccattcacccaagcttctccttttcccattgatcctaagttcaaggccaccggatcttccccctctggtgtgtcaaatgaggcctgtagatataaaatacctcagagattgaaagttttgagtaatattttgagctagtactattttaccattttgttgttctaccttgtaccaagttagaggctgacttttggagtctctgtactgcttccactgaacttttgcggacccatcttcagtgtaaacatggaatttctcccctttcaggccaaccttcacaacgattttgagctagtatcagttaacatgaaggagataaggtctcttgaagaataaaactcataagttttacctgatatccccaactatagttgttgaagtacagttgatatcttccattccaaatctttacgctccgtgatccaacgactctcctttctagatgtgctcctgaattctgtgttacaaagagagacgccgtcagaaaaaatgtactccagatggttttttgatatttgctacagatactgatgtagaagtactctatctggagcaaatattgaagttcagttggtaagactggggctcaccggtaatcctaccattacgctgagtaatgccaagttatttgtgccattattcaatgacatatttttctccagcaaaaatctgtgcgctttgaaagttccatgcatagaacctaaataaaactcaaagttagaagcatttaactttgatgatgccaaaaacctttaaccttgagtaggatattcaacggtaaaaaggcatacctatgaatctcccattaacaaaggcgtgtagagcatgtccgagatggttgactttaagaactgatggagctccttcagattgctgaaacctttattgcaaaagaaaaattataacttacagaatatccaacaaagaatatactacttatcttgactaatgctatatatcttacgggatataattggctttacctagttgtttgccacagatagtcggaagtatcctgtgtggtattcatgtgctcaagcaaggattctgatcttattgacgtttcactgaaacttgggactgtttctgtaaattcctcccacatttgaggagacgacaaattttgtcttgctttccttgttctcgtgttgtattgtgcattgacctatccacaccgcgaaatacaaatgaatacatcacaagaaatctgcgtgtatgatagtcttgatgtatgagcttaccttggcagtgttgaaggctacattcttgcagtctggcaggacacttacagattttggagacaaacgatatgaagaattacgaaactgtacagtagactcgcatttgtcttgattcaccagaatggcagcgcataggttcgccttcttcccaaacacaaaagcctgttaaataagacgtaaagatcactattacaacattcttcatgatatcacgatactgttagaattttcttacagtttgtagcttccccaatgatattgtagtttgcagtcctgaaagtagaggctcttcacacaacttaactgcagcatgtaattccttaaggtgtccccattttggttgcctaagtaaccctgcagcaccaaccatttatgttgtactttcagatgaacatctgattttgactgtgaatggtttgaaatattaccatattcatcaagtggagcctgatcataataactggtgattacgaactgtgaagcatttctcccgaagttggttcctccatgatactaaaataagatacaatgtcaaatcatcattattcttgcttctcttatacattagagatttttttagtgagactggaaaaggtaccatgtagtagtttacaaagcttccattcttagcgatgaaaagagcaacatgaaacgctatatcctcagctgaccttatcaatggttcctcaccatatgtttgataactatacaaaggggtcagctgaaagttagtagtttatatctggggattgggaagtacacaataatgtagtgaatttgagtgaagaccatacaaactcgtccagttctcagtccatattgcaggtttgttgggtgaattgggtcctttgaatgtttctccacattgcctcccattgcaagcattaacctgaggcaccatagaaacaataagaaaactaaaaaaaacggattcagaagtggaaaattggcagatgagccacattgcaggacaaacataaaaaccaaccaaaggatcaggggcatcatcttgcttgcacataacccatggcactcctgtgtcaagctcaacagccaattttgctgtccatttgacatatgatttcccttcttgtcgaaaagctctaccaaccatcccatactcgttctcaatctgttttgcacataactttaagatcattaaaaaaaaaaaaaaacttcgaaggaaacatacatgaaaaaccataatgtaaacctgtgagagtatgataggtcctccttgggaagcatacaagttttccgatttcatcagcttaacaatcattttcgcatatctcttcatgtgatactgcaaataaaacgtaatcttctttagaccatagaagtaaggaagccatctgagttcagtaaattaattaccttgaatggctcattatctgtcctgaagacaatcccttggacattatgcaaccagaaaggcaaacccctgcaatgtgttattgaaaaccctaaaattccacgaacattgtgttttaccatatcggaaaatctcaacgatctaaagacggaaagagtttacccataagaccattccccttggataaaaggtccaatccgaagacagacatataagccatgattttttacttccttgataaacttcacgatatcacggcttccactgaaatcgaactgtagattcacaaaaaccatcaatcgcataaatacctaaattcgtctgtatagggtatagagacggagagactgacctggccttgttgcggctcgtgaacgttccagaacacatatgtgtctactacatctattcctccagattttgcctttgctatcaaggacggccacatctgcaagttcgatttcccattaatatttgcagaagaagaagaagacaaagagatcccgccaaattttattggaagtttcatacgtttcagaatgtttggggtcgaataataataaatcagaaaataagagcacttaatttcacgaaatccataaaactaaaaccaaatcagaacgtttggggtcgcataagaataaataagaaactaagagtacttaaactcgcaaattcgataagttcaaaacggcctagtcggaaaagacgattttatcctctctctctctctactcttaacggctcatgtgtttcgtattagcaacctgccgccgacttagtgtgctaattcacgtgactgatcggcgcgatttcgccgggaaattgcagaaattaaattccggcgacgttacgaaacttctagatatagacggatcggtgagaacggagagagaattacctgaggagtgctgcgagtataatggattgagccggagaaaaggatcttatgttcgccgtcgatgatcagcgagcgaccgtcgtatgttacgtttgcgacgtctccggcaactataaccgccatgagaacgagaaaaactagcgagtactgaaaagtcgtcatttcttatgtaaacactgacgtttgaagattctagagagtttttatagtttgggactatgcacaactaactgtgcagtgtatctcaccatcgtctcgaatttatgcgacccaatcataaatttcttctttattttttcttaaatccggtttatatatgattcaatggaaattgcaattataaagtaaaagcccaatagcgtcaaaaaaaagtaaaagcccaataatagtgaggcccatcaataatctggagtcaaacaatggtggataatggaaatctctcaaaatccaaatccggttttagccggttataaatgggtttgactggtttcgggtcacaatcgaacggttgacgtcgatcatcattctggtagttgaaaactttgtcgtcgtcgtcgtcgtcgtcgtagcacgtgttgcacgtgagaaatttcccgcacaaaatcttactcttttcgtcttcttccccaatctgggattgaatctccagaatccatggatcgtgctttaactccgcgttttgatactccagctactctctcccctttccgataccgatatgggagctctctggccatcactcgacgattcgcgccggcgattgtttgcgcgaaacgatctccgatcgatggagtgagcgacgagctgaatctgattgcttcacagaacttagatcaagctcccgcacgaagactagcccgttccgcttttgttgacttgcagcttcagctggatcactgcttgttcaaggttgcattgactcatacctttatagcaaaataattaacataatctccgttctaatcatttgtatctggtgacagaaagctccgagtgggatcagaacagaggaggtaagcagtgattttgtttatttggtctcttcgaaggagatacaaagtcgttgaatcttcttctctgaataatgatagtggtatgagagaaattcgaaaggggaagatattttctgcaagagttggttgccgaaatccggcgacgaaatcaaagctgctgtatgtttctgtcatggctatggaagcacttgcactttcttcttcgatggttcgttagatttatctctacttgcatcatttagttgaaaggctcttcttttaatatatgtgggaaaaaaattgggttgttttacaggtatagcaaagcaaatagcaggttttggttatggggtttatgctatagaccatcctggttttggtttatcagatggtttacatggtcacattccaagttttgatgacttagcagacaatgctattgaacagttcaccaaaatgaaaggtatatctaaattgtacctgttattgctttttggtgttgaatcttgcttttgggttttatttaagtggtttgattcctagggagatcggaattgagaaatttgccccggtttttgctgggacagtcaatgggaggagcagttgccttaaaaattcatcttaaagaacctcaagcttgggatggtcttatccttgtcgctccaatgtgtaaggtaagtctctaactatatcattttctatgcatgtaattgaggtctggagatttgtttctcaaatctgcaaataagattttcagtgcttggaagtatctgtattcacattttacatctagttagttcatgtttgaaatacctgaccttgggttgtctcaagatttcagaagatgtaaaacctcctccactagtcttgaagacgttaatcttgatgtcgacactatttcccaaagcaaagctctttccaaagagagacttgagcgacttcttcttcagggacctgagtaaaagaaaattggtactttctcttagtttttcaatggtacattttctgaagcatttttgctaactttgtctttgatgtttttgttctctgtggataaagtgtgagtacgatgtgatatgctacgatgatcaaacacgtctcaaaactgctgttgaacttctaaatgcaacaagagacattgagatgcaagttgacaaggttagttgtagaaccaaagaaataaaggaaagctcttctcatcatagacaggggcaaaaaacgagatctttcttttctatgttgcaggtctcgttgccactgttgatacttcatggagacactgataaagtcacagatcccactgtgagtaaattccttcacaaacatgcagtcagccaagacaagactctaaaactctatccaggtggctaccattgcattctagaaggtgatacagacgaaaatattttcactgtaatcaatgacatcgttgcttggctcgatgcccgcgttgatcccaagtaaagtgagatcatctctccacaaacctatacttattattgtcttctgaatactgtcgagtctctgtgattaaacatccggataagaagaaaaaatagatatgtggcttacaatgaatacacaaccttagccgttgtttgcttagctagtgcttctagtgctacatcagccgcatctttcgaagtgtagttagtattgtttgggtgcacataagtcaggctcagaatcaaattgatgactgatctcatttgaaccatattgctctgacagatccttgaaatcttgtgttctatttgagtgttattttgtcaatggacaggcccggtctaaagcacagacagaggaaaccgtacatatgaaaagttgcatagcaggagctccgaaaaactctgtgaacaccaagtaattacttccgaagataccaaatgtaccatggttttgggtgaaaacaagaccggtatgcattgcacgacaatgcactcagctaacattgcagcgaataggggcgtgtgaacgagtcccttggtgaaccatgtaccgaaccatcacttctaataccatgagcaggtcgcagtgcataatgtcggcgacagtgaccaaataagtagagtttgaggacatgcctgcacaaaaacgtttccccaacttttatgaccaaagcaaaatttatctcgtagtaaaaaagtaaaagcagagcaagaaaaaataaagacataaaagtcatctgaaagcccaataatatcgaggcccatcaataagaaccaaaaaaaataaaaaattgtctagagtttcgtccaagccatcgtcgactttaataattgttcttctcttgctcagatttcttctccgataggaaaactcccgaagcttcactcagtaaaccctaattttccgatgtcggtaagtgttccttgccgaattctttttttcaatttctaacttttgtttgttctgcgcaaagattgatagtatgaattgaacgataaaatcggtggacattg

SEQ ID NO: 1257 - DNA, 82454 bp, Arabidopsis thaliana
aagcttgctaatgtaaacagtcataaatcttgatcccaagttcattactctagcttcacacggaaaaatctgcagagaaagaaataaatgagtttccttaaccaacataaacacaagaagcatcagaatgatgcaagttatcaattcacttacctccttttgcttcagcacaaaccaagtgtaaagcttatcacatgcatctctgacttttcgagcagccagcttcctctcattgcaataagcagcgacatcagagagtatttcagtggagggaacaccatgtttcaaagcagcaaccgataatgcttccttgccctcgatagattcagcagcgtctttattgaaatggatgccggtgaaacagcttctcccttcatcaattgctgtttgcttctgctttgagtataactcctcagcctcaagagcagcagctaacgcacggtgaacgactatgtctgggtaccgtcgaagaggagatgtgaagtgagtatagagaggaacagctagtgcatagtgtccccactcagcaacactgtccttcaaattcccagtgcagaagtaagatgctagttgcataggttttatagcataattgttgagaatatccacaaaaactgagtcatccttgaggtttccagtgattttctccaatgaatcctgaagttggccagaagaagaaatgtccaaatccataccatgcttagaacaaaacccttcaaattctttgagcttgcgagtatttggttctggatgcctccggagcaatgagctagcacggtaagcttgagaaataacctcagctgctgtcatatttgctaagagcataaactcctcaacaagaaaattcgaaccctttctagaacacgtcacaaaatcatatggaactccatgttcatcaaatagaaaaacaggcttcgaattctccagctgcaaagccccatttctaaatcttttttgccttaaagtggtggaaatctcactaagctgtttgacagatcgagttacatcacaccatttgaaagatccatgcaacgcaggccagccattttctgcaacatcacttttgccatctataatgtcttgagcatggtcatatgaaagcttgcagcacgaccgtatgatagtacggccaatccagcgatctatcacatccccttctctatttaaatcccacaagatagaaaaagcaagtctatcagctcctggactaagtgaacctacgttctctgacagtaatggaggcaacattgatatttttctctgcatcaagtaaacactggttgacctaaaccgagcttctgtgtcgagagcagtctctggtaaaacaaagtaggagacatcagcaatgtgaacaccgactctaaaaaaaccgccgggtaaactttgcactgatagagcatcatcgagatctgtagctgtcgaagggtcgatggttaatacacacaggtctctcagatcttttctacgttgaacctcttcttctggtacttcccaaggcacacgtggaagactagtaagcgatcctggagaaaagtcagaatcgcaaaccgagttctgatataatatcgcattgatctgaggctccaattcactgcctcggccaaatagatgtgtaatttgggctacaggaaatggactcccttcgccccagtctacaatttgggcagctaccagctctgcctcgagatttggatccaaattctcaagtcttgctctaatgcttccaggtaagacatggaaggggacaatcaatttaggaaacctagggtctgcaggcatcagctggacatattcatcatccgaaagagacagaggagacttgcacctttttggatcactttccttgtaatgaatccatcccttgacatcaagcaagccaacgatagaatcccttacaagtgacttttcaacaacagcaactacttgtccagttggtcgtttgtgggggaaggaactaaggatgccgcatagcttatcaaccgcactgcaatttcctttctgctcacaaaaagaacccaaacatgaatccagtgatggtggagaactgggagtaacaccgttcttagctccttttcctataactgatgatttgtttttcgagaacccatcttcaaaaccttctaccacatcaataccatttttttgacgagcttttttgtcatctttctctgggggactgttcgttccttcaggcttagcagcgctttcagtaacaaatcctttcatcttgggccacagtgagagcggatccaatttaataacaacagtatcaccttccacctacgtaaagaaacacaagtctgaacttagaaaaccaaacaatgaattaagataaaacacaagccaggaagcttattgtacaaagataaaccaaacttactgctctactttggcaaacatttccattgattagaatgtctgtagggactccatcgatcttacagtaagccttcaaaggaaaaataaaacggattaaaagtgaacagaagaaacctcattggaaaaacagatgttgccactaacctcattgcgattatgagcattcacccgaaatagcgctttaaaagcttcacctttctgatacaatgcataaaagtaaagacagctatgaggtccaaaacatataacttaaaaggaagaaaaaaagaaagataaagataacatctcaaacaaacctctaaagcttcggtcacagcatcaagagaccagtgtgaagagaaaatctttcgttgtgaggaaccttcaatttgctgaaacaattcaccattcattccaggagactgctcacaagccctaggatcagggcaagacttcgataacaattgcttactaacttcaggtgaagaaagtaacggacttgcagatctcctgggataaccactttctgctcgcataggcggcatagaattgaaagcaacattagacgctctcatagcttcaagttcgtcggtattaggtctctgctgcttcgatgaagaagtagaatctttagctttactcctactactatctctaccatctaacgactcctccacatgtgcatcttctatcggtactgttccaacacattaaagttgcaaacttgtaaggtaaaaggcaacacacatttaactaacctagtcggcaaaagtcatactttaaaccctaactatcaacttcaaggtttaaaaaacgaaatcaattcgcaaaagaagaaaagaaaagatttttgaacctgagctttgcttagatcgacgattttgtttctgaggcctgttcctcttcttcttgtgaccgttttcgattctttcaactgattgttccgacgacgcactcttcatggcttataacactataaaactcttaacgagagctccaatggtttttctgagtaagaaaaaaactatctaaagaacaaaaaaaagaagaaagctagaatcttccgatcagataaaaaacagaaacggaagaaactcaaaatcgaagaagaaaaacaaaaaagaaatcgcgagtttcgcgacgatacgaagaagaaaacaagatcttggatcttattatcagaggaataagaagaagaagatgaaaaaattaattaaaaagctaaaattggttggcgaagaaagaaaacgatgttgatgattattggtcggcgctatccgccgactgatgtgtttgccttttcctttttcctttttcaatattgagtcggttgcttcatcgtattacacgtgtaactgaaaccttcatcggacggccattgagctactctttctttttttaagagtttattttcattcacaccctttatatgtttagtcttatcatatttaccccaactatccccaaattacttttagaccccttctcactggggatacgaccaataacataaatatatattggcataaactaaacaaaatcatcaataatacgatgatgacaaaacacactcaacattaggatatacaagtcagtattttgtcacatattaaaactcaccaaatccaattaaagaaaataatagatgttgagctcattgataagaagaggtttaattaaattttagcaccattaaaaagaaagaattagttttcttcacaccatagcttgcaaaaagcagcttttataaacccaacatcatttccatctacaggaacgacatagttgggcttgaacgacatagcaggtcggttgcaatatttgtgacatgctttctcacacacggtcagattattagcctcgggcatgcattgttccggaatacaagtcttgatgcaactctgtagttcttcaggactaattcctaagttaacaaagcctttgctgttgacacaccatgtcatgttcattaccatagccaccattagcattgctattatgatcactcgtccatttgctgccattttctcgtctttaaatattccacctaaatgaatgttcgattcttgtaattcgtattgttcaaattttcaagagattatatgtacaattgtggtatctatttttaagtttttgttttaactactttttgttgtgaaatgtatatttttgtgcatgtgacaaataatgagtacgattctcctttttgttttatcattccaggataaaattgtcaataacttgtagttgtgatttgtaaacagaaaatagttgctggtttgccttcgatttgtaatgtgttgacgtgttgtaataattaagttcctaaattaagctatgcaattttcttttcgaagtttgagtttgtcttgaatcggattgtactgtaatattacgtgcaagattgtcgaataacgttgtatgttccactgcctttttttttttgttaacgtccaaaaaactgtggatatttgaataattaacgagaagatgaccaaaggaagccatgggtgttgttgtattatgtttttaggatttgggttgttacctactacaacaaacatatgtttttaggataggctgaacgaaggcccactaacaatatttggaatttctaaacatatgcgatcattggtttaaatatattgggccaagcccagataaaagaatttaaaacaagttgagaaataataaacatactctctttgcttcttctctggccgtctcagaaattattaatgtgatttcactaaatcaagattctctgataatctcttgcttacattttgaggtcgctcagtgcccttaatgtgattgcttcttctctggccgtctcactaccaggtattgtttgcttttttttttggtgaatataatcatgcatcagtcatttttttttggtgaaacattagtcatttttttgtaagactagacatatattttttagttggtaagacatatatgtacatgtaacttaaattaagccaataattaatgaacacttacatatctttaattttgttaaaacaatgtttcgagctaaagtattcaaatcagttatattaataatttcattgttcgaaattttactatatactatacaaattttaatgataataataatgtgaacgacattaggtcaggatagagattggcaactacaagcagacgcagcatgtggatgatgaacaatatcgacatcgtaatgtcatttcgagacaaatgtgtatcgaaaaagacttacaatggacaagggacatatatttttgtatacatatattcaagcataggcttacaaatcttcatgcacattcatgagaaaccctccaacgcataaaattacaaacctgtcatgcatgtacccatcatttgttatttttcgattttttaataacctacgtttaaaataaatttctagtgttctagttcgaacaaatcaatttttactactctagaaacaggatctgtggtaaatttacatgtttcttttgtttttcttggatgttacgaattttgttgttgaaacatatgaatatttaatcaacaaaaattaaaaaaaaaaaaaatcaaaaatcaaagccgtctgaaatatgtcatgtgaagtgtagctttttctctgaaattaaggagatggaagattaaaaaggtggaagataccgaagatgatttttctttctttttttcaccaagaccccacgcacgtgtgagtcttatccacacgcttttttgtccattttatttctcacattctttgcttacttgcagaaaattgagttcacaaaaggttcttcattttcactttcgcaatagaacacgaaggctgagcacaacgtgagaacgtgttcatcttgattttttgtgtcttgtcgttttcttgcaacttttttatatactgatcgaagcctcttcctctctttttttgaacttattgtaaaatctattttagcatgatctatgctgatttaaagtttgatcttgtcggatttttaatatcatgatttgaataaataatacatgttcgtactaactactaagtatacaactcttatattaatcttatttaattgtatcccaatattggtttggaattttatgttccaaaaaaaagtcataaactatacgtgcttagtgcctttttttgttaagaactaagtacttaattaggcttagctatatgtattttttatttatttatttttttgtaaactaggcttagctatatgtatgtcgatagcaattcacaagcaaaatgtcaataggaccttatctacatacagtatattcatatttatagaaatatatgcatgtaggatacagtatccgccaataaaacagtagtcacgtatttgttttttttataataatgattaaatgtaaagtaaatagtatttacatatttattttttcataacgctttgaatcaaaggaatattagaccatacgtttaattatttttttccaaaattatccccaaattcgtccttttcctacttaacttcttcttttgtaatatctcacagagcacaagcaaattaggttaaatatatattcaaggatagattatgataacgtttttgtattagttcattttggccatattgtttttgtattattttgtctatatctttagtaggtaaagaaaatggcagaatagtgatgacccaacttcccatgagattgattggagcatggaagttagaaagctagtcaaaaagcagtttactagattggcaaatccataaaagcgcttaaaaggtttgttagaatattaacttttgacactctgaatcatgaatttctatttatatatctatcacaacttatgcctattgaattatttagtgtcccgtcgtcggaatcagttttttttggtaataagtctagttgttccggcaataaatgaaatatttttatgagtttaaatgcttttttaaaaactgattttcattttttttggattttgacccccaaaaaggtttcattttcgatagtacctaataataatatgaagttgttagtcaaatgtaaccatctcgcaaactcaacccaaatgtcagttttcgggtagacatggtactatgatagtgagtttgttccaacttaattattacgagctatatcgatatatcgcttatgttgttgttgttgtctaccttgttccttaattacgtcatatgaaaactagttcaaatcatgaactaacaagagcagtgtattaagtactagtttcatttaaatgatcttttagagttttctatgactattgcatctttaagttttttttctaatatatgtttacttctctgattgtttttattcaatgatgatatcgcgatgaattactatttcatctttatttttgttttgtttgtgatacatctatcaaaatttgtaaccaattttggttttatttaaaaatgatctaactaaacgaataatcatatgtgattgatcagttatttgactttaccaagcaccaaccattgaatcaattggtgtaaaaagtctgcctaattatgtactaacaacactgacacagagcctgccattgccttttgcttcttttataaagatacgcctttcatttccctttttgtgatgtgatgctaatttgcccatgatggattcagatcgggatcactcacattcagaagaaaaaaagttaatttagatcaatatttgattgcttcaaagataatctaatgtattctaaaataaaactctcataatcttacccacataaatttattttactatagagtatagatgcacgaggttgtatgattttaaatcatgtatttccatatcatttcatttggactgatcgcagaatttatagtcaattttcatcaaaaactcagtgcacttcaaatgacgatgaaattaaatctcagtaaaagagaataacgagatcattaaacacaaaacacacatgaaactttcttgagctatagaagaacactaaataataatagggttggcctaagatagccatcacaccttaactaaggaacaaaaaaaacccaatttaccaaaaataactcaacataacaaattaaacaaacccgaggtaaaagattattgtcgtcaaacaattacaaagagatgtgatttttaataaatactaaaaaaaaattggatgtagtaacttatatatattagatctcgaaatcaaaacccccttatatgaaactctctttctagaaggtcttgaatggcaaatttgtatatcatggcttgtgaggagggcattggtagcatttggtaaagagaccaaaagtgtcgatctggcgaacaaagttgaccatacttgcccatcctccaaacccgaacccaactacgaatacccaaaccaccacaaatatgtttatgcagtaagtccccatccatcctcctaccactctcggtggcctctccaccgcattctatttacgatatatcaaacttaacaaaaattagatataccaaaatattattttagctatttttacataatctatgatactatataataattttaatataaactaataatatactatttccaattattctttgtaaacttatactaaaattgtaacaagctttttatgaaacaattataattttaaaatagatattttggaagttggaaatctaacctctcttgaaggagcaggagcaaaggtaagcatatgagccaatgcggggatgatgtagacagtgaagctaactaagagagatccgaccgcggaattgattggtccgaaaaaggggaagataatggctaagaaccatatgggtacaaccacgggtaatctagccatggctcttttgaacatgctcttcgtctcatgcacacctatcaatttctcccacacaaaatataacggtgtagacgcgaatccgaacgttataaattgatgaatgagcatgaggatcactgcggtatctctaaaaccagtcttagggagaagagagagcgcattggaatgagttagtagcttatcgccaaacgcccaataaaccgcagacgcggatggtagcgttagcgttagtacatatatggtcgctagtagatatatcgccttgaacttttgcggtttccacatagcgtgcattatctccctattatattttttcaaatttccaatacataattagttaagccattaattaagccattttatttttccaaacaaaaaaaaaatacttacactgtgacggcgtggccaccaaaggtgtagagaatgttggtggctccggtgaagtaaagcaccattgtggttggaccagagtgtttcacatcctcagccttttttatatgaaaaataaatatattaaacaacaataaccaggactatatgtctatatcttataataatcaaaacaagatttgtgttaattataatgacctggccatgaaggagtgaagcaatggtgagataccaagaagtgtaagtggtcatagcgagtccgaggaatgaccaaattctataattgtggaaggaaggaataaaaacagttgttgcacagcacgccccaaatatgtatgtccatgtcctcttgtccaatttgtcattaatataatatatattgctgcaaatcattttttatattaattaattttcaatatgaaaaaaccatataataaagaaaatgaacattgattattaatttacctagcacaagcaatgagctgaataacagatccaaagagaagaaaagtgcagttaaagatcaatccaaggttcctccaatgtttccccaacaatccatctaacacctcaaaccacttttttacacaaacaaaaaaaaacaaaaagttaaaattcaataataccaccaaaaaaataaaaaattataacgagtcacaagaattagaggtggaataaaacctgaataacgtggttacggaaatcgaatttttctcgttctttacgagttcgatattcaacgtaaagaacactaatgagataagcagtccaacttcccattaatccataaaagagttgaaacaaaattcccgacatcatcccaagttgtgagaacgagtatggtaatgtcaacagaacttgtgccacctgccatttttataacaatttagctatagaagacgatacatacacatctatatataagactaaatctgtgggaagtacatacctgatttgaagcacaactaaaccaagcatcgtagacagaaccaccatgccagaagaaattagagagttttgttttagttgaagatttcttgttaccacttatgttttcttcttccctctccatttctaagtaattccctgcgaccactgtctctattttctctgccgccatttttctcttcttctctcagtttctttagcttctttacttccactctttaaatagactagtgaaaagctttttcatttatttatttgttttatgggttttgtttcctttcttttgctctgtgtgcaattattgagtaacgagtgtcgggggacgaagtctttagtcacagctcacgagttgtcatggggatatcggtttatgattggttggtgactgagttatgtcacctacttgtgactgttactgttttcggcgagcgtggcgttgtttttttaatgggcttgatttgattgttgggcttatgggccatatttctggagcattacacgaacgggtaggcccggtttgagattgttaattatatattgaccccgataatatgcaaaaaaagagggttagctaattatagattttaaagtttaaagtagtgagagtagactaattgtaaattgaaaatagaagtgatgacaatgatgttttttttttttgaaagaaaggctaaactattattatcattaacaattatttgaatcatgatgattgtaacaactagaaacaatgaataaaacatattggtcctttcctccttcttgtgatgaggatgataacgatctttatgtagaataatcaattatatttctaagtttttatgttttgtccgattatattacatagctgttacctggaactcgaaattacataaatttatgcctttgtctaccatatggcatcgcacatccaaacgcttgatttagaagtagaaaaacttggttaaaagagaggaagaaatagtgatttgtgaggtaatcgaggattggagatggatccaatggaaagaatgattgctaatcaggtgggattagtggtaaacataattaccacacgtgtctagctgtctaagctttatttaactcactaatttcttagaaatgtctcctttttagccccatacttttacaatggatcgaattattaatgagaaggtatcatcattttagatctttatagctttttaacccggccaaaatggatggcagcggaaagaagactcatcgccaattgacattaaaatatgcattttcaaatgtttttttttttttttttttttttgtgattcaaccttatttaggctattgagatatctccaaaagatataatattgtcgtccctaaatagagcagatattcagatatcattggtaataatactgaaaaaatggcgagtcattgtagttaaataatttgacatcttgaaaccaggaactcgattctactggatggttacagatggttcccataacgacaaagattgtgagatttgttttgattttcatcaatttatcttcgtcagaaaatctgtttaaccaaaaaaaggatcatgactatacaaatttattaatggtgtaatattcaaaaagcagaatataagaatggaccgaacaattgagattgagttcgacataaatgggccatatgattcattaattaggcctaatatatcagtaggtagatgaattgacccatgacatgaaggctaaaataatcaatatcaacaagattatccaaattcaataatagaagatacaaatagacagataaaaagccacatacagtatagatccttggccatttggactttgattaccttaacagcatcccaaagaatacttgcatgaaacatcaggaaacgaataacactaactaactctttcccatattccaaaacaaggaaccttaattatttgaaaacacatatagtactacaaccgattattataattgtaccgatagactctccatgcaagttattctttcttcctcccttaaaaagccagtctcacttcaagatcagaaaataacattacatttgatcctaaaatattttctagtaaagatgccaattcgtttcggtttgtcaccaaggatcttgttactctttctcaccatattatcaggtaaaataattcaaacattatagtattttcgatcgtaattaaacgtctttccttgtctaggtattaattaattagggtttggataacgattagaactcctgtgaattactccacaggaacaaaatggtcagaatcagctcgagtattcacgatcataaactcatgtgaccaaacgatctggccggcgataactccaggagaaaacttcaacggaggaggattcgagctcaaaccgggccaatccatcgtattccacgcaccagtaggctggtcaggcagaatttggggacgaaccggttgtaaattcgactcaaccggaaccggaacatgcgaaaccggttcatgcggatcaactctaaaatgttcagcctccggaaaaccaccagcttcactagctgaattcacattagccgcattggatttctacgacgtgagcctcgtcgacggattcaatctcccgatgtcggtgactccgatgaacggaaaaggaaactgcagcgtcgccggttgcgtagctgatttgaggccacattgtccgcaggagctcgcagtgaaatcaaacgggaaagtcatatcgtgtaggagtgcttgtgatgtgtttgatagagatgagtattgttgtagaggagtttatgggaacccagttgtgtgtcaaccaacttattactcaaagatctttaaacaagcttgtcctactgcttatagttatgcttatgatgatccgaccagtattatgacttgcactgcctctgattacgtcatttctttctgttcctccaggtttgtcctttttacgtttttaacaacatctcatgattactttaattatgattctaatcaagtttcattcatactagaccatgacttttacatttacatgatatactttattcatcctttgttaatttcatatgcaaaagtaaaagtaattcaaatgcagaaataaagttatattttttggtctttgtttttgaattgtgtgtaggaagaagccggtgtgcacgtaccatgacaacaagttagtatgcagcgatggttctggtgggtttaagaagatgattgggagattattgtggcttgtgttgatgttgtctcttgttgtgtttagctaatttcatgactatttattagataaataagtttgtttgttttttattgtcgaggaaaatttctcattgactgtaaatatttttctaagttttcatgtgtaaataattttaaatttcagagcaaatgtaaggttgatttgagagtaaaaagaaagatgaagatacattttaagaaaaagatcatttccgtggctgaattgtaagaaagcgtaatatattaaaaatgggcctaaaatgggcctgaagtgaaatttaactttacgttggtattatctctggtttcacattctcttaaccctcttggtgaatgcgtcattgaaacgccattatccgccgtgctaatctgaatctcctcccccgtcggaaaaaatggccactggtggaaaagtctccttcaaagtcactctgacttcggatcctaagcttcctttcaaagtgtatgcgaatcctgactcttgttttttcgatttacgcctgtgattggtctctaagttgttttttttctccgatcagtttcagcgtaccagaaggagctccgttcacggcggttctgaaattcgcagcagaagagttcaaggttcctccacaaaccagcgccatcatcactaatggtattaaacccttgttgacattcatttttagatcctgggcttaaaccgcatcatctagcattattgatttagggtttgtgagtttgtacgataaatgggacatatgcaggacaattgtgttcctttcaaatttgattcatttcatcttcatatgtttgtgcattcacgagaatgttatcttagacatgaatcatgtaaatcttttccttgagctctttatgtatctacaaagtttacaagtttaaagctttctggtgctggaaaatcttaaagggatttgtttcgaatagaattatagttctcataactaatctatgatattttgggtgtgtttagtcatctattgattattagtttcggctgatgtaatccatattcatcaattctcaagatttctgatgtgatgatgtatctgtattcatgtgtgcagatgggatcgggatcaatcctcaacagagtgcaggtaactatcacaatgctaaacacttggttattgcgttttactcaattctctatcttttatgccattgcaattctcagttttgtttctctcttgcatgctttgattgccaatgtactaatagagtcttagaagatcactagtactgtccttaatggttgcgtgcttttcttttttggtgttccttagcctctaagtgacttcagtgcagtgtccataggaaagcaacctttagattatttacacacagtcgggttccgctgtaatatctcagctgtcttttttatggtgtggtcattagcaacatacaagtagaaatcaagctccttgttaatgaatgtggtgttgtgaatgatgtcaggaaacgtttttctgaagcacggatctgaactaagattgatcccgcgtgatagagttggagctgtgtttgtgatggatccatagatgatgtgtaagcaatgattaaaaactcagttccaaaaaaaacataataatatactgaaatgcttatgtacaacttcgttgaataaatatgtaatcgtcacaattgaagtgagttgaatttggtcaagttatatgtctgttataattcatatttagataacgtatgtgcactaaaaaagagtatggatctctctgtatatgctaactcttgtcaatataaatatttatcttgtaatatagtttttttattaaaatatatttttaacttttattttattttaaagttaaaactgtaaggttttttatattttttaaataatattttggataaactatttttttgaagtgttttaagttttatattttgtgtagactttggatacaacatccaaaactaagcggtgttttagatttaatatgctttacatataaagtttttaaaattcgaaccaaaaacttgaatattaaatttacataataataggaaaaacaaattgaatgtttgggaatcgctaacgactgactaaatgatggattcaaatccggttagatttcataccattatgtaaatttagtatacacagaaacaaaaaaaatttaaaaaacatacacaacgaaaaaagcttttaaaaattcgaaacgaaacataatcaaagttttaaaaactatttttaaaaatccgaattaaaaacttgaacattaaatctacataataataggaaaaacaagttgaatatttggaatcgctaacgactaatgccggatccaaaaaccgattagatttcatatcattatgtaaaattgacattcaaataaataaaaattgaaattaataatatatataaaaatttagtatatgattagggtttaagttttagggtttatatatattaaaagctattaaaaaattatgaagggatagaaattgacctgtttcttaatgggtaggtgaatgggctttttgttgggctgaatatgagaatccaatccaatctcctccaccatcgtgtctgtcaccatacctcctaaaccagagcattgaagattcgacgtcttttgatgtcaaacaaaacctcctacgacgaggaagagtgagagaagatatcaagagacgaagggagaataagaattagaagcatatcttcttccaccacgccacgaagtttgaagatgaaatagaagcacgaatcgagaaagaaaattttaaaatcatcgtttgacgtttttggttggatacttaagaattttaagaagtcatatttactaaaagtcaaacgccgaatgtaggaagtaaaatatacgatgtataaatcatacgatagtggttaaaatatacgatatacgataatgattgttattaacccagagaaaaatgcgctcctctacggaacctaaacgctttaaaactccacgattgcaaaggataggatgatagtgatgagtatttaacaacctaattttataatcgatttttaaaaattttaaaattccgtaattttgtaaaacgcagacacaattatgagtatgtcacaaaacaaagctgaaacagtgaaacgaaaacagagagctttgattttctttataaaaaaattcacctaaatgaaatctacttgctgccagaaacagtatttacataagaaaacgaaacagtcatgaacaaataaaattaaaattttatacacacagtctcggctataaaacagaacaggggcaaaacagagagatcatttgtggaaacaaagcgtagcttatctagacaaaagcatcaatacgtgaaagtagctaatctagatacggagcgtgtgtcaagtattaacaatattctatatagcaagcaagataagtaactaaactctaaaatgtacgaattcgtctattcgaaagaaactaatataattaggaagagatcaatcactaacgaaaacatgaagattataacggaacaaaaagagatgggaacggatcttacggagttcggttttaaaatcagagttggatcgtcgtgtttctgaaacagtatcttcagtcctccggggaaaataactgcaaaagagacaaaagcgattcatcactagctcgaactaagaaaccttaaagatcaagagaaaggatctgctatttcagtggagtttacctgaatgattgttcgagcagagcatgatcctgactgactcatgagtaggagtgaaggaagaaagagagaaacttgaccgagagatggtgacgacggtgatgtctctctctcattatcttttctatgagcagaagaatagttgaaatttgtaaagagaaggaagaaatgtgttgttggtaatgagattgatagcgtttaagggagtatttataggaatcttcaccaacggctatcttcttacgaaaagcttcaccaacggctataataagttacaacgttcgactgtcttctcattgatttgacaaaattagccgttgcattagtattactgatttgtaattttgtaaaccaagccaagaaaagagcagtactatgtgatgggccaattagcccaaaaacgcacatagcgaaggcccaatggaccttaaatctggtatcggattgaattctaagaaagaaggagaagcggcaataaggagttcgaatctcaaacaaatttctgggttttttctttcctccaaaatttttaaacaatttctgtgtctgtggatttctacttggacggcgatggcgagaattggggctaaacccagaaattgaggatttgaattctgctgctgcggcgtctctgtggtggtttggtttctcgtttctgaaaatctacggtgtagtaagtcggagatgcagttgagatttagcaatggacagggaggataaccttccggttcaaccggataaacctccgaagagtctggttcgtcccattttaaacctggaaacaacttcgtcttcttcatcctcttcctcctcctcaccggaacttctacggcatttgcaagccgctttcaaacgccatcgcccactcagtcagtactctctctttctgggtcgaaatctcttatttctggaagtttaatttcactaatttaggtttctttggggtttatctcttttgacgatttagggctttttttgggaaagttaagttcttcttagaatggtttacaatcgctaggtttctctgatggtttgtggtgtgggtgatatgataagctagttaaaccttttgattatggaggcgaactcaccattttagagaatgtccactgtttcttattttagttgtttttttggtatattgaactctttgcaatggatgatctctcatagagttcttttttttgttttcaggtaaaatgcagacgaccagtatcgggcctcgacgaagtgttgctccacaaagacaagcttcaagaaatacacgattggttacagctgaagggcagagatctcaggatgttgttacgctgagtcagagtcttgctgccaatactttgacacaggatactactaacaacttagccatcacttctgttgctggagaatctgcgtccattacgcaacctacagtttcagagcatttcaatccatcagatagacagatggattttggaaaatctgctgttactagtctagaaagcaatctggatgtccagagaaagtcccaatctctcattggcacatctcaaggtaatatactcaaattactttgctttgagtttgaccactgtcatatattttctccgtggctcaattttagtgtacacaggcatagttacggttggtttgttgagctaataatcttacttgaactcacttgtccttgcagatatggaatgggatgcaacaaatcaggctgaagcatcacatcttgatgcttgtattggatcaaaacatcagaatctcccatctgttgattctgaggtcagtttaaaatctgaatacaaggattcatcttcactggcaaagatccagggtcagctgggagaatttcccaacttcttgaaccaaccaagaactcggtgttcggctgtggggtcatcatgggccacaactacgctaatccattcatcttcagctcctatgttaaatgctactacccatgtctctcgttcttatgttgaagctgattcgaatgcaaatcctcatgctgttcaaagtcaagggaacttgccttcttgttgtccgtcttccaaggtcagcaacatactacatcccaataaggatgccactgcgtctgagatgccagcttcaactaatgatccagaagtaagagtcaaagagacagatacgtccaagcagcaacagatcaccacaggacttgaagctccagtgggatcttccatttatgggagcgacggacaagcgaatgctcgtctgcccgaggagttgcataccagtgttagctcacagccacaaaaatcagataagcatgaaaaggttgcaagtagcaaagggccatcagcgcctcgtaaaagaaattatgatccagacttgttctttaaagtcaatgggaagctgtatcagaggcttggcaagataggaagtggaggaagcagtgaagtccacaaggttatttcttcagattgtaccatatatgcgctaaaaaagatcaagctcaagggtcgtgactatgctacagcatatggattttgccaggaaattggatatctaaaaaaactgaaagggaaaaccaacatcattcagcttatagactatgaggtacttccttaaagtttgtttttctgatccatgggacagttatgttctttcttagtttctgaagtgcatggttgactattttcatctcaaccagaacactaattttctgttgtaattaggtcacggataagactttactccaggaggttttgaatggcacaatgagtaacaaagatggaagagttaaggaagatggatttatatatatggtactagaatatggagaaatcgatctggctcacatgttatcccaaaaatggagggaaatcgaaggatctgaccggacaattgatgaaaattggcttcggttctactggcaggttcttacacaatactaaactatatcttttcttttgcataggagttctttctgcttctatttttctgtgctcaaaaatcactgattctcatataaattgaaaaacaattgcagcaaatacttcaagctgtgaacaccatacatgaggagcgtattgtgcactctgatttgaaacctgcaaatttccttcttgttcgaggctttctaaaacttattgattttggtatcgctaaggccatcaatagcgacactacaaatattcaacgagattcacaggtaataataccctaccatgtttctgtttttgtcatcatcctcttaattaaaaaagagttgttttgtatttagtttacaagctgctgatattaatgggggtaagtatgtatcgtgacaggtggggactttgagttacatgtcaccagaagcattcatgtgtaacgaaagcgacgagaatgggaacactataaaatgtggaagaccatcagatatttggtcacttggttgcatactataccaaatggtatatggaagaacaccttttgcagattataagaccttctgggcaaagttcaaagtcataactgatccaaaccacgagattacttacaatcaactctcaaacccatggcttatcgacctaatgaagaaatgtctagcttgggaccgtaaccaaagatggagaatccctgagcttctccaacatcctttccttgcgccacccatcccacacgagcctcaagtgaaaaccattaaattgttcagtctcatagctgaatcttgtggtagtgatgacgataaagcaaattccatgatttctcagcttgagcaactgctttcaaatcctgctcctcttccaagaaatgatgtgttagattcaagagatcaaaatcagcaacttctctctcgagtttcagaactttgtattcaactccaggatcggttacaaggtcttgaaggagaaaattagtaagcagtgctgatatgattctacggcttttggatcttgtaaattggtatgttaattgttagatttggaaaaacgacgtttgcttataatgtcttgtttgatttcttgtattggaatgtatcattttgggtgctcgtcttaaatagttcctccattctgtaaaattagtaaattactctcttcagcaataatataaatcacgataaacgatgtcgtttcttcgatgctccactgataaaaacgcaatcgtttaatcaatgtgctttgaaacgacgtcgttgccaagttcacatatcaattcaaagtcacaatttcacaccaaacaaatttttaagcctacaaagccaattcattctcaccatgagccaattttcttccattttctaatcgtgttttttttttctaaaaacagagcacctcaagcagtcttgcgtctcacgtaaccctcgcactttacaaatattgatttctccttaattctctccaatctctctgtatcttttttctcacccttctttcaactaccgtcaaattcgtaaccctaatttcttcgaacgttttcaaacaatgtcttctccactcgccgcaaaatcaaacctaaccacgactcgatcggcttcgttaaacattccacattcgacacgtaccaatcacaaccacgatctccggtatagtctttccgctggtcctcgtacgaacgaagatcgaccagcttctgggaacggcgtcgccggaatcctctataaatgggtaaactacggccaaggatggaaacgacggtggttcgtactccaggacggtgttttgtcgtattatagaatccatggtcccgataaaatatctctctccgttgagatggatcggagatctaaactgatcggcggcgaatctttacggtttatttgccgacatagcaaacgcggtgatgttcatagccccgggaaacctctcggccaaattcacctcaaggttttgatttatttcagaacgcccctgtattttacatacgtttcaaatacaacgcatacattttaaaaatattagtacaaccttaatttgggtaaattaatctaaaagtataccctctgtagtttacaatgttttcaaatgtaccccaaaacacttaaaatgatctaaaacgcacaattgcatatatgatttgagacttcatccatatttataagtgctccatttgtttccaagattattcaaatgtactccaaccttttcgatttacaaaatacatacccaaattacatatgtaattttcggattttttgatgtttttcaggtttcatcgattggacaaagcatatcagatggcaagagattcactgtattcacgggcacgaagagtctgcatttacgagcagcaacgagcgaggatcgtgcctcttggatcgaagcattgaaagctgttaaagaaacgtttccaagaatgtcaaacgaagaactaatggcatcgacgactaatgtctcagtctcgaccgataagctaaggcagagattaatggaagaagaggtagatgagacaatcatcaaagattgcgaagacataatgaagaacaatttcttagcattgcatgatgaggttatgtctctaaaacggtaccaatatcatcttatagattctctcaagaacgtcagtaactcacctataagacccagtaaccaaagtttttcatgaaataattacatttgatttaatatcagtttaaattaaagtatactatgcaataataatgaaatatccacgatttgatatgggcatatggctcttctatactattgttttggtgtgagtggagtatttagaatcccatgtgttttatgggccatttagtgaaagcctatgtgtaatttatttgaaagatatcggcccatttagattttcaaatgcagtgacatgaccttgtatgagtattttgcaattttttatctttggtttagtataaatatataatgattgaagtcaatgttatgctaattcagtttgtggacattcaaagtaatcttacgaagtttctaaaacgttttcaatagataataatataagcaataatataacgtagtggttaactatataggcaccgccaacaaataatctaatgcatgaaaacgctacgtaatgaacatgaagtcactatgaatacaaaatatattaaaatcctcgaatcatctagtgtacttcagtacttaacacacaattggtatttaataaaaacgataaacaaaaatgataagctttaagccaaagataaataataataatataagctaaaataaaaaccaattgtgttcatttctgccaacgatgaagacgcatgactgctcaatctgataataaagcattccttttcagttttagattcttgatttcgatataaaaataaacattttttgtatatcgaaaaatttaatgaagcagaaaagtacgaaagaaaagactaaaactaagagcatgggctttccctttcaagcttacacgacaaagagacgtattcgtagttttgaaacccattaatacgtaagtctaataaattgtataatcatttcttggttttagaaatacatacgtattggaaacttcaacttgatctctccattttataataactcggataaatacggctaacgttataatactattcgttattaaattcagaatttaacgacctagaacaaaatagtcaaatagatacaacaagaaaacatacaattactttataattttaaactactcctcgcacgtaattaaccacaagattttgccgcggtacgctgacatcgaatcaaaagaaatatcccgcacgttggagctagtataacctatagatcataatctaatttgttttttttctttaagtaattaatggtaagaaggatgagtttggtaaaacctggagtgataagacgttggtgtaaggcttattgaggaatgggcttttgattcttcaccagaacaaaggaaatattgttacatcaatatctgagcttctttctcctctatgaccatgctttagttagctagatgcatacgtcaccaaacccctcataaatatttgtacttcactattcatattgtggtgttgtgaccaaaagttaatagtttcatctggattttcagtggacaataaccaaaagtacacaaaaatatttccagttttaaccatagtcgtacacttttgtttatattttttatcccgagacaagtttgaatatatttggttttaaatatttgttttaattcgttccaatttttagggtgatacattttttaaaaaaaaaattttaaatttttttggacagaatttttagggtgatacataagaatgcttcttttcacagacttgttaaaacttaaaatgaagtgattagtttttatatttaaagttgtatacaactactattaaacttcgttgaacttgataacgtatgaagactagcttatctctgtttttgtaatctcaaaacataattctatcatcaaatcataatcttttgaaaaatatttgttcttttgtatgatttggatttgggaagataggacttatgagtcttctgctttgatgcgtacgtaataggtcggcggacggtacctgacttatcggtcatccatcttctttgtcttatcttttctaattgctttcacataattttatcattaatattcggttaacaacaaagaattatcatttaaagattgtcatgtcaaatttttagtgtaacaatataacattatcttctgattgtaacataacaatataacatatcattctagaatgtcttatgattcatatttttacttgtaaatcaggatatttgtaagttgtcttaaaacccatgtttttctgtcggagaaatataaacagtcagtaaatttcagcaaaatttaacaagttcaaattatgtttttgaccgtcgcacgtgtgcaacaaggccattgcacgtgactagtcagagaaaacataatcttcgttaggatcttgacgccaggccgccccgaaacaggtggttcgctttagattttgatgacgtggtttcaatcttgaccgctcaagttttcaccacgtggcaccgtctatgtcgttggattcttcgtagacgacggtattaggtgggccgtgacagcccaatgttcaaaagtgggtccacatatgtgccagatcagcttgatcattccaactgtagaaagatgtttataaaaatataatgacgcgtaattagatttaattatccgtaattaaagagtcatttgcctctcttgtcatatatgtctttaatttcttgttcccaaatcatggcgaatcaaaatctacgcgataaattatttttaaatgacaacgtcgcttggtcatgcgatgatattgatataatataagtatatagtttcctgaattattaagatgtgtattattatttactcgaattaaaaaacacaatcatttgaatctaataaccaataacaggctattgatatattaaattaaatagatctatctgacaaagtgatatcccaatcttatttgattatttggtgagagagaccaatgcattgtatatagtataaggattaggctctaataaggatcttcaacgatctctttgttatgcttttttacgttgaataaccttcgtactttataaaacatgaattcaatagtaaaaaatttgaccacagtaagcaaaaaaagataaaacggatacaagactacagtaatcctagaagaagcctcattttcaaaacactgttttttttgtataatcattacctcgtgctcttcaatttaatgacagcttcttatatgattagatcgaggcaaaataatgtatactctacaaaagaagtcaataactttccattagattaattgggattcaaccatacgactgtacgtgttatgtatgttacacttctatattcgtatagtatattaatcacatattcacacgatatcaaaatgaataactagcgagttaatctaagatagattcaacgaattaaattgaatatcaactgtagaagaactgaaactttgaataccgaccgacgaacgtgacataataaaagccacacagtagaacaatttcttaaaaaaatatcatcatgtggttacaaaacattatcacctggttcattacttaatttcattcgcgatgacgattatagttgatggtcgatcacagttaatatacagatacaattaatttggattagtactagtatagtttttttttaaagaaggagataaacataactaatcatttggtcttttacgtgggtatcacattaaatccatacaacgtagtgcacgccggtacaccttttctaaaatattataaatatatttaagaattactatagtctatataggctcaatcaaatgtgtcgatcgcttgagtccttttgttttttaacgttactaaatagtactagtagtaaattcactcttacaaaaccgttaggtgaatttacctttattctaacaataactatagtttaaacaaatttcaatgatgaaaagcggtcgacgaagtttctaactgcaatttgcttctgaaaaaatcagagtaaccaaaacagaattcgttaatttttacacgcacgcttaaatgcgtgtcgacgagtaaacgagcacgtatacatcaaacttgccggattttttttgttttgtgatgagttcacatgtaaacgatagtgacctttttgttataccgaaatagatcatagaccaattctcaaaccaatctctaaaatggttaatggtagccaatatgtcacattcctagatttcatatgttcaacttttaaacgctgttaacatataacgtattcatattttcaagttatcaacaacgcaatatacatgtttgattatttatatgtggctaatcgtgttacttctttttttttgttctaaattcaaatatgaagatttttagtggaaagaagatattggcccttgacaagttgtttatgatctattaaagttttgtttttccttttaattgaatttcctctatgtttatcacaaaataaagaaaatgaggagtaaaaacaaattcagcagaaaatagtgaaacaaatgattcatttccatatataaccacaaggaaaaagaaaatttccctattctaatagttttgttcctcctaattactctgattacatatatttaaactaaaactgaaaagtacacatatagtaatccggtcaggtgattactgtctttttttcaagattttggaagttttacccattttaaagaaaattttgaatgctgttctattatagtattaacatctgtttagtgaagtcaaaacattggtcataacaatgtgattaaagttaacatctgtttagtattaacatttttagggctggtgggctttttgtgtccacttcccgatggttactgcaactttaattgaattttactattttaccctacccaatattaaagctttttatttatttctctgcttctctcttttgctctgtctctttatcctttttcttttgatgcttcattctctcttttcttttttttcctctgtagcgtttctaggaatctctctccaacgtttaggtttcttctcagatttagaaagtttcttctctatctgaagaattttcatttcgatttcgcttcttccttcaccctaatccgtaatcgaatgccatttcgaagattgtgttgaagagtagagaggaagaagaagactaagaagctagggtttctctgatgagtagatgatgcgtgaaccgcttgttagcgaagaagaagaagaagaagctactgaagttttactagtggagaagacgaagttgtgtaagagacgaggagacgaagaaaaaacggaagagagaagagacgatttgttgttactagctttaacgccgatggtacgatcgaaatctcaaggaactactcggcgcgtcactcccacgccacctcctgttgacgtggagaaaccgttaccaaacggagatctctacatgggaacgttttccggcgggtttcccaacggatccggtaagtatttgtggaaggatgggtgtatgtacgaaggcgagtggaaacgtggtaaagcgagtggtaaaggcaagttttcgtggccgagtggtgcgacttatgaaggagagttcaaatctgggagaatggaaggatctgggacttttgttggtgttgatggtgatacttatcgtggctcttgggttgctgatcggaaacaaggtcatggtcagaagagatatgccaacggagattactatgaaggtacatggcggcggaatcttcaggatgggagagggagatatgtttggatgaatgggaatcagtatacaggagagtggagaaatggtgtgatatgtggtaaaggtgtgcttgcttggcctaatgggaatagatatgaaggtcaatgggaaaatggtgttcctaaaggaagtggtgtgtttacttgggctgatggaagttcgtggattggttcttggaatgagagtagtaatctcatgaggaatttctttgatgggattgagaagaatgagttgattgttgcgactaggaagagatcttcggttgatagtggcgctggaagtttgactggggagaagattttccctaggatatgtatttgggagtctgatggagaagctggggatattacttgtgatattgttgataatgtggaagcttctgtgatatacagagataggatttctattgataaagatgggtttcgtcagtttaggaagaatccttgttgtttcagcggtgaggctaagaaacctggagagacgatatctaaagggcataagaaatatgatttgatgctcaacctgcagcatggaattaggtaacttcttagaagcttgaggatcccaatgtttggagagtttctggatctgtgtttttctaaccaagttgtgaatttttaggtactctgtcggcaaacacgcttccgttgttcgagatctcaaacagagtgattttgacccaagtgaaaagttctggacaaggttcccaccggagggttctaagaccacaccaccgcatctatctgtggatttccgctggaaggactattgccctttggtgtttaggtattcaatcttttcatttatatgctgtttatttgattctgcatagtttggtgatgtctgcacactatctgggtttgggattaatatgtctcctttggtttattcttttgttagacggcttagggagctattcacggtggatcctgccgattacatgctagctatctgtggaaacgatgcccttagggaattgtcttcgcctggaaagagtggaagctttttttacttaactcaagatgacagatttatgatcaagacggtgaagaaatctgaagtcaaggttagtcgttggcttttgtcttgacttcttctgtcctatttgatttcctttgtattattgtttcttagctttcactttacattcttaatcattttgtccactaagtgtggttacctaaataattttgacctgaagttttttgttttctttatccaggtgcttctacgaatgcttccaagttactacaaacacgtctgccagtatgaaaatacacttgtgactaggttctatggtgtgcattgtatcaaacctgttggtggccagaaggtttgtgttgttcatctacatttcataagactctttgtttccaatggacaatttttctcatattgtttgccatcttaccagactcggtttatcgttatggggaacttgttctgctccgaatatagaatccagagaaggtttgaccttaaagggtcttcccatggacggtatacctccaaacctgaaggggaaattgatgagaccactactcttaaggaccttgatctcaattttgctttccgtcttcagagaaattggtaccaagagcttatgacgtaagctgccaaattccatctagtcttattctttatttaatttggctgtttgagtgcaaacactttgctcagctgactggatttcatttaccaggcaaattaaacgcgactgtgagttcttggaagctgaaagaataatggattatagtcttttggttggcgttcacttccgtgatgacaacacaggagacaaaatggggttatctccatttgtattgagatctggtcagttaaacttctcgttcttcctcaagtattattctgtgtaactcgcccatttggatgatattcattcatgtattgtgcaggtaagatagagtcataccaaagcgaaaaatttatgcgtggttgtcggttcttggaggcggaacttcaagacatggaccgcattttagctggcaggtacgtgaatatttattctcaccaatcattacctcaggtttaatctctagcacaagaagttgacctaacaactcatagtcattggtaattgctgtgacagagagtggttcaatcgtgtaggtgtgatttcatatgagaactaccttacatctctaagcattattgtattaaaaagttgcttggcaatcttgtgggggctctcaattgaatagaaaaacacaatgatattgtgggggcaagacagatcatgtggtccttttttgttgttaattaaactagttattagagatcaatcaactctttatccatagttaaaactctcaacgttttgctgaaaatttgattgcttttgcaggaaaccattgattcgattaggcgcaaacatgcctgcaagagcagaacgaatggcgagaagaagcgactatgatcagtattcctcaggagggaccaactaccaatctcatggagaggtctacgaagtggttctatattttggaatcattgacattttacaagattacgacataagcaagaagatcgagcatgcttacaagtctctacaagctgacccggcttcaatctctgccgttgatcccaaactatactcaagaaggtttagagatttcatcagcagaatcttcatcgaagacggctaaaatgaaggtctacttatattagccccatcattgaaaggtcaaacctaagctcctcgctttatacctcagataaaaaagaggcttgaagaccctgcggcattaggggcaaaagggtaattgaagaagggcggaaattgatttgggattttttcaattataatatttgagaatgaactgatcaaacaaattttgggtgggggattacttatttttgttttggagggtgagaggaagatatatgtcatatgtgaatatagatttgtgaaggagaagaaaagtacataggcttagagaaaaaaaaaatgggtttggcagatttggaaatgcattgggaataagataagtgtacaagattaatgaataggatgggtgttttattttattcccatttgctatataatttcccaatgtctttttatttgtttagagttcattttgtgatggatgaagtattttttaaaattgagacaaaagaaaaagctaaagattttatcaaaagaggtcccatattcccatgggatccctcttcttcttcaccatccttttcacgtctaaagatactttgccaaattttattcaaactctatttttagtcacatgtttgtgtttaacatatttggtatgtagtagtataaaatttctcaaattgtatatggaaaataatcaggtatttctgatgatagttgttcatatgtggaaaataaatcgaccactgatatgcctatacataaatatataggaagaaaaaagaatagtagtatgttagatatattaaggatttgacatgatgttactatgatttatttacaaaaaaaaaaagtacataaacatatactatggtcaaaaaagtagagagagagaggttggaattgaggttgtgtttcccatgaaaaggagagaaagcaaagagagaagaccacatgtattcttttataaacatctcacattacccttactttttcatatttaattaatcttaattttatataattttagagtatgggttttgttgatgagcaagtaaaatattgatgtgtatgttgacttatttatatcttctaatcagtaagtctttaccacaacatgtatctttcaacaaggactaagttgggtcgtctggtctttttgtagtttgatctttctttctttttgtcgattgaatttataacacgcatttatataacattcaaagctattttctccttgaaggcttgtctttatagacaagtacacgttaatactattagtctattactaatactccttaccaattactacatgcttagttttctatgaacaatgtctgccaaaaactcctagtccgaataggtaatttgtttgtcacattggggacatcatccaaaatttaaactcaattctttgtatgtatacggatttaaaatagtataacccactaaaagtaactcgataacagtacagataaaaacacaatctacttcggtgggagttgagattgtagtaaaagaggatgaaatccgacaaccaatggagggagtgtaaacaaagtcaaatttccaatatataaaaaaaaaaaaaccattatgtgcccatttcttcagatcctagagtccaaattcccaagaggaacattctattttaaaatatcatctgaaaaaccgagtaattatgaattgttacatttcttgactaatgattaatctagtatatgaagcactgaatgtttcttgtggaatttgtttttactccatctgctttgttatttttcacataaatagacgaggctttttgagttttttctgctacattattatctaatgaagccccttcccacaggcaggtgacaagtcacaaaattcataaatctctctttcaaagcaaagtatcatttattttattattccaaaaagctagtaaacccaagtgttcattataaagtacaaatcttcaaattcccgattaacaaagccaaaaaaatattactgatcttcactacagttttctcgaaacagagagacaaaaaaagaaaaacatatcataagtgaatacctcacttactgtctgcatgaatgaattaattataaatgtaaataaaatgagagaagaaatgggttatctaaacgagaaaataggaaaaaggcagagctttgaacagtagctaggtctgccaaacacttgcatgcctaaaaagtcctttaattaaatgtcacaaatatcaactaaattttcttactcgtactcgtaggttattatcaaatattgttttctttttccagaatttgttttcctcatgttacaatttttaaaaataataatacatctgatttactgatttgggaaataagcttgcgaagatacggtaagatctgattttatgagtggtctgtcgatctgtcttgttttcttttgtcatattatctcttcctaaaaatattatattttttatatttcttacatctttatttttgtgaacaatttttcttaatttttttgttgttttttgtatctaaaaactgaatttagaaatatgattcccattggctaaaaaaaataaatatgacacacattagctggttactgtttcaacggataactgtaactagattctgaaatatcccgttctttgctttatttttcttaaaatctgctccttgaaatttgacgataaacggtatgtggaccactaagatgtatgttagaaacaattagttctcattctagttaacctaataagatgtgtaacctcttttttttttttcgtcataagatgtgtaacctaagacaacaaaaatgaatgcatctattggaaaattagtcttttcatacgtgtaatgcacatgaaaaaaaaaatcattcacggattctgtaataattacattcatgtgtgtgtgtgttaagtacatatacacgtcgatatgcgccagacatgtaatcaggtagaaaaacgttttgtgtcttccaactaaatattttatcacggtaatacaaacaaaacccgaatccagataaatcttcttcaccacgcttttgctacttttgttatcccgttcccaactatttatattttaaaaggagtattagtttaattagttgatcttagtctaattcatttatttcattggcttatgaacagagtagtcgaagttcaagtaccagccaagttgttaacgaaggtagaccaatgaatttaactataaagcacactcaatgaaaataagctaattgtttaaagcttatggtaattgtttataacaattaattttgacattaatcatataaaattttgtatacagataaaataaaggtctctttacacgtactcgacaacatatttgaattatgaaatttggaatgaggaatgaggaacgaggaaacttttggagtctattatcggaaaacggatcaacgtgaaagtcaagcctacttactgacctattaacatacataaaaaacaccaattcttaatttattagccacctttcttgttgaataatttgagctataaattataggctttattctcacttattagtatctccaaaaggcaatatataacattttttttctctttcaaatatcttaaactataacaaaaattaatcctaactaaatatttattgctatataaattctacaacggcaaagcatgagatctcaaatttgacacatttgaggcaaaaataaaatatagacaacaaatatgggaatttaagtggtctcaattttgggactaagttggtctgaaattgaaaagccataaagtgtggccattggtatttttaaataggcacattacttcacattccaacataaggttccactacaaggggacaccttctcttaatcatccctttcttatcattcttgtatacttctggtattttttatcaaaaaaaaacccagctaagtttcatttaccatacattagacaaacaaatatgattaatactagtaaggattagattacatatttaagacattgttactcgaaatttatactagtaaggattagattcttattttaatattagtatattttcaattttcacataattagagaaaaaaaacccattaatgaaatcagcagctagacagaaaattagacacatcaacctaacgctaatgatggtgtcttctcctactgaagaaaacatcgtgatacatgttggcgcgtatcgttctttgtctccaaccaccaaaaatagaaacttaatgttgttttgtgtgtgtgttttcttttctaattaggatagctgcatttaactaaatggacggaccggaccatgttcagaccgatcttgttattaagtggaacaaaatattggattgtaaataggccggtttagtcatttgtatttagtcggtttagttggttagtgtttataccatagctgtatataaacaaagcaatgtgtacattgtaagagaagaaatgaataagatcttctctctctttaacaaactttccctttcatcatttcttcttcgtgatacaaaacgaactttggaaaaccgctaaatggaccaacaaaaaaaacgaaacttaatgttgttttatctgtattctctctatttaggattccagcaaacctgtcaatatggacggaccaaacttattactaagtaaaacaaatcaatatcttcataagaccatatgcaaattgaccaccaaaagcaacaagatcaacacaaaacttgccggactagacaactgtttggatgtaacgatgtaatgaaaatcgacatcaacatatatacgtactccatgtaactcttatcaactttgcaagttccacgtataataccaaatttgatcgtgaccgttttcatgtgctttgcttttggaaaatttgttttgtaacttttaagtatatatcttgcaccaatatttaaattattctacaaaatttgttacgagtgtttgtcgcttacaacttctaatatcaaaatataatatataagattcgatctctaacatcgatcaatatgacgattgacgaattttcatgcctataacgacagccattttggttattaatttattatataaaatatgtatgcaaaaataatacacacggttgatttattttttgaaggaagataatcttgagtggatatataaggatgatatttatttgaagagattgaacatatttgggtttgaggcaacttcttaattggcggtggtttggtggggtatcttccatgttaccccaaaatgctttgatatttcacgcttcttttattttatttgtctacacaaaagctcgtcatcatgggactctatatacttttcatatttacaatagacagaataaagaaaaatatgagacttctttttattttgtttctgtttctctctttttgttccattctgtggtagttatccaagtttggctttttctgtttcttaaccactttataccttatatttttcgtatatatacgttcaaaacgatatctaaagcacttgccacatatttcatctatatttgtcgactatagttcatggatttttctaggaaagaaagatagtatcttgttttttctttttcctttttctatgaaaggtctcgtaagggcatatatcttgtcaagtagtggaaagtggagtgtattatcacgagtgcaattacgatttagacaaaaaaaaaaatagaaaaaaaaaagatgaatcacatggttgtgggtcactcaaaataggcccatataattttcaaggcccacataagttattgttcaaaaagctagaaaatgaaagattacgtggaggatcatttagacaaacaaatgagtggagaggaaatgcgatcattggtaaataaatgtgatcgggtctagtagggcttccgattagtctatttcccaaatttatctctctgatatatcaatttcaagtcacttggtctcatttcttgtgattccaattcgatttcgttattttgttccccatgattcgtgtcccaacccgtatcatatctttgctgtatattttatcagagcaaaaaaaaaaaaaaaaaaataatgaagttgggtatctattttgttgatgtaacttatgtaatatgttgacgttatagcattgttgaatccaacacgaattgttaatgggctacaaaataattacatgggcttcttacgatgggccactaatataaggtcaaatgtgaattacacaataagctgaagacaaatttggaattagtcttgttgacaaaaccaaaaaaagaaattgaaactgggctcaatttcaatccatgtttttaggataacaaatcacacaaagagagactatagaagctagagagagtattgcagaacagttttgaagcattcttcttcctctgcaatggcaatggcaatggcaatgacaaaaaaagactggacaaatcatgttttacttatttgatcagtttcatcccaaaaataacacaaagccatgtctgtaaacaataagacatggattacaacttatgaatcccagagaatagatagaaagacaggtttacttgcgaggggctttcttctttcctgcaatcgcaacggctttgccctttttggtgcgagcgttagtactggttctttgtcctctgcaaggcaatccatgtctatgtctactacctctgtagcaatctacttcgaccagtctctgtatttccgatccaacacgcctcctctttaaaatcgaacaacaaaaacggtttgagagatggaatagatttaagaccatgataagaaagtcaaatgtgattggataaaaggattataccagttcatcaccatgctggtgctggccaacttcttcacggagatcaatgagttcttttccagttaagtctctggcaagtttgttagtgattccaaggtgacagagaacctggtgagatttacggcggccgattccataaacttcttgaagaccggttttgagtggcttattgtttggaacctctgcgtttcccacacgaattccttggactcgtaacccatgaaactgtagacaaagaaaatacataaattgatgtataatctaaagagagaaatcaaataaggtaatgggtttgatcaaactttgcttcacagagacagagttagtcaaaaagctaagcaagtcaacaattctaactaaaagcaaattgcaaaacattgttttaacctgagacaagaactagccaacatttgagatgcttccttaagaattatcattcctagaactttatttgcatagaactaacaaagaatgctccacaaaagtaaacgctttaggagaatcgtttgactataatatcatggcaatctcataatgtagacattgaactatacattagacctttcgatttcaaagatttgttctttcttctacatagcactgttgaaaatgggtaagaagccaaaatcacagagcaataagacgactttgaaacaaccccggaaatactacataccgaaagagagatttttaggtgacgatagatttgaatttgatgaaatctaataccaagagagatgaatcgattcgatctattgaaaccctaatcgtaaaacccaaatgtggcgctgaagtgttagacagatactaaccgtaacattacgaagcagagactggctgatgtcgaacaaggtcgtcgcagatcttcgtaaacccaacatcgtcgaagctcagtttcagagatttgacggtgaagatgaatgtgagtgaagggtttaagattcagtttccaaccgcccgccacgttttcaatccaaacgcaaacgcacttctttctcctcttgacgtgttgggctttgaaaagaaaaattattattgggctttttaatagaggccttgtgtcaagtaagggcttaagattatacaccgacttcttaagagagaggcctcgaatatagagaatattatcccaattcttgggatagaacgaaaataatataatctgtgagaaaaacatataaagtaattcaagacttcaagttactcaaacttgagctatctaactatatatatcaaactacaggtttattatttttatttatatattttttcacttcaattcaaactttttaaaaaaaatcaatttactctctatttttcaaaatttccaaatttttgtttatgttaactattttatatccattaccacattatttggttaagggtagaatttggcattttgcgaatattatatgcatgcaacaatcatctgtcaatttattttaaaaagtgtagtcattttcacgaaagaaacttgaaaaagttggcaaaagggtacgacaatgactcagacgtgttaagcacgggacatctttttgtatctgtggtctatattaattacattcccttttccatactatttttatgaagacattttcaaattcacatcaaatagaaaatagctcctaattaagtttttacttaacacggtgaaattataacaacaaattttttattgaaaggtacttctcaaaaatttgtgatcggaaccaactcttaggttagaccgacgtattagatattacgtctcacattaagacaaaatgacaacttggaaaaatttagtggttaattaaccctattagttgttaagagggtcgttccaaacttcatttacagcgatgtcaacaagtgaaatgttgtttatatattagtggcaactggcaatacagtgacatataagttctttcaaagtatagtaattaagaagagagtgcatgaacagtgctgcttatttccctggtaaaatatctaactaattgcccacaataattgttttaattttaaagtcaaagctatattgatatgtttagtataattctatagtagatttccgtacatttctaaactaattttgcttgggtttgttttccaacaagtaggatttagaaattccgacaattataattgattcttccacttggaaaaaaaaaataaactccaacgactgtggcaaatgggaatggagatttaaataatatatttcccaatgtagttggagccattccctatgcttttggaagcccacaaatctttgaataatccaaaatttatcctttgcctgttggctgagagctacttaatcaaaatacattatcgtattaaacaaattaatctgattaattagcaattagtggagtaatggttgaatataagacgtcttaatgaccccggtcatccttgcgtctgactcttaatagccataagagacgtctttggtgaacttaatcatcatgtttgattcctaattattaaagtaatgagggatcaaatgtaggtcgttaatgatttcacaaaacgacaaaactaaaactcaaaatcatcgagcttaaccggtggttccataaaatgttatttatatcaaaaatgttcttctttgaaaaattaaaaaattcgtcagtgagttaaacagaatatttacaatgaacaaataacgccattgaataaataaaatttgaaacgatgcatgtttgttgaatttgtttgtaaaatgttgttttgtggccaaatttaaattatatttggaccattttggtgcaacttcgactcacgtaacgtattatggattgtctaaggtgcaacaaaacattagcaagggggtggtctcaaaagacgcagagcctaccaaaaacaagacgtatatgttagaaattatatggatacactcgtatacgaagttagaaatcttcatgacccatctaaaaaagattataatcttggaagctcgaatcaaacaacttatttgtggatgacagaacgctagatttcgacaggacaacaaatgacgactttagtgccctactaaattttacaaaaacgatcttttttgttgttgcaaagaggaatatgatgacgatagctacatagaactgtggttacgaaaaagactatgaattacacaaaaatttccttaaactatttggatttttcttcataggaggatgaggagaaaggactacgcaacaaaaaagagtaactacaaaaggacaacatctacatcaatattttctgctatataaactctaatatatataaacatcttcaatatataaatatcttcaaaatttaatccatacaacaatccacgtaatccaaagagttcaaataacatttcaagttttaaactaaatgtctatcatgtttttttatctaggtgcaactggcatatttaatacgagagtgccaacattcaatatttaacatagctcaatgagtaagataagagttagttgcaggaagaggaactcttcaaattttgggcgtcattttcacatatgtccatatagctaactagggactgaggtcagtagaaacataggtaggacatatatattttagaactaatttaagttagattatatatcacgaataaagacaaagcacaagaggggatctttagttatataataataggcagaacaattggatatggttttgacccttgtaagcacgaaacaacgttctttaggaaaagaaaaagaaaaaatcagtcagcgtctcgccgtctccgcagtggtcgggacgtcccttgttacgagtcgcggccatacgttttcttctgcctaccttcttatctttttttatccactttattaaattgttcttttaggaagtttccttttctattaatatatttttgatggttttaaaggtaactacgtgccctatgcatgtccctgtggcttcgacgaattttctttacgatttatgattagagaaatttaggcacattcgaaatttaagcgagacatcgaagtgtttaaaatatagagtatgttattaagaataaaataaaaccaaagagacacgtccattttctcctagaaattgttgaggcaattcgagaccgtggtattgtatataccagtataccacttttttttttttttttcacaatataccacttcttatggatattgttattcgactttgagatactgatgtatagagtgggaagttaatgacaaacaaatgggtgcatatcaatatcagtatatatcgtgaagaaaagggaaatcataagattaggctttaaattagcatttgacacacaagttgtttaactcctgtgctttggtagaacttgtactttttttttgataaaaatgtaaatatcaattcaagaaatgaaagattcaggaattacaaagtaaatcctaaaaacatggttccatgccaaaaaaaggtagaacttgtactttcgccggttgtttatatatcccacttattcttttcagattgcttacaatatatcacaattcgactgcagatatttattatagagtatatgtttttagagattcgatcttgatacaaagcgatgaatcagagtattcaatttcattatatagttgcaatatcaccgaatccgttcttattatttattcactgtggatcttgaattctctttataattaataattaaatatggaatcatggataccttcatttttaactttcgttactcactatgaaagtcttgtgtgacaaaaaaaaagatccaatgttttttacatatcaccattctccataatattattacttgtaaaatgcgtatgaaccacgaatcttgtggggccgaaacgaaaatccattttagatctttttccattttttgtatcgaacgcatactgtagcatcattcgtctccctttgacataatgatatgcgtatctttgcattaaacgtttattttcatgcatgtttgtctttttttgttgtcactgacgattgaaagcaacacgaccacaagtggtaactaacttaaaactattagtcttatacgacaaaacgtttaccaggcgtgattaaatgaataacacttgatgtgaactataactaacttattagacgaccagtaatagatgacacgacacattatggaagcataataactcaaatagaagatgttgtgacatgagtcctgacatgcaataacaaaaaaaaaacgataatatcaagacacaagaagtttgagttacaataagttcatcatttatcatcatcatcatcaacaacatagatcataattaaacacaattttatacaatatacaatttggagctctgataaacaacaactataacaaaagtgcccaaataaccatgtatatacacacataagcgatacttgttatcaactttcgaatttccaatagcacagaacttgagcaaatctagaagattaagagatcctccttcacgttgtaacccatcttctctagatttggctgcaacgcaaactgaatcataggcggtggtccgcatgcgagtgctagcgattcgccttccaaaccttcagggatatgttccctaagcacagcttcagttataaacccggtactgtaactccaaccttcctttgcgatttcaacgacgtaccaaatctttagcctctccttatgcttactagcccatccttctagctcttccctcacaagaatgtcatcctcggttctgtttgcgtaaaccacatacatctcggtttcgtcctctggatcactcaatatagattgaatgatctggtagataggagtgatgcctgttcctccggcgagcattgctagtttcttggcaaacttaggtttgccgctgaccaggaagttgcctttgcctttgtactcgatgtgccctagtggacctttgatatctatcattgacccgattggtaacgagtctaagtgttgagacatgagtccaccattgggaaaccttggatgaacgtctttgaagtaaactttgacgacgaggtcgatatgaccaaccgcgtcgatggcgctggtgggagtataagctctgagacagagtttgtcgtttatgttggcgcaaacgaaaacgtgcttccccacgggtaaaccaagctgttgatcttctgatggtaatgcgaatcggaacttacgaacgtcgtgcgagatcgaagtcttctcaatgagcctaaccgggattttctcacgtgggttgaccaaagcaatgttcttttgaggagttagctctttgattggagctaacaaaggaccaaagtttgaggcaccatgaactgagacgttaggggaagagtcgtagccagtggtgatgagttcaccgatacggtaatcttccaaaagcttcttggctttgtcagagtgaatggcttcaaactcttcggtgcaatctgtacctgcgtttatcaggatagaatctgtgcctcctggatgatctttcaagaaacgtgtacagtcatagatgtgaccgtggacgatgatccatgcagagtcagcagtgttgtgttttctaacttcagagattgaatacatcttcgaggcagtgttcatgaaaggagatgagacagatttcttcaaggtattgttggattctgaggaaatctcaagctgacgctcctttgccatccacccacccgactggtttccgggtctggtcgggtgttcgaaaactatccctatctctcctctatgaggcttgcacacgttggtcctaatcctgaaccagcaattgttcatcatcccctgtttaacacaagtcaacgtcgttattgctttagtcaacatcgttaaaaaaataacaattagctggagaccctagacttagacttatgtaaattttatataatttcgattttaatctacataattgccccgcatgaagggagattataatacttaaacgcactactaaaatgaactgtacaacagagacacttaaagaattggtctttagttccatgttgattagtgctctattaaaagattccgtaagattagtattggtaggtatcacgttcaaaagaaaatatcatcagtagttccaactttgtaggacgaatacaaatatcaaaatcgaatagtttactcaaaaacaagattaaactatttaaatcatatagtaaagaataaagtaaactaattaattctataatttaaaaatatcaagagagaggattattaccatgaggttccagatgagtttatcaggctgagtattgaaagactcgtcccaggctcgaaccgcgacgtctttagcactgagcagatcaagaacctcaacgtcaagtgaccagaaacaccagcaccagaatttaccgtacttgttcggtttctcctggtggtcaagctcacaaacactccacgtgtctcctccgtctagagtcacctcaaccctcgttaccttcttacctcctcctgtttatttcatcaatacaccgatcaggattttaattacatagtaaagaatccttttaacttttaactaaagcaaagttaaaataaattaccagaataagcgtagccttttaatgtgtacggcttctgagtagtgaatgcattaatcggtaaaatctctgcgtgaccaggtgttgtaatcaccgagtttatattaagctcgttgattatgtattcaggcttataccaccaagctgtaacaaaaacaagtaaataatattagcatcggtaactaaaatgtaaaagaagacaagggtaagttaatagtttaccttcggaatttgccagctcagcatcaacgagagaaggaaggactcgattgtctttatagtgatagtaactgtcagattcttgaggcgtgacgatgattctctttaaccatttaaccatccgaccaccgatgaaacccggtacaatgacccgaaccggaaacccatgatccggcgttaaaagctcgccgttttgcatataagctaagataatatctctagccggatccatcgccatctccttcttaatacttgttccgtatttagatccgccgccgccgggaagatcctccgctccttcgaagcaaacgtttaacgcgcctcctctccggctatagatcccgcatcgacggaggatttcgcttaacggaatacctttccatagagaagtagatactccggcggatccccaattgaatccgatcgtttgtttcaccatgttctgttccttgcggcgattaccggcgcagacgagtgtcaccgggaattcgcggctggggaactcggagattagctcttccatggtgaatttagccggacgtttaacgagtccggtaatttcgattgaccagtctgaccaattcgctttgggaactgcaccgtggttgcggacgtaatggagtggaactggagtgatgaatccatggtgcataagacgaggaagaggtgcttcggcgttgaatggatgttttccggtgagacggagcatggatgagttacgttgaatccaactatcagccgttgattcatctctcggatctaaaatcgacggttctaaatcgctgtttgattttttaaccagctctttgtagtaagggacgttacggttatggctctcgtcttcgtcgtcgcttgaggagtcgtcgtaactgtctacgacggtggtgatgacttcggtttctttgacgattttagtttcggtgaggatgacgtcgagagtttggttttggtgacggtggcggtcgaatgagcgaggagaaggaacgagaggaggtttgaaggcgtgagcgacgccgttcatggtgggataatggcggttatcgacggaggtcgccatggtttagtgattgaaccggtgataagagagagataagctatttttttggttttggtttggtttgtgaaattttttggtttctgaatgagtaaatgagaggttgtatttatagggggcgttacagagatgagtaaataaaataattaataaattaagagagaggagaaattgacaaatgtgagtttgtgtggtcgctgagtagagggacccacctacctagatcctaaggtttggcctttaaggcgggagatttttatttcataggatatatatatttgcttttaaatactaatgcgatatgaagttaaaaataaaatgcgggtctaaggattcgatccgtgggcaatatcgtgggagggtactatgattatgatacctctctcactcaacacttaactttaatacaaagaaagaaaaaaattgtgacaaacatatgcatagttttctatggaaaaaaattatatcgtcaatagccaattcatttctttacgttaagtgttgaaatgtttactggtcttgatcataatttagctagttattgataatatagttttgttaaaagtttcacatttatggtgtcggaattgtttgtggccatttaacaagaacatattatttattttagcgtaaaccacagtggaaaaaccaattatagactgcaaaatatatgtagaatatgaaaaagcatgttcatgcatgtttatttctttagagttaatgtactccgacactgaaattggaaaagtcagagaaaccctattggagtctatacgaaacttccaggaagtactttatgtaataaacaaaaatattgcacttaaaaaagaagaaacacatgccttcccttgaagctataaaatttaataaattgaatacgaacaacaatcgagtaaccacgggcaagatacacctttctcttgaggaaaaaaagctgagataaaccttcccttggatccacaaacatggactcttgtataagcaatgctgagttcttttttctcttcctcactcactactagttcttgctagggaatgttctagctagctaacgtaacgtacttacgacatagatataaaaaatacccatcaaaaaaaaaaaaaatagatttgtctatgcaaaatactgggtattctcttttacaattgtaaagtgcggatgcagcggagagtaaattttggagaaacttgaattttcaatcgaagcactagaatgttttttttatcaatgtgtcacggcgacaaaatagtttatttatttggaatatgcataagttaatgtgtgccccccaaaaaaaaatgcattagttaatgtaaaacaagaacaatattacctagttttattccacaaatatatgatatggcaacgaacttttcgataatattgaatgatgattaaagacaaaagtaacacgtaaacttgctcatagttttgggaaattgtatgttaatgaatgcaaaatatcatagatgtatgactcaagattaaaagtacatcacgtgtacatacatattacataaaagggtattaatcagcatattcacagatagattttgtctatattgacttcaatttcttaaaatcaacgtcaaattagacgtcagtgtaataataagaaaatggagagtgagaatcctgtgggctaaaacatatatgtatgatatgatattgagcatattgttgactagtttaatatagagaaattgtattaattaattaagtcgagaaagtaaatatctcgaagatttttatggattacatgacgattaagaagataaagcgcaattaagtataaactaaacagagattatggtataaaaaaggagtttagagagaagactttggaggctaagtggcgcatgggaacaccaacggccaagcaaatacacgaacggggcaaccaaacaaagggacgggtcgtaatattatttttgtcacttgtttgaattttcgattttctgttttgttttgttttctactaaaatggattttcgattattagattattaattataaatgatacatgtgtaagaacgtatggacccgctaacttttatcttttgcatccggtgtaatgaaataaattcaagagtcaattttggttttaagcctttatgctagtaagtaataatcaactttgcacagaatttataattatcatgtcataacgacattttcagtagcgcattatcttgcaagtcatgttaaagtgaactatatacccgaactaccaaaatgaacccacaaaaaaatccaagaaaaatggataaaacgccgaagttaacaccaaaatcgtgacctcaaaatttatgaagtcgacggccatgtgtcgctaaatgaaagcgtgagctcactgaaaagccggaaacttagaagtaagctgcatgtgcttatggaaagggcggagcttattcaaaaccgtttggcttctaataagcaaatgggaggtgaaatgaatttcaagctctcgaaatttagtccaaagactacgcattcatttgtgatgcgtccacttgttcatcaaatacaagaattttctcacatattaatttactttttttgattaaatgcttgtctacaaagatctaggagtatttgaccctttttgatatataagatccgaaaaactctttttatgaatcagagaatgcacaatatatatctgttttctgattttctgccccataattcacaactaaattgacaagatagcttaattctttttgacgtcggcaacatatagcttaactccaacatatgcgtatataagcttcaagcttgtcctcatttagctagagtaatggcgaccactaaatttgatatggagatttggcaattgttacacgtgatcacgaatcatgaacggtaaaccactgaatccccaagaataatttaattccaaaaaaaaaaaaaaattattctaaactaaacgaaattcatatgttttaccattttagatttgtttttgaaattaattttactacagacaaataagaaaaatgaaatctaaataatttaatgggaatataaaatggaggcaactgggggagcttgatgcggttagggaaacaacgacgaccctttcgtgaccctttgagccactttcactacatttacatttattcatttctccttacaatatacatattctcctttttaacatgtactatgcattcacaaaccatgtcgtactatataaaaatatacattgacgacacaaatcaaataagtatatagattttagtatgtatttatcttgaaatatatggaaaacaaccatgtcgtactgcacaaaataatttgatggaaacaaagtaagtatgtaaattttgtacgtgtactgtatcttgagattaattagtctctctactaatttgtttttgtttttatcgtatccaatagttatcatacatacaaagcaatggccagaatatcccaaacattagctcaccgtcaatttaaacacaattatcctggagataatcataattctaatccctattgtggtgttttaaaattctcatgttgattttgtctaaaagcagcacttttgctatcatataaacatatttaagcagcacttttcatttcatataacgaaataatgaaccacttgacacatgcggctatatttttttaaccatatgatatttgccatattggtatatagttggacacttttactgtttatagtcaaagtcagtgtggtactcaaaatatggcacttacaaaagttgtacgcatgaaattgaatcttattagtagtatcttccctatttttcaactgaaactaggtgaaaaaaaaactcactttaaaaaaatagatgttatggaatatgatagagtagtaatatcatttcattatatataggaaacaaaatattaatgttacgaaaccattcttatgtttagtggaagatctaagattcattaagttcaatctcgacaaacattttaaaagaagtaaccacatattttcctatattaatattttaaaatagtcttaaaaaaaatgattgtggcgatacaatgtgaataatgtgtagctatattcactacatcaaaatgtccactgaaaaaacgttcaactatttcgagtcaatataccgccctgaatgacttgacgacgcaaatggtaatacacctgcattctggtattttcgtaaaggtacactagaagatgcatcaaaagaacattttaaaatattagtatataatatcgtcgaaaaaaaacaataaattctgcatgaaaatcagagcagagatccgagataggtagctatataacattcgcaatagcaaaggtcatataaacgcatatagccttccctaggtgttccctttcgtgtctgttcactgtttttattcatattttaatactactccattgcaacaaatctttttattcctttttccttcgttattgtgaatcctgaagacagtgaagtgaagaagtggaaagatgccacacaaacactaattatgttttttctttaattaatcaattaaagcactattagtttagtgtttaaatttgatggactataattggagttaacccttgctggtttaaaaacatatcatagagacaaagcggcggtggtccagtgggttacattttgaattcttatttatttaaccacaaagatgcaaattctttaataatcacacagttttggaacattgttgttgttaagtcaaattagtttaatgtttttcttctttataatggataattgtgagattcttgtcagcattttactatcattcgaatctatatatatatacatttttgcagccactttgtgaaataaatcctcaagttgagacttatttacagtggctgccactgacatttaataattatttttgataattagaaagtaaatcttcgaattaaatatttgacatttaactatcttcccgaaatctctccacattaactacacaattagttactaaaataaaacttccaaaatatttaatatcatttaaacactacaaaattatcatttttgatattgcttttttcatgactataacaattcgattataagcatcaaaccgcagaaatatttgatagcagttaattactacaaaattataaaatatttatacaataatttataaacatatcataaataagatcaacattaataaataaatagttttttttacgggacgggtttggcaggacgttacttaataacaattgtaaactttaaaataaaaatattttatatatagatacaatttgcaaacttttatatatattaaaaaattaattgtccccgcggtgtaccacgggttaaaatctagtagtacatatatcttaaactatagaaaatcaaacaaagtgcaaaatttagtcattagtaattgattatgtttcataagtgtattattggttggcaacaaacaaaaatagtatgtatctattttaggcccaaaatagttcaagagaagatttgttatcataagcccacaggcccattagacacatttttgatttacatgtaaatggggaagtcagcattttgatcgttgactgtggagtagttagatttacaaatgaaagagccgaatgagatgatgacacgtttcattccgattaagtaagaaatcttctcttgcttgtttcctcttaattaacatcaaaatcttgagtcgagtttgaagaagccaaactccaaaaaaaaaaaaattatcaaagaaatgcaaatgggatatgaaaatccaaggactatgtacggtgtgatcatcaccgtgtacgttgatcgtcaaacgacgaccgtccgatcatttcaagggagacagaagaatgatgaaggggagagattcattgaacggacgtggaagcgtgggatcggaaagatacgcggttatgatcggagagcgaatctgttagcttatattcgtcagaagagggccgagagtctcaccggagattcgaaatgcgacgtcgtagagagtgacaacaagcctgaacggctgagtccgagtccgaaggtaacgtttctctggttttcttaatgagatattacaatttaattgggccagatatgggccatgacttatcgttcatcttgacttgcgtttttagtttacgcaaagattaaagagcaagtaagcagttgcgtctgaataatctgattagtgatgttgagtcgttgactatgatatcggctaagagtagctttacgactaaaccttatcttttctaataaacagagtatttttctttgtaataataagtatattattgttataaaaaaaaaaaaagtatattattcttttaaaccagcaaaattcgaatgtcttaattaatttgaactttgtctgtgttgataaaaatggcagaagaagaaaagaaggtggataagaagaatgatgagtaagttccggttaccgtttcttcggccatttcgccggaaaaatagaacgtggagatacagacattttgatccagatgaagaagaaggagatgcaaggagcaaagctaaacacaactcagatatttgggtacttcatctttttctttctgtttttctaatttatacttttcttactaaagattgttctatgtttttctgaatgaagaataagctaaaacatatggttggaggattatcacgcggctgcggacgaagtagaagagattcgtgatgaactaaacaagaatcaagaaatcgaatgttgtctgaatttcgttaagaagtgagaaaagctttttttcttttcttttcttttcacataacctttttattgttcttccagaacttgaggaagatgaagatcatatcaatacagaggaaaaaaagtggaaataaaagagaaattatgaaatgaggcataagagatcattcctcattaaagtacaacaatgcagaaacaataatacaattacacagaatacaataatttacatgaaaataaataaaagaaagggacgactgcgagttttttttttccaattccctgtgtatggctaattggctagtcatgttagcctttttatactgctcctgcaatttttaagtcaactataatcgtggaaagaggttgagaaatatgcagaggacattgatcatgaatttgcttcggttaaattaaagttaccgacctctattgccgcctctctggttccttggaaagagcaaacggtgaagcgaacggcttggagaagcaggggagctggaagaggatgcgaagtcacttgattccatatcaagaaaccgaatatgatggctttgtccttgccatgatgattctagatccagtatcccgttgcttagagagtcatctgagctgtaatcttcttcttcgtcttcttcatcataaacacctcggttatgcggctctatcacataatctcccaacacaacagcacctggtgtcgatgacattatcgtgcttatcacgtctcttctgtctctttccctctcaagcctcttccatttagtttctaaagctggatcaatggctcttgggcaagcatgtgggtgtttttccttcatgtgtttcttgagctttcggaaatttcctaaaaaggaacagttatcctgcatacaagtccttctcttggagttaaaatgcatccgagcatctttcacaacagtccagcctttcacttgacctctacacagtggacacaaaagctcgggttgtcctgagttttcgttaccgtaggatttcctgtattgatcaaggcagttggcaaaacggctgcttgtagcacacatgtaaggacggcatcctttgtgataagacgaacacaggagaagaaccgcattgtgtggagactccaagcatactggacaggttgagccagcccattctttcttacaacatggtgatggatacggtgtagcaatatgacccctttgattcactttcttgattttccccattcgatcgacttaaaatctattcacaaaaaaaaactcaattgtaagattcatgcaaagtagtaaccaccaagcaaaatcaccactctcaatgaccagtttgaccacagattggaaaaatgtcaattcataaaaacaaacaaaagcaaagctctttgatgtccattgaccatggatccaaatctccgactacagataagctaccaaatctctgatccaaatctctgattcaggaaactatccataagctaccagataaactacactatacagttctaattttaaccaatagagtgagtattaaccggatccgcaaatggcaatcgcaagcaaattcacaattacagatccaaagacgatgcaaaattccagatctgtgaagaaattctggcaaattaaatccaaaattcatgcaaaagtaagcaacgattttatcgatccacgaatcatacaattcaatgtttgataacacaaaaaacaatgacctgagatctcgcttaaacggaaacctaatcgagaatctaagatagatctctatacggaaacttaagaatcggagacctttagcgaatctcaaatttggagagaaggagatgacgaatttcaacaggataagagattaaacgatgcggaagaaggcgcggaaaacagtaccggagagaagcggaggagatcgccggcgggaagagagagctccgagcttgaaggatgatgatgtacagagaaagggaaaaagtgagattgcttctacaaattgacgtacgcaaagaaagccaaagaagaagactcttttctttttgattttaaacttgcggttggattcctatatgtcgtcattttgacgcaaccgtttttctcatccaaattctcctatcgatggtgatatctcgcgcatacgatatgactgctgtttattataatgggccgtaagcccatttagtttgttagaataaattcagattttgtagagactagagagagacgaaattacacattcgttttatatgtaaaaataaataaaataaaaaatggaacgacagaatgatataatataacaatatatgttctgtatatttgaattgaaacacatttatattttttactggataatcaccaattaaaaaaactaattgcacattaattaatatattaaataaaacaaaattaataaaacaatctagttatgagcatagtccaaataacccaattagtccaaataacccaactaggactagcgttacttgtcctagctatattccacatatcgtagacaggagccatattaggatcgaagaatccgaagctttgttcaaccgctccttgtttcaaatcttcattgaacatttcgaagaaaaaagttatcactggaacattgggccgccttggcgtacccttacctgtggttagtttcttaagcaacccctggttataagcacgagcgttctccacgcttgtgtatggatcattccctctagtaggccaaccggtctccgctacgtagaccttcacgcttccgtggttgatcttctctaatgccacgttgaaagcatccaacgttgcatcgaatatatttgtgtattggtattttccgtcggtcactaccggtgaagtcgaacggaacgttgcgtattccagtgacacgtggctagggtctgatgcgtaagcgaaataagggtaaacgttgaccatgagcggtgaatcggtagagctaagaatcgatacgatttcggttataagttcggttattgccggtttaaatactccggctgatggtgggtaagagttagcgagtgcggctgtggatatgacagtggtgacgtggatctttgagtttccgatttcggtcaacgcagcttttatatttttcatggcttgtggcacgtaacgtccgatctctccttctatcacttcgtttcccacggttatccaattgaaagctacgtttttgtatggtgctataaatgttttatcccaatttaaggcaaattggtattcttcggctaatgttttgattgcttcgtttcttggtccgatggctacaagaagaccagttccttgtaatgagacgatgaggtcagggaaaggctcgtagagtcttatcccaccgacgtttattttcttgtatagagacacagttttggctggagatgggagattgtctccatttcttccataacatactccggcgaaggaattcatatttccggcggtggttaatctggctgaaagaaaaagaagcgtagctatgaggaacattgtcgagttgctcatgttttgagtccgcatgcatatgttagagttaatttgtctctctcttttgtttttttctggtcaaagtgtttgtctctccatgtatataggttttgtgttttatgtagacatattttttacttatatttgtaagtaatattagaaagtgtgtattgctcaatcttatgtcaattaatggtaaatgtaagtgggttaatgcatgtgtgatgtgtctaaacctgttaatactttggaaaatctttagcacattttctcttatatgaacaaattttgaaatgttatcatcagtaagaagcttagttgcaataccctgatgaaatcttgcaaaagtttgttttaattttcatacttttcttttttttatttgtttgttctaaaagataaaaaataattatttttaaaatatctttaaaatctgcacaatgttaagattatctctgaatattttttctttttgaaatatacattagggagactcaaacacacgtcatacactcaaactagatccttcaaaaaaatcgaatccatgatatgcaattattgtcatgctttgctgttaagttaaaacttttaaccccacgtcatgttataaagacattagagcagcagcaatggtgatctcagcaatggtgatctctcttatgagtctcttataataaaaataaagaaaaataattaaaatgaaagggacagaggagagaggagctctaaaaacccttatttaagggacaatctcaaccccaaatatacacgtgtaattcttttagtagtcaaattctattaaaaaactaaaatataataacaacattaaaatattattattattttggtttttacggactctcataagagagaccaccattattgctacttttagtatctttgtccagagctactgacagttaaccccacgttgaactttatgctttgaattaggttttaagttgaactttgtgctttgaattagacgattcgatcctctgtttctctcttgctatgcgctcaattgattaactttaattattttcactttagttttacttacagaaagtaaataataaataaatttaattattgcatgctcagacctaaaaaaaaataagtaaaatggacaaacgtatttttaaaaatttaagcgggaaaattaattaacgccatttacaaaaaagatcgtagactggagtcatatcaggtgcaaagattccgaaactctgttccaccggaccatccttctgattttctttgaacattgcgaatagaaacacgtcaaccggcgtgttttgccggcggggcgtccgcttccgttctgcagatctcccacatgttcgaatccccatattataggccttcgcgttatcaacactcgtgtgcggtggatttccctccgtcggccatcccgtctccgccaccatcaccaccacgtttgcggcgttgatcttctccaacgccgcattgaatccgtcaaccatcgcctcaaacatattgttgtaatacaaatcaccgtctatcactaccggtgtattggatttgaaactagcgtaatcgagtgagatgtgatatggatctgacgcgtatgcgaagtacgggtagatattcgtcatgagaggcgaattcgtctctgagagtatcgatgtaatctccgtcatgatctcggttagatctgggaggaatgttgcagcggaaggtggatatgtattggtcaacgcggtcatagctaaaaccgtcgtgacagagattcctgtgacgccggaattcgttagcgcgacgttgacgttttttatcgcggcggcaacaaattgagcgatttctccggggaagacttcgttaccaattgtgatccatttaattgcaacgtcgttttggtaaggtgtaatccaggtggagacgaaatttgttgcggcggctggatcgtgagctagggattggatatcttcgtttcgtggaccaaacgcgactaagagacctgagccacgaagcgcttcgagcatgtctgcgaagggctcgtacatacggattgcgtcgatgttgttgcttttgtatagagcaactgtatctgccggcgttgggagattgttgccgttccggccgtaacaatctccggtgatgtcccctgcaacacctagaaggacacaaaatatagtaatcaaaccgtactcggttattgtttggtttaaaatatttaatcgtttccaaaaaacggagttagactgaaccagattacatccaaagaaaatcaaaccatgagataatgctttttattaatttaaacatagattgattaaataaagttgagtttttgttgttgttattattgtgaggttaattgtgatgaaaacaaaataaatcaataaatcagtttttacccgctgtgcaaaagatttggatggacaggagcataatcacaacagcgaaacggattagtttggaatccattgatgtatggtgcgtgtaaatgaactatttaggagagaattgatacgagattattctattgtgtttgtgtatgtttgaagatcttaatattggtgaatgtggaatgtatttaagggtggtttttttttttaggaagcatgcgtaattactactctaataataataggctctcaagcatgaattatttatccattaaatgaaatttaagtgtacctagttttgcaactgataaactatacaaattcgtgctacagctttgtcattaatggatgatcaaccattttttttttgtttaccaaaacatcatattattatgccacttgggttgggttaaacgttttctcttttggtggtttgcgaaaactctttagatcataggacttactcactatttttacattgtgtgcataaatacgtaattacctctgaagaaaagttacaggtgaagttcatcccctataaaaatgaagaactgtttggtaaaaacgttttaattaatcaccttcaaatacattctatcaatcggcgatatattaagaaagttaacaagttattaatttgtttactagatcaagatttcaattgtttactaatttgtcgttttgtgcaagagttatgcttaggtattaaaaatcaagacaaaaatttcattctacaaattgatttccacaagttttgaggttccagcttcgtaaatcattaggtattaatgcggtagttttatcatttcacaaaaaaacatttgaaataacattatacattaatacatccataaataattcaaacatcatgatctccttaattatatcaattaatctagttttttttttttttgctactcgatagttttaaagccaaaacattgtaaacaacggattctagtttaattggtgggcacaaagagtcattttcataataatatagaacatgtacatcacatgtaattaatacatacattctctttctgccaatcaatcataatcaaagcaatatttttttaaaaactaatatagagcaaatctaacaataaaaaagagagagtggtatcatcatcataaacaataagaaggctccaaaaaacagaaagttaaaaactaaaataaaagaaaatctaatttggatctaaatgaacttctgaaaaaagtaatgacctaatctccaattactacaaaaaagaaggatcaataaataattaaagaatcgagaggtaaaaaaagcattatccgtacgaatgaattaacgtggtcgtatctcgtgagtcatccaacgagtaaaaataaaacacgtgtcgtaacaaaggaggtgcacgagtactagcctacgcctcacacctctctatcatattctcttgaataaaaaagctgaaaaaataattaaaaaaaaattctggcaaaaatgaaccgttcctctgttgcctgcaaataacgcgaaaatctctctgagaaaaaataaaaataaaataaaagaaaccgaaccagtcgtgggaaggatccgaaagaagatgaaccagagaaatttgaagaagaaaccctaatcttagcctcgcttttattctatcttcttcttcttcttctttcttcgttcttaatctgagaggcgccaagattggtacgggcggagctaggctagggttaggattttaggctcgggaaattagggttagggttttgattttattggctgtttctttctcctgtggtttgggaggtgaaattgaaaggcggagttgtattggaggatttgggattttagggttagggttaagtgttttctcgttttttcatgggaggtgtgggagtttatggtggtggtttgtgtcggttatgaacgttgaccaatgccagtggcggaagaagatgatgggtaggggagtggacggaggttgtggtgctgaagagaagccttatcgaccatttcgtagggttgcgttagataaggagaatgggtatgaggatatgggttcgttggaaatcgatttcttagctcaagctagcaaaaatctatctgagaggtctccttttgatgttcctgaagatggttctacttctgtgttaagtgtgcctactctacctattgctttagctaatttgctgaagaaccattcggataataagaaacggcataagaagtctcattctggtgcggataagaagaagaagaagtcttctaggcaaggggataagttgagaagtgggagtatctggcttgaacatgaggactactttaggcgcttagattttcctgatttagaaactttgtctgatttagcatctctacgatctttatcttctagaaattgcttttccattccatcggtggaatacgattctattgatattcaacagagggaaactgatgcgagtgcaaagaatgaggatgttgtttgtggagatggcgttgttctggaacaaattaagaaccttctcactaaagatatatctgaaggcacagtaagaaaagaagaggatgttgttaagccaatgggtgttgacaatgtagggaatggaatctcctctgggtcagactattctggtagtttagaatgggttttaggtaatagaaataggattttgttgacatcagaaaggccctccaaaaagcggaagcttcttggtagtgatgcaggtttggggaaattaatggttgcggctccttgtgaagggaatgcgttgttatgtgatttttgctgcactggtcatcatcagttgattgtttgcacttcctgcaaagctacagttcacaaaaaatgctatggcctgcttgaagattcaggtaaaccttggttgtgctcttggtgtgagctggagaatggtcgtgctgattctgaaagaccatgcttgctttgtccaaaaaagggtggcatccttaaacctgttctctcaaaaactgagaatggtgggccggcggagtttgctcatctgttttgttctctgtggatgcctgaggtgtatatagaagacttgaaaaaaatggagcccatcttgaattttcctgggataaaagaaactcggaggaagttattgtgtaacttgtgcaaggtgaaatctggtgcttgcattcgctgttgtaatggtatgtattgttgttttctgtgcatccagtctacttctgagcatgggtagtttgtcacctcaaattggggttcatttggctttactgctgtgctcacagtcgttgtccttactttgtctatgccagataacccaattgtctggattattttcactggaaaatgctttgttggcatttattatcacaatgcagtgtttttattttcttcttctttttggcagtgtttcattttcttactacttgtcacacttctctttgattcaatttatattgtctccatttgttggtgaatataagattagtaattgatacgttattacaatctcttgatcataggaacatgccgaacatctttccatcctatatgtgcaagggaggcagggaataggctagaggtctggggaaaacatgggtgtgatactgtaagtttcatctacagaatgcaattgtagtgagtgctgaattttctataaataatttaagaaaaccttgtaggttgaactgcgagctttctgctcgaagcattcagatattcaagaaagtggaaagtcagtagagggaggagaaagtaatgcagctgaaagtcgttctcctatatgtcatcttccatcagaatctgttggagaaggtcacctaagtaatgatgagatgggagttgatgtaggaacaccgggtacaggttctgatatttcgagaaacagtgacttacaagagctagaatcaccacattcaaaatttaacttgtctgcaacagacaatgtagaatcagggatgactgggagaagcaacgaagatgaaagaactctgtccaagtctcttagttttggattgattctgaaaaaggtttgtatattcttattagctggattgtctatacctgttgaatctcgtgctcactgattcacattttttagttgatcgacctgggtaaagtggatgtgaaggatgtggctgcagagattgggattaatcctgatgctttgagggctaaacttacggtaacgcataaaacttctcatctacctgcttcaaacctctatgctctcattgtgagtttctgtgtattgatttcaaaaatttctgttgtaggacggagacttgttacctgatttactaggcaaagtagttaaatggcttagccagcatgcacacatgggttcttcggataaaggcaaaaatttaaaacgtaagaccactactaaatctgagcgtcgggcagctatctgtactgaaggcatagtgatgctagattctgacatcttagatcctgctgtagcaaaggcattttctatagagcgaacacatgaaatcaacatttgtaataatacgacgaataatacaagatgtacgttaactgaaaattgtactggtaatggtattgtggttgtggaagctaaagctaatggatcagttttgaagaaagaaggaagtgttagtttggcacctgatcattctccagaagaaaaggtaatcaccaaatcttaactcttatgttgtgattatttttccttaaattctagatgctttcccatgagctgcatcacaaatagttgttactagttagttatttaaaggcttgttagatctgacatcaagtttggccaaacgcaagtgtggtcgttagtcttttatgcacaaggacctctggattagatatttgattgttgtgccttgttcctcatatacagaattcaatagtgcttgatcagaaagttcatcatgggaaaagttcagttattccttctggtatgttttaacttttcactaattttttttcttccatatcccatatagttgtcctataagcttctggtccgatgtttattagagttaatttaatattttttattcctttcttagttgatgatagctgctgctgaacttgtttctaatcttttgagtagatgatcatggagaacaatcaaactccagttcttctggagtcatgatggagaatgccttttccttgaggccaaatagttctcagaatcgtggaaatttgaactgtccaaaccccattatcttggatctcttgtaagcgccagaaatgcaattgttagacagtttctgttgttctctcggctaacataaatatcctgtcttctaaatcatttttttaatatatgatcatgcagcaatcaggaagcatatcctggtttcaatcctcatcgttatatccacaaagaattgtcagaacttggcaaggaacaaaccctgaaaagcagcacggattctgatgtggctaggatgacaaccaattttgatggtatagacttaatgattcatgccacaacttttaggacatttggtaacattaactcatttggcaggctctgaagaaggaaacaaacatctgcagggtgcagagacatttcttcagttatctaaagctaggaaattgggcatactggatctgtctcctgaagatgaattggaaggagaacttctatattatcagcttcagttacttggcactgcagtttcaagaaagcaactatctggtgatttgatgatccatttttaattgcatggtcccgattcttcatgttttctacactatttctgttatagtattctaatagttggtccttaacagacaatttagtctatgaagttgctaaaaagctgcctctggaaattgatgaacaacatggacgaagatgggatgatgttctggtcaacaaatatttccatgatgtcagggaagcaagaaagcaaggtaggaaagagcaaagaaacaaacaagcccaggctgttctagctgctgctactgctgcagcggcgacatcttctaggaatacatcgcttaggaaagatatgtcagaagaacctgcacaacaagaggttgttgttgctacattttgattttttgcctccatgtatttattttagttgtgccatatttcttatccattattcttactggttataaatcggacagatgagcacttctagacgtaaagttgttggcagctctcacctagttccacagacaaaggaatcacttttaaagatggctgtttctgggccaccatccgagaagcggtctgatcatcacacaccagactttttagtagaaaatccacgaacttgtgacatctgcaggcgctccgaaactatatggaacctgattgtagtgtgctctagttgcaaggtgaaagacatttcctgtgatttatttctaatgtttgatcaaggcatgatcatctcttttagggaccacttttatgcactgtacggtatataatatggctccaattacaggttgctgttcacattgattgctacaaatgtgctaaagaatctactggtccctggtactgtgagctatgtgcggagtcatcttcagaaccttctttcaattttggggaaaaaccgaattcttctacagaatgtactctgtgtggtggcacaactggggcttttaggaaaaccacaaatgggcaatgggtacatgcgttttgtgctgaggtgaagtttcctttacggcagcagttattagcaggatctggagtactatattcagtattgaacattgcaaataacttggtgtataatttctggcagtggtccttggagtcaacgttcagaaggggacaaataaatcctgtgcagggaatggtgggtttatataattattataccgaattactgtgatgcttaagctgtttaaaagtactaaagctcaatgtatggtgccttattaggagtctctggccaagaaaacggataattgttgtgtatgccaacggatatatggtgcatgcactaaggtagtcaccgtttctttacttttttttttttttatctgaatacatctatttcaagtgttgggacaaagattgaacaagaagcttatgttttgtcattttacagtgcagttatggtaactgccagacgacattccacccctcctgtgccagaagcgcgggttttcatatgactggtggtggtaaacatccgcataaggcgtactgtgagaagcacagcatggagcagaaggcaaaggtcttatctcttatctctttcgccatcttgattatggcctacttagattataagcttgcttatatctgtctgactatttctgcaggccgaatctcagaaacatggtgcagaggagctgaaaagtctcaaacattatagggtaggagttcttagcgaagtcaaaatgtttttgccattgctttgttaagcgtattcctttctatctcttatcaagtaatttataattcttggaattttgctaaatctcctccaggttgaacttgagaggttacgccttctgtgcgagcggatagtcaagagggagaaattaaaggtatatgttaaactacagaataaacccaaaattttccatttattgaacgaaacacatgggggtttgacctgttactggtttggtatatttgcagcgagagttggctatttcctcacatgaaatacttgctgccaaaagggatcatgctgcacggccattacatgtccgtaatccattttctcctccagaagtttcgtcggactcagctacaacatcaataaaaggccatcctgatagtaatatatctggcagtgaagcaatacagaggtcagatgatatcactattgacagcacagtcactgataagcgcagaggcaaaggtcccttattaatggacacggatcagaaaactgatgacagtgctacttccaagagtcggttttcccgtaaactaacagaaagacagatcttatctgggaaaactgttccccgcaaacattgtatagtgtcacctagtgtttcagaggatggagataacgggtcaaagcccaagaaggtgagaagattaactttgtcgtaagttacatggattgttaagttccgactctttctgtgcccccaactcagcacattcataggatcttacacttgtttgtcttgataactgataatagcagcatgtagaaacatttgcaaaagagctggtgatgacatcagatgaagcttctttcaagaaccggcggctcccaaagggatacttctatgttcctgttgattgtcttcaggaagacaaaccgggaaaccagaagctggcttcatctgacaagccagcgaaccagaagacatcttcaggtgatcagtcaggtaaagacgacgggtaaaagctgagaacacacattttggctcattgctcctaccttaattagatactggctattggtggacattgtcttctgcgccctaaccaggattcaccaactggcttaaagcaaaagaacagatggtattgcgctacaaaagagctgtggctgcaactgagaatcagctaaaaaaagctattgtgaagcttttgggtactcgatacaaactgtgcctattggtaatgtttgagatttgagggtaacatctctataggaaaaaggcttcagattggattcagggaagtgagaaaaaagctccctattaccatataaagaaggatcggtcacgtgtaattctgtttgtataaagaagcggaaaaaaaagaaaagggttgcataagtgtatatattcatcaattgtgtctaaaatctgaccaagggaataatagttgtctgaaaattctttagttatgcattttttagctcatttgcccttttgtccaagattatactaacatgatctaactcaagtagaagaaacaacaaagccaatcacacaacaacaactaagcaaatatattctcaagtatatgatttgtatacctttggttcttctttacaaaatttgccttctcctctcttgctctctctttccctttcttgtagcagtctatcaaagttatgtttagtattggaaccacttggctgattgggaactgaaatgatcttttacagaagcgtattccaaacagctccttctccttcactacaaacttcatgcactatcttcattctctctacggacttgcaaatcccactacagctccattcgaatgaggccacacaaacatcgcccgcctctgccttccatctacaatctgtgagtatgtgaatccaatggaacataaccattagaagcaagagagataagaggaagattgctttgtgtgatgttattgagctttacctggaggagtcccacaacagaagttgcggtcatcaatatgttcaacctcaagaccgataaaccatgaccctaaagacacatcttcattggcatacttatgcaaaattggcctgcatacaaagttgtaaaccttttaggacaaacatttgatggaaggctctttatgaaaaggatgcagaagtacgtactggttgatggatatgtaattagcaagatccttggagatggcatagatctgtcctgtagcatgtcgaaagtatttgttaccatcctctccaaatttccaatactcaggttcatggtactttactgtcctgaaacagttcaataaactaactcaacaataatctaaccagtaaaaccagagaaactttaagcttgactcaagcaaatggaattacttctgagcaagaacaggccctgacttcatacaaccaatataaaccctcggctttgagcggtgacgggcaagtgtggaagcaagcatacctgaaagacaaagtttttcattgctcccattgaaggagattgatgcaaacaaaagaatcgagaagcaggttttcttaccgagattgacgtgaacatcatcatctaccttgatatagaactctgcatcccatttggctactgcagtggaaaagaatatcttggtttttgctgagagttcgtgatatccttcaacatgctcctgcaaccagtaagaattttaaacaggaagaaaagtgaaaaactgtatcctttcatagaaatatagaatcgtctcaccagcctaaggaagtctttgtgttgagcatcttctgaatcaatagctctatccaatatactatttgacgtcgcactgccaccacatttgtatacactagtcaatctcaatctaagatacatgaaatttatagaatacatgaacctctgagagaaagagaggaagcttcacctgtgtccaatcatgaacttgatcacaatccccttctcctgttccagtctttcaagcttctcacctgtgaaaaatccacagctcttaactagatgcaagaagctgtagttatataagatcattaagtttaaaacaaaaccttgaggcatccatgtttctctaactgaatcacgccgttttctactgctaaatgcggtattgattcccattaccataaacactttcttcctcgggtttgtttccgagccatcaaccatctcttgagagctccttgtagaagaaagtgtagaaactgacttatccaacgacctgtcatccctccaaagacatagaaaaaaagctacaacataaatagagaaagcaagttgatttacaagaaacaaaaaacaaactcaagattgtctcactcactgtatagcttcatgagttctcaaaacttcgccagttacatctttttcttgtgtagctttctacatttgaccaaatcagaagaagaaacataagtgtaaaaacccaaatcttggttttaacgaacactaaaaaaaacaaatatttatgaaattctacaaaattgaataaagaagcgtactttattatgagcacaatcgtcagatacaatctgaagttcatgatcacgatgatgctgtgaaattagctgacttccggaatctgacgacggctcccatgacctgacatccacaaattccaaccaattgcaacaaaagcaaaaccccattaagaaaaatcaaacagcaaaaaaaaaaaaaggcagaacaagaagaaggatagagtctgaaagattatagtaaaagagagaaagatgaaaagttagagacctggaggtgaagattgctccgagagcgaagaaagagatgcagagaaatggaacccatttcagagatattactcgtttggagactttgtgcttcatcgtggtggagaggttcaaagaagaaagagagtgtgagattagaacatgtccagatttaaaggggaaagagacacaacacaatcaagaacatttcattcatgggatgtgagatattaaaattagtaagtttccgaacataacttttcattacaactttttgacttttatttaatgttattcacaccgtcgaaaatgccacgtcattaattttacataaaacaaattaatgattaatgggaaaacaacaaaatagaaacaaattatacagacaagaaatttcattaaatttttttatttgacaataatattcacttttttttttttttgtcatcatcttcttattgatttataaatcagcagtgtagttacaatgtatagcataggttattacattaggaacccataaatgattcagaaataaagattggttttggagaggagctttagcaagaatatcagctggagtattgtgatgtctttttatccaattgaaatggattgattcaaacttccttgaccaccaatgaatgtcccgtatccagttgtgaacgccaaaatgtaccttggatccgttaattaggttaaacagcatcttgttatctccttcaaagcaaacccgtttgtaaccatgactccaacagtgctgcattaaaatgattagcgcttgaatttcactctccagagcactctgctggaactgtcaaggactcggcatagacttgacggttcgacgcctaaaggagataaatcggaaatatctcccggacgtaatttgcctctccgaaacaaaacaacgcaatgactatgtgcgagacacgtgctgtgagttgggttttagtaactttgtaatggtcccatcaatgggtttaagtgggggtttggttgtactttggaagccttctgttcatatttctgtttctttcaattctcctaatcttgtagattgttatgttcaaagtaatgaagtgggttttaacttatcttttgtatatggtcatccaaacccaagtcatcgtaacaatctatgggaacgtcttgaaagattagcagtaaacagaaatggtcaaccatggttcatattaggagacttcaacgagttgctgggaaaccacgagaagataggtggaagaatcagaccagaagcatcttttcgacatctacgacaaatggtgagaacgtgtgattttacggaccttaataatattcactttttttttcgttacgctaacttaaaaagaaagattgtatagtaacgaccaaaatgaattaatgaaaatgataggagtcaataaatagaacaatgatggtataaaatataatactatagtttaatctttctttttttctatttttttagtaacaacaaggtctaaacgaatgtcttaattagagacgaattgtcaataaggaattttgaattgaaaagtaattagagaccgtcaaagatggttaggcggaagaatgcgtgtcgttcattgaccgcaacactcacgtcgcacgccgtgatgtgtggtttataggatttttcaggcctttattcaatccaattaggcccaattcaacacaatttaatctatttagaaaatcattaatataacacgaaacacattattatagcttctttgttctattaatgatttgctgattaactcctagagtcctagtgcagatggaattgaacctacgagaatcatgacctatgagatcatcatagattcataatctagggatcaacatacaaacaaacaaaagacttaacgaaaacttcaggaacacatggatcaagccctagaaaactagtgttcatagatcgattagccatgttttgattattgtctgttatcgatactttaataaataataggaatgttattcgatattttattcaaattcgtatatttttgtaggctctaaacgaatcagctaatttttgccaaaacattctctttcacatgatcattgcaagtaaacaataggaaaaaaggattaatctgattgaacaccttaaatcttataagaaatttgaaatttatactaaaattttcaagtattttgcctccgtaaaactttttttttcttatgaagaagctagaacctatgaataaacacgaaaacacaacaaaaatgactccaagtatattattcatcttgataacatgttaaatacaaatcttagctctcgagatcatggaacaataattaagaaaaaaaactatttgtggtaaatacaaatcttaactctcaagatcaacacaccttgggtgactcctgccatgttagagagcaacggtcaacttgcttagcaattaaccaaatcaacacacttaaaactattaagagtcctccaaatttgaacattttaatttagtacaatctttggtaaacatgtattgaactgttgatcttcctatatcattctttttaatttattttatttttatgaaaatattgttttagtctaatagagtgttctttaaattttgaaacgatagatataagagaaatttactacctttttttatataccaaaattttggattttcttggatcagtcattatttggtcaaacagagtcattatctgccacatttcttttattcttggtcatcctatagtttcgtttatggcaaatcctggggaagtttggttcaacaatcatattattttacgccatcccattggtgccggtggagaacttatgtagctcgatattttccaacatactcgagttgccctagagtgtattcacccggcgatttcattattactctgctaataattttttattttttttcttccaaagttaagtctaattgaattagtttgtaccctttttataatagcgaaggtctactcatattccatctgagaagagttgtaactacttttcaaattccctaaaaatcggatcacaaagaagtttcataattacttcaattattatcttatagattttatttctacttaaaaacacatgtctagaaattaaaacttaatttgattggtcgtttagtattatataaacaaggggggtcacttgaccacagctaaatatcaaaaattgtgttgcatgaaattccatctaagtatccacatcacaattgatagtttccaaggttttgatattccccaaccctgaattcgaatccccaatccccaccacacttttactccatttttctctatttatcctttaaatacatgttttcgggatattactgatcttccacctggaaagaaggcaattggtagtcactggatatttacaatcaggtataagtcgaatggggaaattgagcaggaatgctctcaagagtctctttgcttctcaaaagccgaatcctaatgagaagttgaatggttaaatactttcctttgaacaagtagtgtgtctttctagcttcttaattatatgaaattcctactcaaaatttccaacgatagaatatgttctgcccactctaattttactctatcctccaaaaaaacggctggatatctccttgacacttgtgatcatgattgggaagagttctagttggcataaacaggatcagaaaaaggaaagcttaaattaagcagacaatatggttaaatgagagtaaaaagttgcaacatgtattgtaactatcaaatatctttttttctttctttcacatgaatgctctagtgaggcataatttgccgtgaagcttgcatgtggagatcaggtgaccgcaatacaatttaatgattgttgatagcagagtaatcaatatcagctggaatcaactcttgaaattgcacgaaagaaacaaaacaagaaaactacagtttccttgatgctaataattactaagaacagagggctgccaacaagaagaaataataagagaaaaaacttaatcacagaaacaatataaagctcattccacaacatgtgcaataatataattgatagtttaccacattgacattgcgcaaactgtttaccacagtgacattacacaaaacacttaaaattataatagtaaaatcttacccactctcaccaatctccaaaaaaaaaaaactcttttacaccactagcaaatacttgaaagttcattaaaaccccacaaatctccaatacaaaccctaaatctttttgttttttgtaataaagacaaaccctaaatcttagatgaagagaaaagttcggatgtcgacaggtggcaactcaacggagcaaacagggcatcgaggagtgtgcaacaagtaacgagagatacaagttccgtaaaaaatatgattgcattttgttttatgaacaatctcgtcttctttcggataccctttttgacagagacaacaagattccgaactttggtaacaatctacgatctccgtcgttggtggagcaattggtacaggtctgtacgatcttgaccaaaccctctaatttgaaagtgaaagacgaggacaggacacgcgggaggtacgatatcaagatccttgaatgaaaaattggagacaatatagtcgaagatctgattacttatgttggactcgcgttgcatcatgaaagaccaaccgaccaaatctacgaatgctttggacaatccagcttttgaacctcttcctcgtccttgtcctgtgtatcgcgtcaatcgaaaccgttcacatgtgtgccaaccattagtacctccataacttactaatacaacaccgacatcagactcacaaggcacatcaaacttgtaaagcctgagattaccgagaagagatttcataattactctccttattgttttttttttttcttttgttcaaactatacaagtctaattgactctttttgtgcccttttataataatagccatgcctaagtttaattactttcctaaagaataataattatatataatagtataataaatcattgtagctattattataaataaagtatatacaagtaataaatttattatttgtttatcttttaattcaattagattaatcacaaaaagtaaaactaaaaagtgttgatatagaatgaattgcttgtctcttggattgatgattctatcaactaaattatgaccagcatatataatataccaatctaagtgacaaaaattaattcttatgtattacatttgtcacagatttttttatactattattttacatttgtcaacaaaataaaaagtgttgagattttttttttcacagtttttttttgtgtttaagattatttaagtgtcttacaattaataaaattattgaccactgacacggtttaaataaatatgacaaggcatgtgtcaaaagtttgttttcccataaattacttgcggagaaggaaatacactttgaaacggaaaaatagaaaagtaaaggcaaaaaaaaagaaaaggaaataacaaaaaagaaataaatatttggggtatttgcctaaattcattcataagttaaacctaatttctcctcttatttaaaccaaacgcctctcttaagaaatctcccaatatcttcctttgtcaatctcttgagagtttttgcttcctcgtcttcttcgattcatcaaacaggtatttttatttctccagatccgtagtcgtatttacgaattttgctttattctttgagatttgctcttgttgtgatttgtttgatttgattatatgatttgagctaacgattgaaatttcgtaacgatgaattttcgcaagtctgtgttgcgtttaggattcgtgaatcttatagattgattaggttttcacatataatcggaaatttgtacctgtttatgtgtatttgtaacgttaatggtgattgaatcagtttttttgtggtatatcgatatcgttgctgattcctgggttcattgtttgtttctgcagcgtgtgttttttgtttagagttggaagagacgaatcgaattttgaagctttcttttatgtctgacaagatatctccgttttgttgtcaatctggttgcttggaaaacacagtcctacatccagaattaaggactactactagttcctccatcactttagggtctcgcatcttcaaaccggagatccctcctctttctctccacttttttagctaagaagaatggcgctgcagaacattggtgcttccaaccgtaacgatgccttctacaggtacaagatgcctaagatggttaccaaaaccgaaggcaaaggtaatggcattaagaccaacattatcaacaatgttgagattgccaaagccttggctagaccgccttcttatacgaccaagtactttggttgtgagcttggagcgcagtctaagtttgatgagaagactgggacgtcgcttgtgaatggagctcacaacacgtctaagcttgctgggcttttggagaattttattaagaagtttgttcagtgttatggatgtggtaacccggagactgagattattattacgaagacgcagatggtgaatctcaagtgtgctgcttgtgggtttatctctgaggtcgacatgagggataagttgactaatttcattctcaagaacccacctgagcagaagaaggtgtcaaaggataagaaagcaatgaggaaagctgagaaggagaggcttaaagaaggcgagctagctgatgaggagcagagaaagctgaaagctaagaagaaagcattgtctaacggcaaggattctaagacgtctaagaaccattcttctgatgaggatataagcccgaagcatgatgagaatgctctagaggtggatgaggatgaagatgatgatgatggtgtcgagtggcaaactgatacttcccgagaagctgctgagaaaagaatgatggaacagttgagtgctaaaactgccgaaatggtgatgctctctgcaatggaagtagaagagaaaaaggcgcccaaaagcaaatctaacgggaacgttgtgaaaactgagaatcctcctccgcaagagaagaatctcgtgcaggatatgaaagagtatctgaagaaagggtcaccaataagcgcgctcaaaagtttcatctcgtctctctctgaacctcctcaagacatcatggacgcactcttcaatgctctctttgatggtgtgggaaagggattcgccaaagaagtgactaagaagaagaattacttagcggctgctgcaacaatgcaagaggatggatcacagatgcatctgctcaattcgattgggacattctgtggaaagaatggaaacgaagaagctttgaaagaggtggctctggttcttaaagcattgtacgaccaagacatcattgaggaagaggtagtgttggattggtacgaaaagggtctcaccggagctgacaaaagctcgccggtttggaagaatgttaagccttttgtggagtggcttcagagcgctgagtctgagtccgaagaggaggattgagtcacttttttcttccctcctaacttttctttgcggcatttcttataatacttcgtcagttttcagaattcttaaatctttttgctgtgttcttataaagaaacatcatctattaaagttgtcttcgtttggatttggttttgacgactttgggaaatatttatgtttaagaaggtttcattggtcattgacttttatatattatatcgtaaccatgatgtgatagtgggccttagatcaacaaacatgcgaaaaacagaagcagaggcccgtttcaacggagcataataaattgcattctctgtcttttgtttttaggttttttttttaactgatagatgtgccgtcgaaaataatattgatatttaaaaattcacaacaaacattcttaactgacccacccatctatctgctattcccacgcgccaaggaaaataataataatagcgaaattgatttttacatttatttattgatagataatttgtgtattgttaagattaacagattttaagggattaaagtggaaaaggtaaaccgaagacaacttgccatttactgatttacaacaatccaaatttaaaaacaaatggtcccagtttttagggttgtcacttaaatttatcgaaatatttacactttaattgggtaaaacataatggacagaaaaacaaatattgtgacaaacaaaaaaacatgttttcaccaagaaaaacaaaaacaaaaaagatgtaaagcttttcttacatctgtacaaaataaaagcagacgaaattgtactttattttccttattaaattgtcggtatgttttatatgttgtgaaaagtagaatggataaccaaataaaaattactgacatcttaataaagttggttcaaccggtttaaaatgtatttttttagtgttaacaacttaaagcttttttcgattatcgaattgcaacaaacaaatatattaacagaaaaaaggaatcatgtatctatttcaatatcctgttttttttcttccatttggatatttagatctttttctgaatttatcttgttcttaaattaaaacagaaaaaaagattaaaagtaagacagcttgctaatggcaaccgcaacaaacaagataattttgaaacggatccacttggattttctttgattttgtagaaaaattgacaaattgcttttgtataaaaacaaaaaatgtaccgtaaaaacacacacataaaaaataaaaagtgataatgacaaacaaataaagtggtatttttcttttatctactaatgtgattataaaaaaatcgacattgaaaatttcaacacatctttttcgccaaaacctgaaaatggtcttattataacataaattagtttttttgtctttctattatatattcaataactcatcccaacttgaacaaacctatttcaaatttttttgtcttgaataatgataagttccgtagtgttcttttctgttgtgacaaaaaatactagctaacgagggataagcacaaaaacatgattaatgtttctctaatcattctaaaaatctacaggaatattcccttttcagttttttctttcttaaatgcatttcttagttcttcataattcagtgagttttaataacaataataaaaaaaagagcatcattaattgaacctaaaaataatgagaagaaaaaccaaaaagatagagagtaagatgcacgcgctaaagatcgaacggttaatagaatcaggttagtgaagagagatattaaaagtttgttgtcgtgtggcaaaaactataatttccttctcacaaacaaaaaaaataaaatcaaacacaaaatcccgtagcatcgtaacagtaattcgctattatctcctcaccctccgctttcgcttcccttctctgcccgtttcaattccttctaagacatcacggtctctctctataaaaacagtacctacctcttcttcttcttcttcattcgctgacttcgtttacactgaaaacaaatacctatgtcaccgccgtcggcaaccgccggtgacatcaaccaccgtgaagtagacccgacgatctggcgcgcttgtgctggagcctccgtccagatccctgtccttcactctagggtttactactttccacaaggtcacgttgagcactgttgccctctcctctctactcttccttcctccacctcgccggttccatgtatcatcacttcaattcagttgctcgccgatccggtcaccgacgaggtctttgctcaccttattcttcaaccgatgacgcagcagcagtttactccgactaattattcacgattcggcagattcgatggcgatgttgatgataacaacaaggtgactaccttcgccaaaattctcacgccttctgatgctaacaatggaggtggcttctccgttcctcgtttctgtgctgattccgtcttccctctgcttaattttcaaatcgatccaccggttcagaagctctacgtcactgatatccatggagctgtttgggatttcaggcatatctatcgcggtacaccgaggcgtcacttgctaacaacgggatggagtaagttcgtcaatagcaagaagctcatcgctggagattcggtggtgtttatgagaaaatctgcagatgagatgttcatcggcgttaggagaactccgatctcaagcagcgacggaggaagtagctattacggaggagatgagtataacggttactacagtcagagtagcgttgccaaggaagatgatgggagtccgaagaagacgtttaggagatctgggaatggtaagttgactgctgaggctgtgacggatgcgatcaatagagcgtctcagggattaccatttgaggtggtgttttatccggctgctggatggtctgagtttgttgtgagagctgaagatgttgagtcttcaatgtctatgtattggactcctgggactcgagtcaagatggctatggagactgaagattcttctcggatcacatggtttcaaggcatcgtttcctctacttatcaggagaccggtccatggcgtggatctccatggaagcagcttcaggtatatgatgtttttgaaatggtctttgctcttcttatctctataatgttgcgttaatggaacaattcagaatcgatcttgtatctgttgtgtgcaagcctttcatgagtagtttaagtctcatcctggttattcaaatgtcaattgggttttgaatgttgttttgattgctgtgttgttgttttgaaggtaaatattggaaacaggataagttaattcatacgaaaatgaatgttctctctcagattcatcttctataagatggaattgaaactggaagatttggcttagtattgtttgtgttgagcgtccgtgatgtagagttgcttttcattatccttctttggccacgcattgtacattgtgtttgttaaactagagttcctctgattagtcttatgagatactccttttttgccaatatattctacttcctctgattagttcctttgtttttaacttgcgtagatcacatgggatgaacctgagattctgcaaaacgtgaagagggtgaatccatggcaagtggaaattgctgcacatgcaactcaactgcatacccctttccctccagcaaagaggttgaagtatccacaacccggaggagggttcttgagtggagatgatggagaaatcctttatcctcaaagtggactgtctagtgcagcagcacctgatccaagtccttctatgttctcgtattctacatttcctgctggcatgcagggagccaggcaatatgattttgggtctttcaatccaaccggattcattggaggaaatcctccccagctattcaccaataacttcttaagtccgcttcctgatttgggaaaagtgtcgactgagatgatgaactttggcagtccgccatcagataacttatcgcctaatagcaacaccactaatctgtcctctggaaatgacctggttggaaaccgaggccccctttcaaagaaagttaactcgattcagttgtttggcaagatcattaccgtggaggagcattctgagagcggtcctgcagagtctggcttgtgtgaagaggatggcagcaaagagtccagcgacaatgagacacagttgtccttatcacatgctcctccaagcgtgcctaaacattccaacagcaacgcaggttctagctcccaaggtatattccgatctctctcaagtacaataatcaattgaatcagttgctataagcttttattactgttttgcacaaggcaatttctcttcctttcccatgaactatattatgtagagtaggaaacacaatcatgatttctgatatgacttgactgatgatgatacttgtgaaaactatctatatatctcttcagtaatcagtcgccttgaggtaattggaatttggaacttgaacattacttggattttaacttttcaatagcataagctttcctgtttcatcatatatgtttcactatacttggtatgcttttattactgctgatatttactattcctgctattttttttgggtctcgttaacggtaataaggacacagaattggctcttttatccatctgaactagacattactgtacaagtagatgaagaattatgtggttccattacaaatttgatttgcagaaagctt

SEQ ID NO: 1258 - DNA, 69506 bp, Arabidopsis thaliana
aagctttacagaggtgtgaggcaacgtcactggggaaaatgggtggctgagatccgtttgccgagaaatcggactcgtctctggcttgggacttttgacacggcggaggaagctgcgttggcctatgataaggcggcgtacaagctgcgcggcgatttcgcccggcttaacttccctaacctacgtcataacggatctcacatcggaggcgatttcggtgaatataaacctcttcactcctcagtcgacgctaagcttgaagctatttgtaaaagcatggcggagactcagaaacaggacaaatcgacgaaatcatcgaagaaacgtgagaagaaggtttcgtcgccagatctatcggagaaagtgaaggcggaggagaattcggtttcgatcggtggatctccaccggtgacggagtttgaagagtccaccgctggatcttcgccgttgtcggacttgacgttcgctgacccggaggagccgccgcagtggaacgagacgttctcgttggagaagtatccgtcgtacgagatcgattgggattcgattctagcttaggggcaaaataggaaattcagccgcttgcaatggagtttttgtgaaattgcatgactggcccaagagtaattaattaaatatggattagtgttaaatttcgtatgttaatatttgtattatggtttgtattagtctctctgtgtcggtccagcttgcggttttttgtcaggctcgaccatgccacagttttcattttatgtaatctttttttcttttgtcttatgtaatttgtagcttcagtttcttcatctataatgcaattttattatgattatgtaattgacaaggccataacattttgattacgataaaccatgatcatgtttaagaagatgacttaacaaatgtaatctaagaacttgaagattggatttgtagtttggtgaatgaagaatagttaaatgtatcaccaagtagttttttttttttttttttttgacatatgaaaccaattaacaagtcttcacctacctaaattggtattatgatattaacaccttctattacaattctaatgaagcacgtctctttgagagtatcgtcgtcatatgttttaacgttttcgtaatctgtcaatccgtctaaagttttgattcgtcgagataaaatcggaaagtcgatttgatattgattgacaatttatattacctctaaataaatcatgttgtagtcggattgatagaagaatcaagtagtatgtatagtaacgttctagtcataatttacatgtggcagaacgggtttgttccactaaaaaattgttatgttttcaaaatgtttatatatgtggaattttcatctatgaatgtttgtaacgcatttacatgatattactcatttgctaacacgtcaacagtcaacttgttcttcatgttaacatttgttggatctttctcgcacgttctcaactttgttgtataagaaatcattatcaaacatatatatatttcttgtccgttttattatcactaatggtgaaaacttggcgtgttggtggtggatgtggccggccttgccacaacttttcgtgaagcaacttccatcatttatcactttatattcaaacaaatattgaattttgcaataattcgatgtcactgtagtgaagtagaaaaagacaacattgatcgaatcttcttcacacatttttagaaaagtagatatggattttcgccgatacacaaaagatgtgacttaaagaagtaaaagggaaataaaatttttattgtttgttcatgttattttcctaaagatatatttctatctcttataaaattttaaaataatccacaaataccaatatttttatgtttattaaaagtagcaaatagaggagaattccaaattacgcaaaggaagcataaagatggaaagtttgaaaggcacacaacaccaaaggagcccactaaagattatgttcacactccatttctcgtctctttcacatgcatttttcaaccattttttgtataaaagttgttgtattttatgacattgcattgaattcgcaaacacaattattgtccattgtcgtgtaatgttgaataaaagttactattagcctgagtagttgtatccatttttagtaatatccgtctttaatcaattttgatttcaactaggttaaccaacttaccaaaaacatttcaaggattgttgtagacaactttacctatggtccacaaaaggttgggaagtagtccaaggcttctggtcttatgatggcccagggtgattgagaacaaattttgactaggcacgcgcatccagttcgttacgagaccatcacattatgtaagagaaacaagcccaacaacaacatttttaagtggtaatcttgagttaaaagggcactcgtttgtgcaactcttcttcagataattaatcttacaaaaatttcaaaaatgtgggcctttacaaattagcccgtaatataaaattaaaagcccatgtcgtagtagtagaaacaagaaagtatagaacccatagttgtttctatcaactatgaataatacgcagttagtggagaatgggctttttgtgctttatgatatgggctattgtgagtccttcgatggatcattgatagcccgacattccacgtcgcacacttcttctgttgttcgtctctgtcccctctataaccaaaacataaatattgcaattagcaatgaacatagaacacataaacgcctatctatgagaaaaaagtaaattaaagcccccttaatgaacacatcatattaatgtttggtagtactaattatgtaaattcactcaacctaaagctggaagtatttatcgaaagttttgttattaattctatttctatagttttatagaaaaatagtccaaatcatgaaaacactttagcaaattttaaatttaaaatagagtccaaataaacaaaagaatgcactaatatatggactttcataaagtaacttattgaagtatatgtttaagattttgatgttacatcgagagactttggtactaaggatcaaaacttagttggatatgacaaagagcttagtgtgtactgtgaaatggacaaatttatccactaggtactggctaatcaatcgagtatttttcagaatattattaatatatcctcaaagtacaattaccgatcagatactcgcatttaaataagcaaagcaaaaacgttccgttcgtggcatatcatttggtaacctacatttacaacaacaaatattggcaatgtatgatttgtaatttaagtattgaataaatatatatgaaataacatgctctttcctattgcgattcaccttcaagattgtataaaatcatagcacaacagtggaaatagtagttgggacggtaaaagattggttaggacttaggacttttaccaaaaaaaaaaaaaaaaaaaattggttaggacgtgatcatatatcccaaaacgattaattagaagacagaattactacaatgttgcattccggatagttttttgtatggtattgttaagaaagtgtgattcacgtctatatcttatatcctagctaaaataagaattaaacatgttacatattcaggaatgtattggactagctaaatgccattttgatggttgatatcaaattaagtttttgcttaattaattagaaaaacgttaagtgacagaaaatattaaagtgggttagtactgttactcggttcacttaaaaaaaggatcatgtcgtttgattaagttggaaactctattcagacctaactctaatagttaaatacattttttttttttgtcaaaatagataagtatatctttcatcaatttctaccaaactagttacatgtgtcttcacatgactttacactttgttttctaattttctgccatcaaatcaaatagtaaataccacaaaaagataatgtaatatatacaaatttgactaatataaatgttttgaaagtttagttattatataaccgaccactatagtcgcatggcattcatttagctaatacatgcagaatgatagtgaagtcgaagtaggcgtcaaggcacatcaatatgtcaaaccaggaaacattgaaattcagcattggtatacttcatacatatatttcttgtcgttaaccatattgaaaattttctaacttttcttctgaactatgtagctaataacctcatataattttttcagaaagtttttgtaacccactaaaactcttgcaaaagccaattagtttggatcaacaaaccaatatgttgagttgaatgttacatttaatttgtaaagcatgatcttttcgttgcatataaccatcatttttgtgttgatgatttgtttgttctaattcttttgatatatatcgttgcaaattttcatatacttagaatctgctgttctgttcaacaattaagttacacgcaaatattgatacttttaaacaaaaatatcggcacacttgtacaaaagttaatttgcgtacattgttagaatcttgattttgtcatttcttcttcattatatatttttgattaaaatcatctgaataaatatataatccctagttttaatttaatcagtacaaacatcttggaaaagaaagcttcccattacatatatggactatagaaactactcaatacatttcattctattttgttggttcgagtgagtttttaatattgttcatataaataaaatagtacatgatattattgatcgcaccatggcaaaagaaaacaaatgatgatattatttttaaacaatcaaactaacattgaatataacatttggaaagaaagaacactaaaaaaataagctcctttagctcatggggcaagacagttgaaatgtggccctatacttcatcgaaaggactcaaatcttcagttttgtttcatactttttttgttaattagcattgggaatgagccaaatagtaatttacgaaatgatagtattatataaaaattgtaactatcttagatcaattagagaaaatatcaaaacatttctccaacagtgcgttggaaatttgagattttttttttgtcgaaacggaaatttgagccttgaaatcaatattatttatctaagaataaccaaaaaaaacagaactggtatagagtttaatctaatttagttttgaagctggttaataaatgtagacaaataaagtaacattaccacataaagaaccaaattatcagaaaataaaaactgaaaggttgacaaaaagaagacatagcaactaaaaatttggtgcaagtgggcaaataatagatagccacgtaggcatagtgagacggatacacattcacatgttttataaaattaatataaaaattattgtttttgaggagaaaaataacaaaatcatcttacgtttacattaatagttagttctaaccgtaagaatcttaccgttgaatttcaatcacattacgtattttgatttgaatacacaaagtacctcttttcggtgatattcgtataatttaaaaaaaaaccagagatttatattctatgaatttacaatattaaaagttaaaactagtcactctctagatcttattttcctgattcgaatacatttgagttgggatttattagtgaaaagtcgaaaattaaaggcattgatcggtctatagatctctcccaagtctagaaaatttaggcattttaccaaattccttttttttttttcgtttggaccacagagaatcagtctagtagtccattatttacaaacaatcgtgggagctagggactcatctgaggtgaaaacgtttcactactaatctaatgaaactattgtcctttttcgaattgttgtcctccgtatgtaatatattttcttttatctttatggaatgttgctataatagttattattaagtgcttaacggaaaacatagagtgaaaaaaaaaatagtaagttaagagatatagatagcagtaaaagaagaatgtgtatgtataaaacagagcaatactgaatacaaaaatagaattagggagttctagaagagaaaggcccaccgtgcatggatggaccatggccatgccaacaaattttattaaaaaacaaaattcttccttaataagaaagttattcaaggtctctttgtggaatggggacccttaatcaaaatgttaaatctcctaaataaataaattaacttacatttcatagtaattatgttttaaaacaaatggcttagcagtcttcttacatgcatcgtttctgaaaggtattattttcttaccaccattttttattaaaaatattttatgaaatataagcttgggatctaaattctgatgcatctaaataatcatctatatgaaaattgcatcgtgccggagaataaaatttggtatatggaactatttataatgaacttttgggttatggtgattagttcatgaacccaacaatgcctaatttaattagcttttctctaaccgccgccaaatataaagatacttctaaataattaagcaaacaataaattaaccacaaccacacattgtcttaattaacagcacgaaaatgattagaaacttccactcatgtgtttatgactgtgtttatatttgtacaaattagtaaaatacaatgaatatgagctaatgcagcttaatttaagaaatttaaaataataaataccaaagtggttgtccccgtcggaacaagaaatctaaagggtttctaatttcgtgccctttgtggactctcaagtaacgaaagtcaagaatgttgacccatctggtctgtgtttagttatgaaatcatattcaaataccaattagacttaatttatttagacaagttaagaaaaaaagcaggacaactaaccgtcgtgaatagtagtattaattaattcgaaattaaactacagatataaataaagagtgaagccgtacgtataatacgcccaagtgcatgcaatgaaaagaaacaacgaaaaagaaaagtgatacacgtaggatttgcgtacgaattttatcattacaaaactaaagagagtttatagctactagtttcgactgaaataccacaaactgttagatagatttaggtgcaatcgtttttgctcctgtgggcgtttcgctctgtttctttgtattttcctattaaagtgcccaaaacaagaattgatacgtcctctaatttggtaaaccaatggatctctgtgctatggctatagctaatgcatgtgatcgttagaccgacaaacgatatttataactcaattcttcataggcccatagtcatatccttagccacagtattcgaactacagaaatttctctaccccatctctattgaaataacacatatatacagataacacgtttataactgcataagtgtatttcaaatgcagatactcttttaagaggacaaatatataaagaatatatattggagtgggcaccgagcggttaaaatctaaaatataagtttctgaatatgcctgctatgtatttcggtgaaattttaccttttcttgattcctaatcttacgaataggaaccgaatatatatcattttccgagatcatgtagagatatgatttttgatcaaattccttaatatattaatacgttgatgtgtatcctaagaatgtcgaataatcctcaaatctcaaggttaagtgattagaaaatattaaaaacattccacgccgtaacacttggtaaattcaataaatatacaaatcatattaagacgaccaatccaacagttttttttttttttttttttttttttttgttgttgttgtaaaactaccattccaacaaattcattttaacataagcctgcctaacctttgagctttgatctactcccttttttttggtgtctaacctttgatacagccgtaacattaattagctgactatttaagctaaatcaatacactgtctatttttagtttaaaacgacacttaaataacactaatttaaaagcaaataaccattcttaacatagcttggatgattaaaaaaacaatctgattcttaaataaaaaggatcttatttcgtgtgattaccaaaaaacaaagtcttctttcttgtgccatcaaaagctacgctcgtatctcatgctacttaattaaaaatatagaccaattatgaaaagattaaacgcattattataaaatcagatagtgcggttcataatctttcaacatggatgaaattaattttactttttccgctaaggttcgagtttaacacatgtctgtctactccaacgaactttttttttttttttttttttctgtatatatggttttaaccgattgactccttataacatttttttttccgatgttctaaatttccattattgtactctatacatttcatttacattgagacatcagacacgtagaaaaaacatgcttaaaaacctaaataactaattttccaaggatccaatggagagtgaaaataaaaagagagaaagagaggcataatgtggccaaaaaggtacagagggagccaccaatgatagatgaagttttttcctatttcttttgtcttctcttccttcttcttataaattcctctactcctccttcaccatttcctcctcctcaccttctctctctcaacatctctctctttctctgtcttctctctgtctcaacgagaatatgactaaccagaatgtcatcgtttccgacaggaaacccatcttgggtttgaaaaccatcactgtctctgtctctaactctcctctgttctctaattcctttcccacttactttaacttccctcgtcgaaagctcttgaaacttcttgaagcagccgacaaaaacaacttagttgttgctccaaagattacgtctatgatcgattccatgcgtgattcttcccctacacgtctcagatcctcttcctatgactctgtttcagataacgacgacaaaacatcttggatcgtacgttaaatattcgtaccttaaatctaaattaattaacccttttcaagattttggaatctgatcatatatgtcttgttttgtttaggttcgttttccttcggctttaaatatgtttgatgagattgtgaatgctgcgaaagggaaacagattgtcatgtttcttgattacgacggaactctttctcccatagttgaagatcccgacaaagctttcataacccatgaggtttttattctcttcctacaaaatatctttttgtggttaatttatttattaattatttttgttattagatttaataatgtatttttttcttacagatgagagaagtcgtaaaagacgtggcttcgaatttcccgactgctattgtcaccgggagatccattgagaaggtacattacatttttaccaaatattgactattttctatataacagatcatttaatttacatattaatggtaaagacgatatataacgtacgagtatgtttttgttataggttcgtagttttgtccaagtaaacgagatttactacgccggaagccacggcatggacattgaaggtccgaccaacgaaaatagtaacggccaggtgaggacacaatgcagaaaatcgacacaccacaaattttcttattttatttctaaaagttttttttttttttgttgttgtaatgaccacagagtaatgaaagagtgctattccaacctgctcgtgaatttttaccgatgatcgagaaggtacattttgagatcttttaacataacaaaacgaattacgtacacgaggtaaaacagtaaaaaaagtatatttaactttgtcggatataaataatttcaggtggttaatattttagaggaaaaaacaaaatggatccctggggctatggtggagaacaacaagttttgtctgtccgtacattttcgacgtgttgatgagaaggtaagaacaaaactgatgatgacaaagaaactttctcttacttgtaaaaattaagtggtccaaattattatttttgtttcttaacccaaagtacttaagaaccttacaagactttttccttgaaacgaagtattttttggtaatgtgacacctaagtttcaaataaagattattcgatatttcatttttccgcactaatcacaaagcaaaacatgcactagtgttatttttcgtattgatcatgatgttaatgtgaccgtttaccatattactcatatttatcagcaatgactcgtttcatttagtaaacaaattatttatttacatgtttctttgtaacagagatggcctgcattagctgaagtagtaaaatcagttcttattgattatccaaagctgaaactaacccaaggtagaaaggtaaaattaatcttaatctccctctttttactagtcactaggctaattaagtatttattacatctttatttaatctatttcatttataaaatcaggtacttgaaatccgccccacaatcaaatgggacaagggccaggcactcaattttttactaaaatcattaggtgagagagcccctcataaatcttatttatttttcatttcgatatgagaatttaaagatctcaagttctcatatcatttatcgactaattaaaataggatatgaaaattcggatgatgttgtgccggtgtatatcggggatgaccgtactgacgaagatgcgtttaaggtatagtgacacttaacttatacgtattcgtaacatcagttaattaagtctttttacattttgaacaatttgattctattactgacgtaataaatgaactgtgtaattcgataggttttacgtgaaaggggacaaggttttgggattcttgtctcaaaagtaccaaaggacaccaatgcctcttattctcttcaagacccttctcaggtaaattaaatcttactcttctataaataatttgaagtttattgttaattaatttattaaattggaaaccattttattgtacaggttaacaagtttctggaacgtttagtagaatggaagaggaagacagtgggagaagagtgaaagacatgcaacataattacacaaataacacctgagttttgagtagattattaatttatataaacaccctttttaaattagtagatgcctggagggtgtttcggccagaagtttttcttttaatctacatcgaaccgaaaattgtaaatttcgtgtaacgatttagaaatggaaaaatatattaataatttactcattcttatttgacctttcctttgttcactttcttgttgtacattttttctttcttttataactttcatggtttaattactgaatatgggatgatttttttgatactggaaaagttttaaaatgtactgttgtaaacgaataaatcaaacagaggaatatgcttgtagtattgttactatttttctattattataattagtatatactacctttaacaaaacattaataagaaagagtagacattaatgtcagttgttacagatgttaagactgtgcgtaatacgtgtttataatcactagtagtaaatagatggtcgcatgcatcagtatactttatgaatatccagcaaaatcacccattaaataactagcaaattgtcactgatctttttgtccaacataccatttttggttttctttgtgagattcgagaaactacgtaaaatcacatgaatacatatgtatgtatttaagtactacatatataagtatgattaaaatgaaagtgttagttgtataaaagttttaaatagtttttaactgagtcacaaaaaaaaaatcttttaacacaaaaggtattaaaaaggactgcctataggaggccccctcaagtatattgttttaactgggttccacccaaattcttagtctctttttatttctccctaatcaacttaaattcttctcaattccacctaatatatataatcccacgtaattaaccaacattaatcaagctgctaaaatgcgatttaaaatcataaaatcacgttttaaaattaattagcctcgattaaaccgataatcctaccataatctattaacccaaattgaagccactgtatgagaaagaggtttcaaattttcttcttaaaacccaaaacaaaatcaatttaggcattagacacacaaaaaaaaaaaacaatttggggaaaaactttattagggtcgcactcgcatattcttcttcttccttgcgactttttttttttctttggtgtgaaccctgcaactctattactcgaacatcaaattcgattttctttgattcttcttcttattcttcgtcttgtggtggtgcttcgtcgtgtggtggtgcttggaatcttggtttgatcgaatctgaaacgtaaattggttggagtctcataatttccacaaagatgtcgtaagtgtttgttattgattttgtattaattttatcttgttcggaattgtatgtatttgtttggattagttgatatttgagagtgataagtagatgtttgacgatgatgttgatatgttttacaaatatagtgacggtgatgtcgagtacaatgggggtaacgaatcagagagtgaagagcggattgaagaagaaattgttagaaggaagaagaatacgaagaagaataagaaagagaagaagaaaaaggatgaagaagatcctcttgagcgttttgactttgaagtagatgatggagtagcaaatttcgaagacgagataccgataggccgagatataattcccgagagctcagatgaagacgaggatcctattttggtgagggatagaagaatcagaagggctatgggtgataagtttgtgattggaagtacattcttcacagggattgagttcaaagaagctattttagaggtgacattaaagcacgggcataatgttgttcaagatagatgggaaaaggagaagatttcattcaagtgtggtatgagcgggaaatgtaaatggagagtgtattgttcatatgatccagataggcaactgtttgtggttaagacatcatgcacgtggcatagttgctcacctaatgggaaatgtcagatcttgaagagtcctgtaattgctaggttgtttttggacaagctgaggctaaatgaaaagtttatgcctatggatattcaggaatatatcaaagagcgttggaaaatggtgtctacaatcccacaatgccaaagaggtagacttcttgccctcaaaatgcttaaaaaggagtatgaggaacaatttgctcatatccggggatatgttgaagaaattcattctcaaaacccagggtctgttgccttcattgatacatatcgaaatgaaaaaggtgaagatgtgttcaataggttttatgtatgttttaatatacttagaacacaatgggctggatcttgtagacctattataggactagatggtacatttttgaaagttgttgtgaaaggagttctattgactgcagttggtcacgatccaaacaatcaaatctatccaattgcttgggctgtggtacaatctgagaatgccgagaactggttgtggtttgtccagcaaataaaaaaggacttgaacctagaggatggcagtcggtttgtcattctatcagatcgctcaaaggtaagaatctcatctcattccctttgtatattggtatgtaacgaagttctcattatgtttttcaaattgtttaacagggtcttctgagtgctgttaaacaagaattgccaaatgctgaacatagaatgtgtgtgaagcatattgtagagaatctaaagaagaaccatgccaagaaggatatgctaaagacattagtctggaaattggcttggagttacaatgagaaggagtatgggaagaatctcaataacttgagatgctatgatgaagcattgtacaatgatgtcttgaatgaggaaccacatacttggtcaaggtgtttctataagctcggtagttgttgtgaggatgttgacaacaatgctaccgagtcattcaactcaaccatcaccaaagcaagagcgaagtcattaattccaatgctagaaacaataaggaggcaaggaatgactcggattgttaagaggaacaagaaatcattgcgccatgaaggtagatttactaaatatgctttaaagatgcttgcattagagaagacagatgcagatagaagtaaggtatatcgttgcacacatggcgtttttgaggtatatatagatgggaatggtcatagagtggatataccaaaaacacaatgttcatgtgggaagtggcaaataagtggtataccttgtgagcatgcttatggtgctatgatagaggctggtttggatgctgagaattacatatccgagttcttctcgacagatctgtggagagacagctatgagacagccaccatgccattaaggggacctaagtattggttgaattctagttacgggttggtaaccgcaccaccagaacctattttgcctggaagaaagaaagaaaaatctaaaaaagggaagtttgcaaggatcaaagggaagaatgagtcgccaaagaagaaaaaaagaaagaaaaatgaagttgaaaagcttggaaaaaaaggtaaaatcatacattgcaagagctgtggtgaagctgggcataacgcattaggatgtaaaaaattccctaaagagaaggtaccgagaaagagaaagtcaaagaatgatggcaatgatgaggtatgtttctgttgtatagtatctttcttcacattctctgtatcttagtatctttacttgcttactcagattgaaaagaaggctaagaaggctaagaatgataagaaggatacagatgagaagaactctaagaaggagaagaagtctaagaaggagactcacatgccggatacaatctttatcacacaaccttctcaagcaacacaagagtagtttatatgttatgcttttcgagaaatggcatttgaatgtgttgtcatgttttttggagttactttaatgttaacaatattattgacgaattggatgtgttttggttctagactaatgatgatgttggttattttggactaattggcttgtctctgattcttactattatggtatccttctctttcattcagattttatttttttccgtgacaaaggttttataacagaacaacaatgctactaatgatgtgtttttagaagaaaatttgaagcctctttctcatacagtggcttcaatttgggttaatagattatggtaggattatcggtttaatcgaggctaattaattttaaaacgtgattttatgattttaaatcgcattttagcagcttgattaatgttggttaattacgtgggattatatatattaggtggaattgagaagaatttaagttgattagagggaaataaaaagaggctaagagtttgggtagaacccagttgaaacaatatacttgagggggcctcctataggcagccctattaaaaatgagtgaaagtactgttttgcagtgaaggaaaagctctcattgtctgcttatttatatactaaaaagcaaaatgaaataatacgattttggacagtctgaaggaaacacttccgcaaacccaagaaattcaatcccaaataatatcttagaactctttcttttctcacacccacttggaggattacctgctattatatttcagtttttatttatttatttatgttcttcaccatagagttaaacttaaggaaacttcttaaaccgtattatatatatatatatatgtgtgtgtgtgtggacacctaagattcgaacaagtataatatatctaatcttgatcgttccgaaatttttcaacacataaactccttctgcagtgaacaagctttaaacaacttctgcgtcttataaaggcaaaatgttactatcatttgcaggccataaatacaagaaatagattactaatcatttcagaataaacaaggtttttatcaaaaaaaaaaaaaaaaaaaaaactgaagaagaagaagacaaggcaactagcatttatttgtggccatttcatgtcacaaggcttaacttcctaaaagaagttcgaattattggaagaataaaggatactgtagggtgatcatattattgacaatctttatccatatatagaaacttaaagtttattaatagacaaaggaaaattgaagaaagctataatttcccagcaaagtgaatatttattgtatccaattttgtgtggggtttcaaattatactttcctattctctttccaagaatttcgttattcattatgattaactacataccgtaaataatatctaaagatgaattaccgtaaattggtcagttagcctttatccaaaacttttagatgaaactatttacatgttactcgcgcgaacttcacaatgtcataagaagtaaattattaaagatctctatataaatttttagttaagaatcaactattattattatgccaagcagggagatgaaaacataagctacaagttgcatgcagatcaagaacatgcaaattactgagacatattttgtttagtagtaacttttgttataaattaatagtctccagatatctgagacagctcaactgctaaagtcctaaactttttaagcaacactaattttaaatattgtgcatgatcataactatattgagtaatctatgataaagaaatacacactatcaataaagataagaaaaaattaacattagatgatagatctaacctgcatagtgctaagcaatcgaaggtatagttcaacaagtgggaaataataagagttaagtgctaagcaatcgaaggtatagttcaacaagtgggaaataataagagttaagtgcatgcgattattgacaatacttctctgaattggtctatccttttgtttctgttaatggcttattcgatctttgattcatcatgtgcattcgtttaccgacaaatacttctgaactggtttatcttaaatgtttttaatgggtattcgagttatccctttttaagtgacagccaattattataatatattttcatgctgccataagttattataccatcaaagaaatacatcaaaactatatgaagatatatatatatatatatatatatacaaagtacatcctagattttataatgacaaactgacattgttaaataagttggtgttctagacttatgaattcagatgtataacgttttcgatttttagtaggacaatgttcgcagtagattttaacaaatttagataatatagatatatttgttatatagaaaataaaaggcaacggaggaatcttgttaaagtgaggtctctttaattttgtctatgaaatgaacttttcattatttaaacgaaaagactatttatcatattctaatatatgctaatgaatagtgagttattttttcgaatggtaggtggtgaaaaggaaagccgcgataaagtaacactacttaggttgaatgaggagttggaatccacttaaagtggttcgaattaatgaaaataaacatataaaagacttatatatataatatatcctattattattttacactaatcctttcctttcaatatcttagatatatttggacttcaagtggggcaaccaacatgcttccattccacgagaagacatgactcgatacgtgtaaagaaactaaagccgttaagtgtgtgtgtatcttcacttatatttaccacattaatttcttattcagatattatctaaagaagaaaccacatcattgatggcccgacttggatggaaaaaaaaaaaaaactaagtacgatttcctccaattattgggatcaactctatttgctacttaattttaatggtagcttctactacctatttttttttatactatgagtttcaatttatattgctaaccagacacagatagatcaaatctctcaaactttagttgcacacctagcttagaatacaatatattttgtattgaagtaaaaataatgtttcattttgtatttataaaagggaatacattttgtataacaactttttggtttcagccaaataatcatttgatgacgtggtttcatgaaacattttgtgaaagatctattcatcccgatattgatgggacgctccctatagcaaataagatacattgtataaacaaataaaatcataagttgtgctaaagactcgatattcatgaatagatgctctggatggtgacaaataaatagaaaataaggagatatatgtatgattaaggaaatacagaagaaattaaagaaaaaaaagagagaaaacataatagtttgtttttctatatgacagctatcaatgagtcactaatctattcacatgaacaatggggttcatgtgttattctttggatccgtgccccaaattaacaactagtattatgatagttcattttttaagaccaattgaaatcttcaaatcctaaaatatcccaacaatagttgagagtcttgagaccgatctaaatatatctaatactatatgtaaaaatatttaaatgtctataagattactttttagttgttttgggtactttcaaatgttaagaatctaataaatttataagtgtgtcttgttgcctaaatcattctacttggagcagtgacaaactgacaaacagattccttgtttgatgtatcacttaattaaaaccaaccatataatagttgttaatttgtaatctatattccttaactacagcttaaatggttaaaccccatcatgtgaaagctataaggaaccaattaaagcatcttaaaaaggtaacggggaccattaatcagattctcattatcaattaattacgattagtgaggcaataatacaggttttaagcacacacgtgtcaccataatggtcccatcctcattcttctctatttgcttctcccatgttgtagggtttaggcttcgagaaaatttgtgtactaaacattaattttaagttagaagtaaaagattaaactttgattggatgattaagatttcagaccatgtgttttagtgatcttatactagggagcagatttagtttcgtcccaataattacccgctttcaggttttaaaacgttagaaactaatcttaaactttgggtaggggtacttattgcactatttttataatcttagcttattgcaagttattggacaaaggataataataaacaacgtttgtttatagaagctagagttatagggttagttgcttagatcggataaatgattctactgattattattgttaattctagtactcaatataggttcttagattccaactaacaatgtagattaaagtgttttttatacatgaataagtaatagttaatggcgtaacgaatattttataatgttgcatttgaatattactgcaagttgagtgtaaccagtaaccaccaaggaaaaactcgttccatctttctctgatatttcattttcataaattgtatcttatctttgttttcatacaatttttatggcatgcgttatcaaaacgaaaaataatagacactaacttaccaccaaaaaaaaaaaaaaaaaaaaacttgtaaaatcaggccttaagtttattaaacaggcctcgtataattcaatggcccaaacaaatcatcaatattggtattacagatgggctgtgaaacgattcgaccatatcccaatggtataaaataactgtattattaacgggcctaagagtccaaagagttgggagcccaaaagagaaattgaaaaaacgaatgctaatagaaaacgccaattattaatttccggcccagaccagacaatgttgggctaatcaatattaggcccaatagtgttgatctgctgccactaattagagcctaactacaccgttatttccaactggcgactttgataagtttaattatttttcagatttattttaaattattttagcttagctgtgcctgtgcgtgtcgaataaaaaaaattcaataatcaaatactctctcgcaaatgaatgatgatacacaataaaccaatgattaagatatttttatatctattgtttagtgagtcgttgtcacggttgagttgtccacttgtcccccaaattttaaattagaataagcgctatcaactttctttaaattattgatctctcggcttagtaaaatactaaaatgggagaagattttttaattttattttattttttaattgagaggaaactattctatcaagtaaattggatataatttcagtagctttctccttttttacaatgaaatcattataaataaaaaaatatgtttatatacacaatgtcgtaattttcatagcacagcaccattggcttaaccaattaagaatttagattcaacaaaacctttgatttaaaattcaatgaaaagaatctctgatatttcatttccacaggttgatactctcatagttgtcttagagcatggacaatgtatacattaaagctgaaattattcatagatttgggaagacagtgtcaagttgcctgtgacagacaataaatcaacaaagacaaaaataggcaaaaaaaaagagacaaaaataagtgttggaaattgaaccgtaccttttgttatcttctccgagaaagatgtgtttttggcaatcgcgtaaactttggaagatggcatttttttccgtgccaataaatatttctcattgattctcttcttttttttgtcaaataaatgtttttttttttaactctttcagctacaaattactgcatttgttacggaaagaaaaaaatcaacaaggaacaatgaatcacaacgattttcaagtgtttaaactttgaatcggaattttcaacacacgtgcattaatgacttaaactcagttttgcattgatcattaaccaactgaattgtcaaaagaagttaaatatatgaataaatgtctaaacaaaggagtgtaatctacattgacaacgtttaatgccttgttaatttgagtgtataattcaaccatagaaatagatagctttaaaagcattaccacacaactaacactattcttttattatgacgttattatcataatatataactcaatgagtaaggactcgtgagtaagacatttctactcagccactagatcatgcgtatgatgaatggatctccatggaaggacgtgtgacaagatatgccacaacaactcccaaatccatgcattatctcagaagacaaaaagtgcattaatacaacctgtcccaacttaatctcatcaccatcactcgagctttacatattcaattattcaaataaaataaagaaaggataaaatcgatttgaaaaataatggtaagatagagaaaactaatattgatgttctaaaaccaaattgttgccttaaactaacaaaaatagatatgattaataataaggtcagaatgaacctagacatacacatatggggaaatcgtaatgttttaaagagtcttaagatttcggtttagtgaatgtctgactaattctcaccaattatttatctcgcgctttcgtgtgtagaataaaaataacctatatgtcaggaatgatttagcgacgacttcggcttctaatgtaaagtctctcctgaacatcatcttggattcacgaataaattcataagacagttgtttttctctcaaataaacagagagacaaaaacaagtacaatacagtgttttttgtttgttcccttatcacgatgatacatcaatgctaaagcagagggagatggagagtgccgccttaagggtttgcttgaagctgtgatttccgtacaaatacaacgggagtgtacgaacgaacgatatacagtactgatcctcgtgaacactacttattatatgttgtaaaagaactaaggtttcgattggttgttcgttctcatgcatatctatttttacaaaataaccacttttaaacattttagtataagattttgatgaacactaaacataaaagttagacgtagataatcggagagcatcaacacttgtagtatgttggaactaaaacttgatacttttgagttttaagttttaggtcgttacttgaccaaaatcactttattaggtaacaccatttaatctcttattatatttatattatatcgattcactatcagttattagattgaattatttcaaacaaatatttatgttcacaaaattttcaaaaagtttatttaaagctatggtctgtgtccatccaattcattttttgtatttaatcaattatttcccgtccggtatggaccgtgatgatttaataaaaatacgttaaagcagcttggaccgttgattaaggacgatgtcgccggatagagagcatcacaatcgttgatgtctccttattaattatcaaaccaccaatacaatattcgaaaaagccgtacttaatgttctttatttattaaaatatcattataccgacggcaattatggtcctacatgccggttattagaaatctctcgtttctcgtttccttatttaaagtcgcaaaaactctctctacacagctcataacagaaagaagaaacacaaagtgagacagaactctctaattagtcccgaaggtttcaaaagggtattttggtaaaatcgaaagagaatcatggacgcttttgatgcgattccagatcctgtggtcatcgacattttgaacagagtcggtgacgtcaaaacgttaatacgatgtcgttccgtttctaaacgattcaactcgttagccactcagtctgagtcgctccttctccaactcgatcagatcctcggagccaccgaatctgactccgagatcgattctcctatcgctagcttcttccgatctctcttcaaatccattcacggtctccttcctcctatcttctccaaaccagctaactctgacgaaatcctaacccgatctccgaaaactccggctcagattctctccggatttgaacggatccggaatctggaggtggaattatacggtggtgatgtcaagcttgagaaaggcgccgccgttaagtggaaggctgagttcgggaaaactctcaagagctgcgtcatcgtcgctttccgttccgcgacggttaatacttcagcagctacggaagctgccgccgtcgtcgacggtgttgttgagtcagattcggagtttgtttgtggattgaagacgcgcgtggtgtggacgatcagcgcgttgatggcggcttccacgcgtcattacttgatgagagatttggtgaaagatcacaaggagatggagaaattgattgtgcgtgacagtgatggtgaaggtacggtggtgatggacgcggcggggatgaaagaatacagagagacggaggtgcgtggggataataaagaatcagagcgcgtgggggaacgaactgtggtacctagcgtgaggatgagtatgagacacgcgccgtcgctgatgctgaagagcgggatttgtctcgaagcagcgacgctggtggtcgtaaggccgactggtgtggcttccgatgataacgatgttgagctggtgacggaggcgttcgccggagatggcgacgattgtatgtacggagaagctgttacggcgttgcttaagcgtaggagaaatgtgttagagatgaattctttctaaggcctagtgggctttttttgggcttccgtttgtttggccctttttaatgtatatacatacgcatcgtacaaagccaactgtactattggcgtacgacttttgggtcaaatgacatcaaatccgaattattcctctaatatcatatgattaccacattaaatgcgttgcagcatctaatattatacatagatatgattcgaaagaataaattaatagcaataatttatgaatttaatactatctgtctatctcccagatctaattattgtggattaaaaaatatgggctaatgtaaaataattcctaacacatatttttgttattgcttattataaggtggatatcatggaataaaaggaatttgcaaatttcaagcctattggatccgattttaagcccatcaaggcccgctaaaatcagtcaactttcagtttatgagctatatagttcgacatttcaatgtctttcttgaacgaataaaactctgtaacttaattgatctgatttcattatgaagtacgaccagattgtttaatattccattgagtggtgtcatcactatcacgatcaaaaaggatgttattgattaggtcactaataattttttttaacattaatataaatttgcaaaaggcgatagagtgcggagaaagaaagtaattaaggtgttagtttcattaaaccataaagtaatctccaattagaaaacaaaacaaaaaaaggtggtcctagcttacaatttaatgacaaatatttgtgctttaaatcatataaaacagaatatcttaaatatgtaaacttgattagagagtgaaacccaaccatatgtagcctatatgtatgactgatgatgcttcaaacaaaaactttgattactagttgaaagtgttaggcaatacaaacttctaaggcttctttttgccacattttatcatggttttatttttcttcataattaagcatacgtctacgacgtacttatataaagtttatctataatcaaatatgtatgtttcattgtgattcgagaagacctaagtttgttaaacaaagtgaacaaaatgtgaattgcctaacttttttcgagtgagtctctttgtgcaaaaggcctacccacatgatctatcaatattgtcgctctcgttcacaaggattggggtacaactaaatcaaacagtatcttcaatcaacataaatttaactttatgaaaattgattaaaaagatgatatcttcctttttctataattgtttcataaattgaaattgttacttaactgttaaatataaagttttcgtagtgcttaaggcctaccatcaaatgttgatgcaacttatcatgataagacatacctaacttttagtttttccatcctttaatatttggggtctgatggtttatttttcttttaagtaattttgaaatgcatatttatcattccaacagttctaaactgtacctgtttaaagagagatgaacgcaattagcgcaccattagtaaatttacccgtttcacgtgaattaaagtgaaaaatacgagtttcataattacaaattcggtgaatgtcaaaaggcaattttgccaaaactgttgtttaatatcaaagttagttaaagattcactaattaaagattcaaaacgtccatgttatacatattttagctttttttttttttttttttgttgttgttaaagtttacatgttttggttcggatgggggaattaacggttaaagcaagggtttcatgaaaattgctgaaactgtagaatagagagaaatgaaactgtctgaagtggaaacacaactttttgtttggctggttttcagaacatttttctctgcaatgatgtttttccattgtgaaacaatcatatcaaacaattcatgcttcatgtcacaataatactttcacaatacactattccagtacttgctcacatcattcacatccctaaatcgtttgaactcgagtttcattgtcattagatgctatataagtatatagtttggtgatatagttagaaggtagttaaatcgtaagatggcaactgaatatggatgattgtatggttgaagataacaacaacaaaaggaaatgtgaccacacagcttgtgagtaccattggtttaagaaacaagcctcgtgcccttccaatcttttcctttttcttctttataccattgtctttcctttttctatcttatattagtattatcaatttatattgaatttgcaaaagtaaagcccacgaaacctttccaactttaatctattgagcaattcgactataacccatcatcacccttgtcacattcacatgttattctcttttaattatcgaaaaaaatgtaagaactacaccaatacttttaatttttggtaatcgagttttatagataatagacgttaactaacacctattttactttgagttctcatggacttcagagatggtgcttgaatacattcaaacacatcataaatctcaaactaaaaataattaacttatgtaagaatctattcaaaaacatgaacaaagaagtggtgacgaccattgaaagttgaaagtgaatgattcagtcaagaagcttcttgtttacgatcaaataaagttgtaatgaacccacttcgcttctttgaccccatcacttcttcttcatatttatccatcaatttttcacaaacatttttaatagcaacattttactaaaagaaaaacatttggcaaagatgcaccaccgatttttattttatttttcactttttgaaaaaagaggttagtgaaaaagaaagttttttttttccacgcaaaagcaaaaagcatgtaaagctgtcacaacacaggaatatcaaagcctgaaaaaaagaagaagaattttataaatccaaacataaaaagctgaacccttccatcgatccaaaaaccaaacaccaagaaaacaaaagcagacttaaaagaagctatgatcaaaggaaacaatggaaacagaggatcttcttcttctggttactctgcagatttgttggtttgtttcccttcaagaacccacttagctctgactcctaagcccatttgtagcccatctcgtccctcagactcttccactaaccgtcgtcctcaccaccgtcgccagctcagtaaactctccggcggcggtggaggaggacacggtagtcctgttttgtgggctaaacaagcaagtagtaagaatatgggaggtgacgaaatagcagaaccaacttctcctaaagtaacttgcgcaggtcagatcaaagtccggccaagtaaatgcggagggagaggaaagaactggcaatcggtgatggaagagattgagaggatacatgataatagatcgcaaagcaagttttttgggttgaagaaagatgtgatgggtttcttgacttgtcttagaaacatcaaattcgatttcaggtgttttggtgatttccgacatgctgatgtcactagcgacgacgatgaggaagaagatgatgatgatgatgaggaagaagaggtagtggaaggagaagaagaagagaattcaaagactgttttctctaaatggtttatggttttacaagaggaacagaacaacaaagatgacgacaagaacaacaacaagtgtgatgagaaacgcgatcttgaagacacagagacagaaccagcggttccgccgccaaacgcgcttttgttgatgcggtgtagatcagctccagcgaagagttggttagaagagagaatgaaagtaaaaacagagcaagaaaagagagaagaacaaaaagaggaaaaagaaacagaggatcaagaaacgagtatgaagacaaagaagaaggatttgagatcattaatggaagaagagaagatggaattggtgttgatgagatacgatactgagttttacagactctcttcagacatagctaaggaaacttgggttgtcggaggaattcaagatcctctgtctcggagtcgaagctggaaaaattgattacacagattcatcgttactcatcagtaaacatcgtattttaaaaacctaatcaagcgtttttactataatttgattatctgttaattaattttgatacttacatttttttttttttgggtttcttgagttttttttaatggttcttctcccttttgtttcgtatctcaaaggtttttttttgtttaccttctttgttttgtgtttttcatcacaacgtttgtaatgtaatgcaaaatatgtacaggctttttacgttttacgcaaatctgcttaatagatcatttttttttgtatttcatgtttgatcatacgttttgtgcatgtagaataaaatttcagatgggatgaaacatttcaatttgcacaattgcaccatgtataatttgtcatttcatgtgttcaataatacttaacttagactagaggattcactgccaatctccatatatagcagcacgcttggtctcttttcacttttcttgcccttcttgaaagagacacaatcaacaaagaaccaatatataaccgaattgaaggttacattctttgaacacggcaagcaataacaggcaagttagctcttttcttcctaataatagtatccaagaataagcgacatcagccaacaatgtatgagttttctcaatattatagagaagtacatcacgatcagtcagaagacatataatagatgaatgatcacaagaaacaaacctaggatcgttgtcatttgtcaaatgtccatgaacaaagtttcgtcggtcttctttttagcattggagttttgagaccatgacttgttatctagtgatttgtgcaagtacatggctttgttaccactcgaattcaagcttgcatattacatgtttagagtttatggttttcgcaatatgacaaaaaaaaaaaaaaattgggtttaaaaaaagatgaattatatgattatcttccttatgaggtattattccgtttgatacaaaatttagatgttaaaaaacagaaaatgacaaaattagcaacaaagaaaaagggcaaacaaacacgcatacaaaattaaatcattaagaatttccttttaaaactatacaattcggcttagccaaatctcacacttcaattagccacaaccaattccgagccgactcctttaaaccggacatctccaccggtctgtttcttaaaccggacattcacctcagttaaggctcttctagtctcttcgtcttcaggtgtctccatcatcaacaactcataatcttgaatcgcgtgttgccatttctccaactactcacacagcgtaaaccaaacaaaacattcatcacaaattacaccacacttaaaaaaccacactaatatcatttcgaaatcggtcggaccggttaaattaagcttttgaataccttggcataagaatctgccctgcgccgcctcgccttccggtacgatggctggagactgagagccaatgtgcaatcttcaatagctttctcgaacagatcaagcttgaatcttgaagcagctctgttacagagcaagagagcattatatggatcgttctcaagtccttccgtgtaaaccacgctagccccttcaaattttgatgcgttgaaaagcaaatttccactcagtcttgcagaagcaaccgctctcgcttttctagccaccgcgtttacttcttcgctgcttggatcaagtcgagccgcttgccttgacgccgttactgcatcttcaaaccttcctactgctatgtagacctgagctccgaccatcaagaggtaagaagtgagggaaagaccaaaaatctttatgaaactatcgatgtcgaagcgttttgttcctttctgatacacgctgtatgcttcctcgtgtcgctgaagatgcaataaagcctcggtttggagtgcatagaccttatgagattgaagattttataagtttaatcagtcaaaacaagagtccatacatataatatccagttagctaaaccaacacaaccaggcaaataaaacttgctatatttggctccttattgataaatggtataaacaaggagacaaagctaacccgaggagaagaatctgctccatatgatatcgcaaaaagagtctctttcaatgcaacattccattcctttgatcttcgagcttcgtcacacctccttaagcatttaacaacatcttcaacttgttcaatatgttttgtctctgtatattttccagcttcattatagtgacacaaagctttctcaacctcacccaatctggtcaaaaacaaaaatccagggtgcaaagttctatttaataatttatttagtaccataaagtaataatctgaaacttagagggaccaattagagaaaaacaaaagtgaaagactctacctgagttggagggaagctagtctctgatgagctctctcgtaagttgggtttagtcttaaagcttcttcacaagcatcagaagcttcaagaagacgaccgagactgatcaaagcggcggatttgttagaccaatacgtcggcgttttggggtcagctgaaatggctctctcgtaaaacacgagagcttgtccaaacctcccacgacaatactcttcgtttcccattttcttcagagtctctggatcgagtctgtgatttaccggtttaccctcccaccgacttttcgtctgtgtcacgtcagttttaacggctggctgtggtttcacgatgatgtttcccataacgccgttaagtgagaatctcttgctctctgttcttgatgagcctgacgaaatcgattttcttgcggaatcagatgattttctggcggattccgatgattttcgcgggtgattctcatctggttttggcttttgttggggtttctgggagtcagatttctttggttgagaagaagtatcggtggattttcttgggaggattttagggtttgtaacggttgttgatgacttggaagacaagttatcttttgcccgatgatccttttccggtaaagagggttttcgacggcgagggctccagctctggaaaatgcacccaaggagactctcacaaccaaatatttgacctgtagaaattttcttcgattttgccattgcaagaaggaaaaaaagaaatttgaagctttgaagaaaataagaagcactgatgaagagtttgatgaaacagaggagaaagagagttttttcttagttgaagatgaaagttgtttatgtattatttatataagtctaagaaaagagttacagtggagtactttccaagaaaccaactttttgatttgtctgccttttgctataacacaaaaatcttacttttgttttctaaaatccaaaaattagatcttaatttgatttaatggggtcgattcgttaaaacattcctgttatttgctgaccctatcgttgattgtttattgtcttaattgataaagacgaaatatttttcaaatatttttggagcctagtgaaagattaatactattgttgttgttatcattatttatcgacatttacggaaataattaatacaaagatagcgaaactttttaacatacaggactatcatagagcacaaaaactcaaaacctttagttagacaattatgagttacgagcactactagcaattgattcatattaaagtaagcaattctgttagtagttgctgtgcactataattatataactttgtggttgttttcttttgaataaatctttctcatattgctaatttgaaacttttttaattccaactaatagtagcaacagcaatttaggtaaacaacatcaaaattgtattaaaaatatatccaatgactcttattgatgtggatattaaagctaatatcctacaatgattagctaatatgctatgttaagtaataaaaacatcaacgatattttggtgttttatgatgtgattttgactgataaaacgtaaaagtcatgaatttgtgatatggatggaagtaaaatttgtctatttcgaccaacttatgataatggcattagcctgtggtacactaacaaaaaagttaagaaccaacgggtcaatgcttaatagtggctttattaaaagtaagtaatggaataattaagtctatcctcttaaacgcccaaagcatccgcaataataaagtgggtcatatccatattagtatattgataatcaccaccaaattattatcgtgaatagattctgctgaaattacgcttaaaccattaaaataatattaacgagaactttttttttttaactaagacttgtacgtgagataagtgatgattcatttttcttagttgagataaactgattttattatgttcatacagtgtgtggaagaggacagtgatacggtctcgtgactctcgtatcgtcttgttcgttcgtgtgagttcgtcggtgccggctttgttggggaccttctgtctcttacggcagcttttcatatctctttgtctgttgttgtatgtttgatttagctttgaccgctttatcttcattttttgtcctctcacctacacacgtatgcctccaaagtccaaacctttttatagatttcactaaaaaatcggactaaagagaagctagagcaaacaaattaaagcttcatctacatagtacttctgcttagaaattggcttagattatctgaatatatgacagtttttacagattatgatctagttcatgatatatttcagcaaattggtatgataagcatagtttttttttttcattcttagaaagtgtacatgtaatgaatgggcttatatcttcctgccgacaacttggcaaactcgtgctagcttaaaattaaagaagacgacgaagaaggccaaaggtatattaatgaatccaaaactagccagattctcttaaatctctctttttccaaaaatattcaacaaaaataccaaaagtagtcaaaaaccaacgatttctattcgaaataatgatttatatacttgtttcaagatttctttcctccaagaacgcaaacataatttcaatatactattcatcataatgtggggctgtatatggaccatatacagtacgactctagtctaacaaataaagcatttttccacataaaaaccactgatttaaaattcggttatgaattaaaaacataacgtaacccattataaaaaatgattgctagtttcagaaataagtaaaacggtggtaattttttctagtatataggctcatagcaattgttttagtagcattaaggtagaagacatgcatatatattgtgatttatttaacacacaaaaaacaatttatgtactaatttcttaggcatggctaattttaactcaaagcatatatgttacagactgattcatatttttgagtatgatgcattaaagaggatcgatatatacacacacacacaaaggaatatatttaataaagtgcttcaaccaaatatatatatacaaggaaagtcattcgataaacctctactatactcaaagtgcataaattcttttatatgcaaccacacgaatttttttttttttttttttttttacatcttgtgcaactaaatgattacaaatttgacataagcaatacatctatgacttctttttccccgttaattatcatagtttctaaaaagacaagatgaaactaaagaggaaataggtgataaaatgattgcggtatattatatacttgaagtcatcatacttgtacatatgtataattcataatacgaatgtaaacatgtatattagacgggtaattaaaaataagggataactaataattatttatatgactcatatcatttatataattatttatataagcatatcatttgatccacttttaaaatttgtaaacttggagaaaaaaatcagcccgcgaaaaacttttcaattggcttaatttaagtttcgtaaacaaaatcagttgccaaaaaagttgtctgtagattatcaactagttttgttttagcgattaaaaacaatagatatcgatttatcttcatagcatggatttgaacactaaattaccacgcataatgtaaaagatggcaaacaatatgattggatatatggcgtgtggactttgtaaagggaaaataataaatgaaaacgaagaacagaataacgaagttggctttgggtcagtttattactcgtacatgcatttcaaagctaataaaaaaacgatgtgaatgtctatttgtgattcattttcaaaattggatacttaattggtatagggatataaggttttattgttagtgaaaaactaaaatattatctaattattcataggttagaagttgctttatcgtcttattgatcaactcgatttttaattgatggtggaagatgttgccaattgatttgaaatatcaaaatataacaatcaaagaaaatgctttatttatttattaataggcacatgatccaaaggcacattgggactaccgttaccatatatacttggcttagaagggaaaaagaataaaagaagaagacttactatttttggatatttcttcacttaggggatttagctccaatccaaactctttactaaacaagggccgttgcttattcatgaatttcaatcgttggaacttggaatatgagacttgttcaaacaacagtaagtggaagaataggcccatgtacggtccttattaaaaaatcaattatacgatttagggtccacataagcccatgcttaatccccaagctaagcatgaagagagattagaacttataatgacactgtaaacaaagtgtttttttttttcttccaaaaaagtgaaaaacctagttccatatctatataaaccaacgaaaacatgtagatccgtatcaatattaagtcttcacgtgaataccttttgtatttctattaccagatcattagcagttaacatttagtcgtatttattatagacttgaaacttaaaaagttgtgatcaaaagtcagaacattaccgtgtttaaaaggaagattggtaagattggtttgtagataaacttatgaaaatatgggcctaagcccataggttgtggaaaacagtaatacgacccagttcggaatcaacgaacctactttgacaattctcacgcgccaccgtcagcgaccacgtactgtgattggcttacactccccaccgtcaactttgatgattcacatcccaaattatttttcagttacgaattagactcaaagaaagaaaaaatcagatttttgttttgtttttaatcgggaaagatgaaggcggagacgatgacgctgcttcttgtgaatctagccggaataatggaaagagccgatgaatctctgcttccaggtgtatacaaagaggtcggtttagctcttcataccgatccaaccggactcgggtcattaacgttgctacgatccatggttcaagccgcttgctatcccttagctgcttacatggccattagacataaccgagctcacgttatagctctgggtgcatttctctggtccgctgctactttccttgtcgctttctcttccactttcttccaggttttgtccttttttccacaattaaggtttatggtttgggtttagtgagatacacaaatctcttgtggcatttctgatagagcaggtagcagtgtctagagctctgaatggaattggtcttgctcttgtggctccagctattcagtctctcgttgctgactcaactgatgatgctaaccgtggtactgcttttggatggttacaattaacagcaaatattggttcgattttaggcgggctttgctctgttttaatagctccattaacctttatgggcatacctggttggagagttgctttccatatcgtaggtgtgatcagtgttattgttggtgtgctagttagagttttcgccaatgatccacattttgtgaaggatggtgttgatgtttcgaatcaaccaggttcgaggaaacctttttgtacagaggtgaaggatttggtccgggaagctgatactgtcataaagattcggtcttttcagatcattgtagctcagggagtgacaggatcgtttccttggtctgctctttcttttgcacctatgtggttggaactcattgggttctcacacgggaaaactgcattcttgatgggtcttttcgtggctgcatcttctcttggtggcttgtttggaggcaaaatgggagattttctgtctactcgtcttcccaattccggaagaatcattctcgcgcagattagttcagcctcagcgatcccgctcgctgcaattctcttgttggtcttaccagatgatccatctacagctgcaatccatggtctgatcttagtcctattggggctatttgtttcttggaatgctcctgctaccaacaagtaaagtttctctctttactatgcctaaagactttatatctctctatcgtttaactgtttttgctgacctggtgaaacaaacgcagcccaatcttcgcagagatcgttccagagaaatcaagaacaagcgtctacgcactggacaaatcgtttgagtctatcttgtcatcgtttgcacctcctatagttggaatcctggcacaacatgtttatggatacaagccaatccctgaagggtcatcgaggtcaacagagatagccacagatagagagaatgcagcatctctggcaaaagctctttatacatctataggactcccaatggcggcttgctgcttcatatactcctttctttaccgttcctatcctctagacagagatcgtgctcggatggaagcttttatagattctgagatgcgtgaacttcttccagaaagttccaatcgagacattgagttttcacaagaagaagacccctttgcaaaccatgttaaccccaatttacaagctagataataggaacatttgcaaaaagctttacaaattaggtatactgtatggaactcaagttgttataatgtttataactttataccaattttttacagaaaagtatatatactttaaagagggtgagcttagctgggttttgttgcagatagcattataaatggcccgtttctaacacgagtgaagttaacgagaccacaggctttgcagatatcttcaagctcacgttcatttaggaaaatgtgagaacctgaatatctcattatttcctacaatattatgaatgaccagaatgcataatcagccatagaccacctcagggagcaaaagagaagaaaatgcaagacatgaatgaaagttttaaggcttagaagtaacttatacacacacctgacgaagattcttcaagaaggggataaaactgaatggaccgtcatagataaatgtggtggccacaaatactcctccaggtctaagaacacggcttatctcagcaacctagaagatccaagggaaaataaacacaatgtatcattgtatgtgttgtttttgtaaaatgttgaattaggagaaaagctttacggctgaggatggtgaaggccagcaatgcagagcagcaccagcatggacagcgtcaactgaacccgaaaggaaagggagtctagcaatgtcagctcggactagaacaagtttcctggaaacgagacagcaggagtaaaaataacacatctggtaacccaagatctaaagacaataaagaaagcaaaaggtgaaagtacaaactctttgttgggaaagttttcttctttatttaagagttcatagcattgtcgcagcatattctctgagtaatctagagcaataaccagagaaaatagatcacttctagtgaataacctcgagaacatcccacttccacaactagcatcaatgatattgcctcccaaaacaggcttcagataggccttagccatttcaaactgtggaatgcaactttatcagtgttcttaaatttttggttcatgtattgctaatcaatgtaagcttcattatgttaagtgaaatatactaaatgggacaaacaatcagaaatttgacgcatttcctgaaagataattgccgccaaagaagaggcctttgaatattgagataggttttttttgtctcacctctttctctggtcctggaaaacctccccatatgaaattctgacgccaacccctctcatagagaaacgagaccagtggagtcctataaaaaaacaattccaaaaaaatctcagtttccacatagaagacaggacattgacaaagaatccaatgaagcatatcatctacctaaataactcagtggaaagaggcatcggttcactgtatctcttgcttccactagcaacagccaaatcaagatgcgtctcattacccgagtaactccttttacatgtattgcattgtacttgaataccagaggcagcagattctctgtaaaatacaaaacttcgataacttgcctctcaagaaaattggaacattcacttattctctcaatccaatttctgaacaaacgataaaaattagtgaaaagtaaaactcacattaatccattaggttgactaatccatgctaaggagttataacagatgggacaagctagaatcttcttctctcctctgttcttatccttcttctcgataacaaaatccacctgcacaccaatcaaattgaatcatctgatattcgagatcatcaagcaaaatcaaattcacaacaaagtagtatcaaatacacgtaaaactcaaacaaaaaactaattatgatttctttcgggaatatcatgataacatatacaagtagaatctgttcctacaaaaagttggagaagaactaaggcacgtacattcgaattcgaatttgtctcaacggagacggaggctgaagaggcgtgagctgatctggaaacgaaaacaacccgtctttgagcggcgtacttgacggaatgcaaccgcgacaaggaaaagcaagtagggagcaacgccgttgagaatcgaccggaaacaaccgtcatcggcatttttcaggctcgcctccgtggcagcctattgagcacgaagctttattaaaggcaaagaaagaaatcacacaaaatgcgtggaaacaagttttaaaatggtaaaacttaacaattttggaatttgtgaaagagaagcctttattatggtctttgatggatcctcaaataaaggcccaaacattgttcaatataattggtttgggtctaggttttgggcctagtggtttcttcattttcttgtcaacaacaacataaagcttcgaattaaacgttttgggcttagtagattacatgttttttaatctagattaactaattaatcaaattactgtgtatattcctgtctaaccacaatttatttggacgcatgttcttttaaggatccgtgtaaaaaactgcatatctccgtgacaatttgaatttactaatttagttttcgttacgaagaatcaggattaaagattgcggaaaataattaagtttagttatgaaggcctaattgagaggataaaatcacggcttttgaaataattacacttttaatcaaattacatgttgtatgctaaatggctaataaaaggttggcatcacgtgatcacactgcttaaataaaacgttggtaaaagtctttattagttttgatggcttcacatggtcttgtgtcagaaaaaaaaagagaagaatatgattgaccataattctatctaatgcgcttcaattattattttttccctaataacaactttttttacattctaaaatattaatcccaattccttacaagaagaaaagtattcgaatattcccgttaaacgccaacaaattatactactaatcacaacaattttctgattagaaaatctgattttgaatttaatgatcatgaccacttgttaaatcacacgtggcagcgtagagaagaagcttccagatcaaaatgagatttacgaacaaagtaaagggtaatagagtcaattaacacaatcgattaatcttaaaccaagtgggaagaagaagctgaaaagagagagactaatcttcttcttcttcttcctctctgtatttttctcattctcttcgatttgtttgcttgctagtgactagtgagtgagagagtatggagagaagtactccggtgagaaagccacacacatcgaccgcagatctacttacttggtcggaagttccaccgccggattctccttcctccgcttctcgctccgccgttcgttcccaccaggtacttgcaccgtttcgaaattcatgaaatttcactttgattttgatcaatctggtaatagtatttgtttcaattttggtttaatgtgtttgtagccatcggatgggattagcaaagtggtgtttggtggtcaagtcaccgatgaagaagttgagagcttgaaccgcaggttaaacttacttccttatcactatttcatttccaattcgatttctttgaaaattagtttccaattttgtccatatatctgaaagttgaaaactttttgtgaattgaattcatactctgtttatgccatcaaaagttagatcatagagagtaatcttcaagtgtgacttgtatttaaggattcttgatgatgcatttgacagcttcatgagattggttatttatactaatgtcaaaacttgtgaaaatgtttatgatgtcattaggaagccttgctcagaacataaaatgaaggagataactggcagtgggatcttttctcgtaacgaaaaagatgatgcgtcagagccattaccagtttatcaggtaccagtttgtgtagagagtgagacttgttccgttatgttattagtcatattactgaaactcttgattatctttcagcaagcagttaatggtataagccagatatcatttggtgaagaggaaaatctatctcctaaaaagccggctactgtacctgaagtggcgaaacagcgagagctcagtgggactatggagaatgaatcagctaataagctacagaagcagctctctgatgctaaatacaaagagatcagtggacagaacatctttgcaccaccgcctgagatcaaacctcgatctggaactaatcgtgcattggctcttaaggacaatttcaacctcggagctgaatctcaagtaagacttttccaatgtgtttcttgatatctcttagcaatcattgttatatatagtctaatcagagaaacgctattctgcagactgctgaagaagactcatctgtgaagacagcaaagaagatttatgacaagaaattcgcagaactttcaggaaacgacatattcaagggagatgcggcgtcatctaatgttgaaaagcatctgagtcaagcgaagctaaaggagataggaggaaacaacatatttgcagatgggaaagtagaagcaagagactatttaggcggtgtccgtaaaccaccaggtggagagacaagcatcgcacttgtttaaaatcatctttttcggtaacaacttaactcttttataaaccgcggttgttcggtgtgtgttcttgtggtttcccatacacttcagctcaaagtgtgatttgtattttgcggtttcgtggttgttatttttattgagttggtttttaagccgttagggctttctaatgtaagttcgagcttaaactgttgggagattataagcattactacgggacagaggatgttgcttgtttcagaagttattgtttttcttttccgggtcttctgaaaccggaaaaccaaacttgtttcagcagtttgtaccacaaaagttatgagtatgtcttagtattgatattgcaatgtgcagtaagcatgtattgatgtacactatagcaaacgctcacacttagatgagaagtaaacttcaattgattttgcgactacgtaagctatatcgttgagagaagagaagaaaaaaggagtttgttgggaaatttagagaagagtttgatgcatttgccactatgaaaaaggaagatgatttaggtctaaaaatagaaaagagtagtagtttccaagtaggaaaatagaaaagtgagatagatgtgatggagacctcttcggctcttcgctaacttccataattgtaggaaaaccaagtcactgtacgtgacatcgctattgcttttatgttattttctggtttattttcactttttaagatgttacaccacaccataaaataaaactagaaatatttttgtacaattctatttatactttttttacatctaccactaaataagaaatataaaacatttttctgcctagaacacacaaaaaaaaaatttataaaaaatgataactatctttttgatattgaaatttacaattaaatttagaatgcttttaaatcgttctttatttaggagtagtacatctaacgactaacgttttatgtggaaatattaattaattgctttaactgaggaaaagttttttgaaaaaatctaatttaagaaagttttactcattcaaaacttaaagataattaataaagatttagtcttatactaaaagggttgattcagtcttacatatcaaaatcagtaaaaaatagaaaacgattatagaaaatcaagcagaaatgtgtgtcatcttaattatttctttgaaaattaatcatttacttaaaagccaaaaccgttagagaaaaaatagaagatcaagtagaaaatcatatctaagatttccaatttaaaatataaacgagagaatctacaatccttcattctatctctctctctctatctctctagagtaaccactgtgtggatattttgcagcctttcactgttattttaatggcgtaaacgacgaaacgattatacgttttcttctttataaggtaaacacacacaaacaaatctagctaacgttattgttttcttcttcttctgtacatatttttagatgtaagatcttttgattacggtttgagatatatcatctatgtgaaagaaataattcgttgggttagtgttgttgttacagagagatttataacaataatgaagatggatgagtttcgtgaagcttcttcggtctcttcgtctccttcgactccactacgaacacccttacattctccaaacctctttaatggagatttctccgttagcaacagattctctttcaagtcttcatcagactattctttatcaagttccttctctaatggactctgttctcctgaagatagttcttctccgttttcttctcctccgtttaacgggatcattcctaagcacaatcacacttcatcatcacctgtctcttttgattcattgtttttcaaggatcatgaaaagagtcatgttaatggtactgatgatttaggtttgtgtgaagatctctatcgtatgaatatcaaggaggatgttgaagaagatcaaatacgttacgcacgaaccgagactcttaaagatcctcttcctaagtctgatcacactgacttcactccagatccactctacaacttttcacctaaacactatgaacctagcaatggtggatttgtctctggaggctttccatatggattctttcgtccaccaaaggagtctagtattaaccagtcatgtgcctcgtggtctggattcgatcaaagcaaaaatgacgacaagagaaacatgtttgggaacaatcctcaacaatttggatggcctagctactcaagcagtaatagtggtactagtccttacaacaatggtcaggagattttcgaaaatcgaggcggaatgagagagtactcagcttactcgcccccacatcaacccgaagtttcttataagcatcaaaattacagaacaacaacatcagacatattaccattgttctgccaacgaactcaagtccctatggtttcaaaatgctctgagccatttagctctgatgagagtttcttcatgaatggtaaaagcattgatcatcagagaagcaatactcgagcattgatgtctaataatggaaatcctacggagatatgtcatccaagtctgcctaacatgtgtgacattcaaggatatgtttacttaatggctaaagatcaacacggatgtcgattcttgcagaggattttcgatgaaggaacttctgttgacgcgatgattatattcaatgaagttattgctcatgttgttgagcttatgatggatccttttgggaattacctgatgcagaaactcttagatgtttgtactgaagaacagaggacacagatcgtgctcgtggcaactgaggagcctggtcaacttatccggatatctctcaatgcatacgggtaaaatattacattctaagatatcattttggtatcttatgcttattaaacattttttgtttatctttgttttgtagtactcgagttgtccaaagattagtggaaacaatcagaagcggaaaacagatttctctggtgaaattggctttgagacccggttttcttgatttgatcaaagatttaaatggaaaccatgtgattcaacgttgcttgcaatgccttagcactgaagataacaaggtcaaataactaaagtcacttccttttaactctctcaatcatcagattatattatagctaaatcttgttctgttttttcaacagtttatctttgacgcggcgacaaagttctgcactgaaatcgcaacacatcgacatggatgttgtgtgctacaaaaatgcattgcttattcaatgagacaacaacgagagaaactgatcgctgagatctctagaaacagtctccttcttgctcaagacccctttgggtaaatttatcaaacaaaacaaacatttatacggaagaacctaataacaaactttttttggatgatcaatattttgcaggaactacgcagtccaatttgttatagaactaaggattccttctgcggtggcgatgatgctggctcaattaaaagggcattacgttcagctttcgatgcagaaattcagtagccacatggtggaacgatgtctcatgcattgtccagagagtcgtccacaaatcgtgcgtgagctcgtctctgttcctcactttgatcagcttcttcaagacccttacgcaaatttcgtcatccaagccgctcttgctgccacaaaggtactaactttactttacgtacaagttatatgaattacattccaatccagttttcggttcggttatatatcggtttatgaaatttgtgacagggtccacttcatgcttcactagtggaagtcataaggccacattcgattctacgtaataatccttattgcaagaggattttctcgaggaatctattgaagaagtgaaggataatgatgataatgagtctgtaactttgatgttgttgtgtttctttttcttctctcaagtttcttctgtgttttctcgtatgttcttatgaataatctctggacaatggtctagatccagagacaaagaccttagtgtttgattcttctgtattgttctctgttgtttcttttgttgttgttgtttttttttctcaccttatgttgtttgggtttcgggaatggaatttctgttgtaaaaaatcgggttttaaacccggttttgtctttgaataaaagtcttctttagttcttcttactgagaaaatagaatattcgcaattcatataaattattactgaatataaatccaagatttagatgggctttgtttctgttttaacctactgatcaatcaaagcccattagttttcactcttcagtctttaacaatcagttgtggatgtggtttcttatggctacattgaaaaagatggagacttctttactagggttttattattttcatttttcaacgaagcccgtttttaaaaatctcctcactctccgatcccaacgaaagaaaaaactatccaatccgaatcattcacaaataacaaaactatcatcataataatatctaaacaaactttatagtaaagcgttaaatgatgtacgatcaggtgtgtatgacacactttcttaaaataaaataatatatacaccttcttaattaaataagttttgcacccttgacattttgaatttttttatcaaataaatacatagatgatagatgataaggattttgattttttgaaagatagacgatgataaggataagcaaaaaaaatagtatgactataattatttaatatctatagtatgtttttccggcagacaataaaaaactcgaataaattggtattgcatttaaagttttatttgacataatttatgggtaatgcatttatttcacttgatcaacacaccttctcagacctaattcttgggcaaatcgaccgtaattaataggaacatataccctattatttaatgttcatcgtcacatgcattttgtttccaacaaaattgtttactcttataaactttcaattaaactcggcttatgttgttgactttttaataacagaagccgatcctaacacttaaagagttgacacgacttaaaatggcacaaagggtcaaaacttaaaaagcattggctttcatccttgtgcacgtgaatatatcatgacattgaattgcatggaatcatccgcacaaacgaaaacattagaagttacaaacactatagttgaaaacacaatgacacatatatttgtatgcagaatcttaaaatacacaaaatgaaagaaaaggtaagtttagtagaatctgaaatggtattttatttcagtatgtagaaaaaaagaatctaaaagtgacattattacggaaaggaaggaaatattacacatatgaaaattccgtaaaactaagatacgttgtaaaaatgttggccttattaatatatatgtaatttagatggttcgatagatacttttcccgaaatgtgtgataaaatttatgttctattgacaagtagatatatgcaacgcatataattgaattttgcatttataatcgtttcaaaattattcaatggaaacgggtagacaagtaccaaatatttaattcttccaccaggaatttacaactaatttatttcagaaaaataactatattaactgagggactcagaaatatgattctccatctaaccttgcaatttaatttatactagtatttattattcgatgtagctttcaaacacattttttctttttttcttatttcttattattcaatttatgaaatttaaagtattgtatttatatatagggagagtttatagtacgagatttaaataaattggagagaagttgacaaaaaagaagaagagacatgaatctttattatatatgcatacatggaggagctagcggatgttaggagctttcaaagcttgtttttatttattttaatttttagcttcagtgtttttttttctcaagaatagttttaatttgtttgcatatgtaacaattaggttctatttaggcatgagtttaaaggctatggaccgatttatccaaacataaatacttgtgttgtgacttgtgtagtacagtactgatagtctgatactccaataactgcagtttttagatgagacaattttttattgtaaatcgcaaccgcaaaacaagaatgaaattcgttgttctatttggaattttatttttaatttgcactgaaaattgaattttatatgatgtctaataaacacactaaagtgttatgtttgttttctctgaaaacaaaaagtaaacacaatcaaactagcaaaccctaaacgaaaaatatggctcatacgacgttttggttcttaatttaaaatgcatgatcaccctccttgactaatagtaattcgagacatagctgaagcagtgatttctgacttgacattctgatattacctaaaagaaaaatagaaaagaagaaaaaatcatttcatacatgatacatccttctctctcggtgtcacgtacggctttttgtcgctgttctttatcatatcacattatcactagaccgacaatttctcgaaataatcactagaccaaagttctatattccccaatcatcgtttttcttttccccaatcgtcgttaatcgtaaagtgaatcacaaagatatttctattgacaaagtaaactataaatggtcacttttcattgtgacttttcttttcattaattgaaagagcaaaagaaaatatatttatgcaaaacgtagtaatatatcatcgattcatattgttaaaaagggagaaaataaaggttgggaatatatgaggaaaatagccacaaagagtcgtaattataaacgaggaaacgaagctcatgtctcatgacatgacatgagataggaggccgttgaaaggctttaactatttgaaaacttaatagaatttcatttcgaatatcttagttttttttttttttaaaccaaaaaaaaagaaagaataataatgattgtggaaggaggttggttagtattgtgtatatttgtgttatataaccaaaaatgggagtaggaggagttaatgtgtgtattaaagttgcatcggcattcatcaattcatcaaccttcccttctcccatctttaattctctttattgttttctccatttattgacctctctatttcccaactcttcttctctcacttcctcctcctccatctttatcatcatcattaatcattcatgtacatacacttatacatacatacatacatacatctatccataatccattcatatgattttaccaacaacgaagtggtttctttctactacaagatgtgataacaaaacgctcttctttatcgcatcatcatctacctagctacatgcatcataataaagacttacatgcatcatacgtctagatgacaatatggtgatgatgatgatggttgagaggaaagcgaaaacagaaagagaagttggttagaacttcacatctaagcatttaaatgagactgtttggagttattgaacacacccaacttggaactcacacatcatgtttcacattacttccccctctctttttagtttattttattcctccataaattttaaaatatccaaattaaaatacaatagtttcactttcaattatctaatttatcaaaccatttttttgttatcataatggtatctaattcaattactccatatgaaccggtagagacaataactcccctggagattttccttcatgtatatatatagtgatgatcatcacgttactctttaagtctatctgctcatttcctcacacgatcaaaaagatagttcaaatttttctttaaagcttaagaaaccactcagtggaaaccaagactaattaaggctaatggtttctcgacaagaaggaaccctctactctagaaagagggatttcacagtctgtggagaagagtttcacaattcattcaagaagagcaaacaagaagatcaatcacagagcactctgttcaatgaacgaccaaaatcggagagtatgagatcaattacctttgattttgaacttcatctccacactcctctaccatcagattggcaaactaaggtatctatattcatatatgaattgaagtatcttatatttgtatcaatatgaagataaatatgcgttatgatatgtgcataaacatgcatctaaaacaacgatacttatattttcagggatattcaagaacatctgatgagcatagggcatatcccaaagatccagtgatttttggacaacctaagatgagcctagaccttgagctgaacctttcaccttcaggttcaccttcacgaaccacaacgaagaaatatgaatcctcctcaattcacaatgaaacagtatcatcatcaaagattaaagttttgacgaacacaagtaagaagagcataattgggacaggactaagtcgatcaccatcctggctagcgtttgaaggtggtgatgataacgatgttgatcacaaggggcaagagatggtaacaacagtttgcatgaaatgccacatgctggttatgttgtgtacatcaactcctgtttgtcccaactgcaagttcatgcacccacacgatcacagctctacaaaactgtttaaaccatcaaatttgcttaggcttctatgctaggctctttcaaggttactgaatctataaaatttgtacggcagataataagccaagagactagatatggacaaagttatgtatatactaaaagtaccagaaagtttgtattaattctctgcttctatgaacgatcatgctttagatctctaaacatatcagtattttgcattgaattgtacttggggaataacacgtacacacggaataatatcaactagtattgcactaaaacatatatggatactgactaaatagctttattcaaggtaagatataccagagtttgagttccgagtgtagtcactatcaataatagaaccagaggtaaaatggtttaacttgaatctaccaatggttcagtagcaagcgacgatgcttgtgttatttgtactattgacattaaataaattaactaaccccaaaacactttggagggaaaatctcgaaaatagaagtgggacattttcattttccgggtagagtcaactaatcatatattgacacctgtcacattgaacccttcattgagaatctggcgtagaagttttgaaactcaaaaaatcaaaaacagaaagaagcagagagacgatggcgagcaaagacgaattttcccgagatctcactgcgattcgctgcgccagagctacgatgcttctctattcacttgcatcatctcgcacaatcgattccgccggcgaggttagttcgatcccttcttcttccgattggaatcgattttgctacaatcgactcttaaattacgaaattgccatgcgaaatctcatctctggtgttttgtttagaagcaggagaaaggagaaacgcgaagagagatagaggatctgaggagaaagcttaccatggtgaagataaagatgaatcggattaagctttgcggattgatggaactgcttcttctcgtctttttggtactgttgctttccactttcttccttgtcttcttccttggatctacttgatccttcccttggaatcatcagcttatgcaacattatggttattagagtaaggaaactattttagaagtcgagatttgtgcagtagaagaatcggataactgtagaagtcagtcattagttttaaaacttaacgtttgcatcttctaatgaatgaatcttgttataaacacttaactatttgaactctggagatttagtagttcttcttgcaatcatcttcttatatgcttttaactgaatacattatgctctttcctgaatgtgaaacttgttttagtacatcatcttgcttggctttgacctctagatatataattcttgctccagtcatcttcttgaatgctttcaattgaaaacatgagtgctcgttcctgaatgttgttagcagagacttactggttgagctctgaagatcttgttcttcttgcaatcatcatctcgaatgctttcaactgaacatcatgctcgtttctgagtgttattttttcaaagtcagagcagcctgaatctgagcttttctcagttcctcatcatgcttggctttgacctctggagatctaattcttattgcaacaatcttcttgtaacatcatgctcattcctgactgttgttatcagaggcctcatattcctaggcttcatattctgagcttggcttcagtttctcattgtgattggctttgtgctacaaagaaaacgccaaagaaaagggactttgattcagatatctcatatctgcatcttctgctgctaaacctataattaagaggggttaaaatcttagaaaactccatctaacatatagttcctcagcattatatccttttcagaatcaataatttcatgctttccttacctttacttttggagccacagaatttaaagtataaaaagcccaaaaacggttccaccggtccaaccactcaattttggccgattcccacaaattagcttttctctacaaattcaaatcaattttgctcctttcattatccaaatgtcaggactcgatatctatcctcacgatccttcttcttcttcttcgaccagctctatcgatctatccaatgaagctttcttcagcaccggtggtctgtttctcgaaccaccaggcgtttcctcttccttcttcgactctatctcctccaaatgctccgactcagagccactgcatttccccggttactggagaaacaaaacccgtctccgctccggtaagaactttatgttcctgtccgtgagcttgagtaaagacagatctgagcagcaatgtaagaaggctttggcgcaaaacgacgaaattcccggcaaggataatcgaaaacgaagtgttatcggtggcgtgaggagacgcgggaccatgaacacaaggaagcatctctgggctggtgctgtagctgccatggtttcaaagtatatatattattgaatcagagcgcatataacttgtttgatgaaatgcctgaaccaaaaccatgattttttgtattggtattaatattacactttttgttgttgatgatggcagaacattcttagctccacttgagagactaaagcttgaatatacagttcgtggtgaacagaggaacttgttggtggttgctaagtcaattgcaactacacagggcttgactggattctggaaaggtaatttgctcaatgttcttcgaactgctcctttcaaagccgtcaatttttgtgcctatgatacctatagaaagcaattgcttaaaatcgctgggaatcaagaagcaaccaactttgaaagattcgttgctggtgccgctgctgggattactgctactgtgctctgcttgccactcgacactgtatgtttttgattccttaaaccattttagatcaaatatgacaaagttctctgctttagagtgacataagtctactgttagtgttcgacaggacaattatgagcatgtgtaaccaatttgactgaaatgtgttcttctactggcacagatacgaaccaaactagtggctcggggtggagaagccttggggggaatcggaggagcttttcggtatatgatccaaacagaagggttgttctccctctacaagggtctagtgccgtccatagcaagcatggctctgtccggtgcagttttctatggcgtttacgacatccttaagtcatcgtttctgcatacaccagaaggccggaaaagactgatagacatgaagcagcagggacaagaactcaatgctctagacaggctcgagttaggacccatcagaactctcatgtacggtgctatagcaggtgcttgtactgaagtagccacttatcctttcgaagtagtgagacgacagcttcagatgcagatgggtaaaaacaagctcaatgctttagctatgggattcaatatcattgaaagaggagggatcccagctttatacgctggacttttacctagcttgctccaggtttgcataatacttgtttcattactaaactcaacttgtgtatctactgtttccaaaagcttgatatgttctgtttcacatctccaggtattgccttcggcttcaataagttactttgtctacgagtgtatgaagatagtacttaaagtagaataacaagattatgatattggaagagtactagagcttaaagaatcatccattacacaatgcattgcgtgatgaatcaatctaaaacacaatgcttaatttaaacttcatcttcgtggagaagcatattgggaattcctttgctaaccgaaaacttcctaccggtttctgggcagacgagtgagccttcctcaaggtgaagctcgagcaacgcgtggtggaatttccttaggaatgtttcgtcagattccagcgtcgtcgtgtctggtgcgttatcgggaagttcggtgtattccatagaacgtgcaccatccactagagccttccaatcgattttggcaaacatgtacctgagaaaatccgggttgaaatcaacctcttttactgttaccttctccgcttcgattcgcagaggaaacttgttgaccactcctttaatgttgcaagacaacatattgtgcactatcaacctcatcttttctccttctctctctctgcatcgagcaagagacgcgcgacgaagacgaaaaaatgtcttggtagctgacgatgtaccctaatggacttgcgagctttttatgagtattatgattcagtttttctaaatgggccttttccatgtaaggcccataactagatacgagaagatcagtaaagtctccaagtctatggttgacagtcaagagtcaaccgttgactatttatgtggccaagcaaaagcatggttttcgttttattctaggattataaattaatcacaaatttacaaaatatgtgataacaacaaaaagaaataaatttgcataagattaaacacaaactgacaaaagagttcaaataatcgaaatgatagaaaatattggaaaatttcatggaaaaagtttattgtgtatatcaatttaagaaagacaaacttttttttttttttaatatactaatatatatttatgagttaattacaaaataggcatttattttggttatatatttactttaaggcacttcttacataacattcaaaaacagatactcttccctggtgaaaagtcatctatatcctccagtcattgacatcatcttctccaaagaattgttgaatcacagaaaactcccacgaaaaatatcccaaatcctacaacttgcactttcctattcttctttttcttcctttatctttccaagaaaccaaagcatagacacatcaacttgaaagagagaaagagtttgatttgattaaaactaaaattcaataaaatctataaatttttttgcttgggttctctatgtactatcttagggtttagtattgtataattaaaaacgattttaagtttgcttgaaaaataatgaagaaattgatttggtcagattttgcaaccatgctcgatgaagaagaagaggaaaagaagaaaggggaagaagaagaggagaagaagataggggcaaaattgtctcaattaaagtaataagtcgacactattatattctactgtagaacatacctattttgaaagaactttatttaaaatgcctattttgaatataagctctatatttattattaaagcaatatcaaaaacaataccttagtttgctttccaaaattttaagttggactaagatgtcagtaaattaccaaaaaattaattgtatgcatttgtgttaagcaagttaccaaagtcaaatagttaataacttaataacgttagatttgggtgtgaataaaaaaaaccaaaccagaattattaaatttgatttcagtggatataaatttctctcaagaaaacgacattaacgaaggagagccaaagcttcgtcgttgatcattcctccgtagttgcggaattgaacccaacttagggtttgtttacttctcatttctctcttcaatttcgtctcttgcttccatttctcaactcaaaatcgtaaatttcgcggatttttttgttcaattcagaatcaaatgcccaagatctgctgctctcgttccgctacacaagtaaaaatccaaactttttttcatttcctcagtgttttctgtaaagttttgtgatctttggtaatgttttaaggttgtggtagcacaaaaatcaaactcgggtaaaggaagaaacggtgaaggaggaatcaagtatggatttagtttgataaaagggaaatctaaccattcaatggaggattatcatgttgctaagtttaccaatttcaatggcaatgaattggggctttttgcaatctttgatggtcataaaggtgatcatgttgctgcttatctgcagaaacatctcttctctaatatccttaaagatgtaagctttattaaagattgttgcttttttgtgtgtgtgttatgtatgtttagtatgtgtgatgatagtttgatgtttacttctagggagagttcttggttgatcctcgaagagcaattgcgaaagcttatgagaatacagatcaaaagattttagcagataatagaacggatttagagagtggtggttcgactgctgtgactgcgattttgatcaatgggaaagctttgtggatagctaatgttggtgattcacgagctattgtttctagtcgaggtaaagcaaaacagatgagtgttgatcatgatcctgatgatgatactgagaggagtatgattgagagtaaaggtggatttgtgaccaacagaccaggttaagagcagcttttagtgatctttcattatataaggttattagatataaggatgattctgatgtttgtgaattgaacaggtgatgttcctcgagtgaacggtttgttagcggtctctcgtgtctttggagataaaaaccttaaagcatatttgaactcagagcctgagattaaggacgtaaccattgatagtcacacagattttcttattctggctagtgacggtatttcgaaggtaaagttgcgaattgtagtctggatttgagtaaaggataaatggtgtttattgaagtgagtttttggttgaacaggtgatgtcaaaccaagaagcagttgatgtagctaagaagttgaaagatccaaaggaagcggcgaggcaagtagttgctgaagcattgaaaagaaacagcaaggatgacatatcttgcattgttgtccggtttagatgataaccaagaagactcagcttatattggatttggagcttcctttgcttcaccatgattcttttggggtccggtttagtttgattctgggtcttggttacttgtgcatttttaagaacatgagtttgaataggactattatatattactagtttgacaaaccagatattttatcatataaattacatgaaaagaatagtcgattttaaatggtttcaatttgttcttggaatcgtggataattaatcatctactcattaatcaatgttaacaagaaaataaacaatcattcagtcaactgcattcatatcagacagactcattatttttctgggctttattgaaaaggcccattatagcccataaaacgttagacctaaagggaaattagggtttctgaagctggaggcggacactatatataccaatgctcttctctgttaacataatcgtgttcttgatggttctcaaagccgaatcgtttttctttcaaatttgttctcgtttaatcattgatgatagactaagaaaattagggttttttatttttggtttttgataaagagaaagatgcctcttctttcagcagcaagattattcttgttagctttgttctggaggcacagatcaatcgccattatgagagggatttttttataatttgcagagttgttcttccttctttgctgattatccctctttgtggtacataatctcttagtttttcttcgtattaacataatagtgttggagtgaggattttgatgaaagaacatcatggcggttggcgactgaataagaggatttaaacgttgcactacgtgacattgaaactgtctttcaacattccaatatttcaactttcgaatacccaatatttggtttgttcaaagacattttcgatgtctagcagtgccaatgtttaaaatcaactgataattttggaattaatgtgtataaagattcgaacttttatttgtttgactctgattgtattctctttgcctaattgatgatttcattgtgatatgcactgaatgattcaaactttatcttgtggacaacaaattaaacttaaaactgagcaacgaagtggtaatgtgaaaatgatatatatgttattaatccttggaaattacttatgagaggatcttcaaaacgatgactaagaatcaaacattagagacaggaatctgtggtttactagtctctagaagaaaagatttgagaagtttgataaactttttaggtttctcgaagttaaagatatgaccagttctcttgatgataacgagtttcccattatctcctacatgcttctcaagtctcttgcccatctccaatgggaacacttgatcatgctctccccatattatcaatgttggctgcgttaattccattaattaaaattaggactcactaattacttttataagagtgaatacatatgacaaattttggaggaagaagattgtttgatacctgtttgagctttggaatctctgagattattctgtcttttggtatggctttgatcagttctctcttctcttccatattatctcttgtcaaagcctgtgtagtttcacattgtaccaagttaaatatattgtaaagaacaccaaatataattcttattggcacgaatataatgtttactcgttttttaccgtgtcttagtattcaacaaagaactaccgaacgaattttatttactatataagatctgttagtggaattatcaattatgttgatagatctaatgaacccattaactcaaaatgtgacaaattttactttaaactccaagttgacaatttaagtacattatcttcaaacagatagaatctttaaaagttcaaatcttactatttctaaactatattcgcacttactagattttcaacatttaaatcactttttcgtatagtatatgttcttaagacatgtagacacgtgtcgtaatatgatttggttgaagaagtaaaaaaagaagaaagtagctcacatgttcgatgaaatcatggagaagacaagtaggaaccagtcttgccaacgccggtttgtaaaatatgtaacccataagttcccggagctttttcacagactccggcacaagaatcttcgaagcttcatcaagatccgacaccttgaaaacaccggctttcatatctttctcctccacgcacacggcggcgcagcatatcaccaccttctccaccgcgtctgcgtacatcgacgccattcgataaccaacgaatccgccgtagctaagaccgacgaggctaaactttttgacggattgggcttctaaggcccgcatgagtgtttgggcttggaaaatatcggatctttcgggtcgggtcgtggaagatccgccgaagaagactaggtcggggatgtagaggttgaaataacgtgagagacggcgagctacgtcgtaccattgccagatggcagtagctccgaggccgtggatgaggaggagattaggtttgggtttggattcgggtttggttttggatacccaaaagttgactacggttccatctttcaagtcgatggttacgggtcgtagaccggatcttttgaacccggatttgtaagttcgttctaatgcttcagacaagctaaagcaacctgtcattacaaaagaataaaaatatgaggaggatacagagaaatgaaaaagattttgagttgaaagatattgtgttgtgttgtgtttggttctctggtatcggttgggggatttattacgaatgagcacatttttattattaattaacaataaatttgaaggagacttaaattgaaatgtggttataagttataacggtggagtgactggagtcgcatcacatgtaaaataattaataatttacgaatttcttatttgtgttaagagaaaataaaacgtttttatcgttcctcgtaaattgttttttttttcttttcttataatttgttatataattatattaatgtatctatttgtattttggtctcatgtaaactctatctataagtcaaaagattgcattgcatgtgtacacattattctagtaagagaaaaaaggttttctacaagagtctggattattttatttttttgggcaaagagtctggattatttaatttttcgaaattgagaaaaaacgaaattgaatgaagttgtgtgcaaaatgtgtgttatgtgacctaaagtataggcttttttatttggcagcacatacaattgttattatttgtgataaaaagtagatggcacgaatgttacaaaaatctttgtatctgagatcgagaggcatgtggttagtctttaatgtgaacataaggttgcgacagtgcgtaggttgggaaattaaattcgactatctaacttaatattcaagtttttcttaaaaagaaaagtatattagactgagacacagatattttgttgaagaccaaaaattatatagacgacttagaaagctttgtcaattttggttataagcgtcttttctttgtcaaagtttggagagtcttgaatccgccaatactctagaagaagaagaaaaaaaaatcatttttcacagaattatttgaaataaaaaaacgttcatttcttcagcttatggctaacctaattttaattagagtttaggacacgttacgaggacaatcaattgaagacaaagtggtagatatgttggtagcttacttattactacaatatttaagatgtactttgcatgtatcaggttattactggcgtggcttcatgtatgtacttatatactcgtaataaatattttggattaaatgatgctatagttttacaaagttcgataactaattagtgcatgatgatcaaaatggtgtggaacagttgtatataaaactgaaatgatagatgaaccaaagcacaaagccgagagttaaaatacacagtagacgacaaaaaacaaatacacagtattattgtaaactaggagttaacaagaagactaattgagttatgtaaactattaaacctgataaacacgatcaatgatttaccttcatcatatcgcctcaaattacattttctaaccgtctgtcttattaccattaccatcgcctgaagtccacgtagaaagattgtatttaagcatctctatgatatacatgctctcttcgcatatattcttgtcaaggccatcgagttcagtgattgcttcatcgtaagctttcttaaccaatttacatgcgctgtataaattcacatataaaattactattagttaactgtaagaaactaagatattcaaaaaactgtaaaaaactgttcattaaaattaattggcaatgaaaatataaattagttattatatatacaaagtttttgatagattttgaaacgccgcacttattttatttataagcaaatgtgatattacctttcaatagatttatggatctcataattgaatatcgagaaatttaaagccaatccaagtctaaccatattggtgggtgctaaactattctctgccatttccattgcaacctacaaaatatatgcctttttcatgtttttccatgctttttccaaactaatatttcgaagaaaataggggaaaataaaatattaaagttgagggtaaacatgattgaaagaagaccttatatgcatctagagaattatctgcattttctttacgttcagcatcagaaccaaactctgccatatatcgaaaataatctcctttcctacacataccaagaaacaatataacaaaatgctaattaaaaaaaaaaaaaaaaaaagagttgatcatgattatgataacggaatatgacttacactctgttaaaaaggacaattgattcgacattagtagtagttgatggtatgagatgagaatcaatgagagacaaaatgtcattacaaacattgaaaaactcatatttaaccatttcttgttgtccttttatcagtttcacattttggtcgtttcctttcgagtcttccattttttcaatggatgatattactctcaatgaaactctcttagcctccatgacattcttgtatccagttgttagtaggtctctttcctcttcacttagctctatatcaagctcacatacttttctcatcgatttcatcacatctgccacaacaaccgcttagttacttcttataaggttatagaaagatggataaagttgctacactgatttcttcgtatacaagagtaattttgggcatttctaagaccctgataatagatatcaaatgaaatgatttgatatttgaagagagacataacacatcttctgttatcatatgattcgagtaaccataagtttgtttaaaacacacaaactggatcggtgacaacatgaaaaacataaaccaatatgataattaacctcctagtttaaatcaaatcaactatctctatgaaaagggcaaatatgtgagaatatgtgataccatcatatcttccagcttggcaaccgagcttagccaagtaaatcagcttttctctctcattctccataactttgatctctaagttctctcggtctatgtttattatgtgagttaagggatgctcgatgttgatagaaatgtaatatatatggtgacaaatatatatatatataatatatatggattgttgaatccaattatgtgtcgaagcagatctcgtttatcagatgatatatagaaatgaacttaaaaatcaaataaataagatactaccaagtttgtaataaaggattgacaaaaaatagtttgtaataaaggaaaaaaactaagaaagatagataggtatacttttgtaaaatgaacaaatatctacatatgttttactaatgttatttaaatttaatatatctagatattttcattcattaatttaaattgaaataatttaaaaaactatattaaagttataaaataggatgcagatgaaattaatcttattactattatgcttctatagaaacattaaagtagaagaagatctgcacaagttggtggagaagtccatatatacttggacgatagtatgggccttttaaaagcccaacagttagaacccaaaaaataagagattgatataaccgtaaataaacaatacgacgatatttaagtctccctcttggctaaaatatgttgacttggtggtaaatgatccacatacgcgtaatatattctggttatgaaaatctttagtgaaccggattaaacccggaattaagttgtgtgtttaaaacgtttaattatctataaaatagaaaagggacaccaatactcacccagcaaagtggtagtgactcagcatgatgctggagtcgcaccagggttcgagtaacgaaattggtaccccgagtgagaaggaaaaattgtttcctctcgacttccatcgagtgatgatggttggcttccactgagtgtcaatggaagatgaatgacaaaggagtttattgtgactccgtcatgaccagactgcagtctggtgtccgggtcttccctgaagtgaagattcggggtcgggaatgtttatcacagagaatcatgcctctggtgatagccgaaatgaggtaatccaaattacctctttttttataaaagacagagaatcaacttctgttactacaaacgaggaacagagcatcaccttaattatctgcaaattaaaagacattgacttgttctttgaatagtgtgtttggctgattcattcaaacttcccatcatactactactaaaccgactctgaccagtgcaaaaaataccagctttccaccaaaattcactatttcgtttcatattattctgatttctgaatatatgcaactataatatattatgaggttttttcattcatttatctttatgtagaattatcttcttcttcttttttttgactctatgtagaattatcttaatgtagcttttatctataagtgttgaaattttattctgttcaaaataatcgttgaggcaaatcgtccgtactatatttagattggacccattctcttataatatttgtttagtttattgctcaaatctaataagattttattgtggagataacataacaaaatgttagtagattttctttagtatgtttaatgtaacttgtaacgacataaaaaaaaaaaaaaaattgtaacgacacgtatatataaaatgaaggacaaaatggttttaacttcatatcgcttacgtccaccttttgcatattttcttataaccgtttggatttgttttgaaattaattattcttagagattgtgtgattaacgataagattttgtgccaagtttcatgatttttttgtaagaaaatgaaaaggaatctagaaacaaaaaggaatgtcattttcccagaaaaaagcactaacaatttataaattaaatatattttctatctgatgtttgattcttttgtcctcgtacaagaatggagtatatattttaattggaacctgattttctttatcattttcaataatttaaaaatcgaacactatttaaaaacacagtatgattgtattaatgtttactgcataaccatacaatataatcttcaaaagtaattatattcttgcaataatgttgtcaggtatgagttgttttattttattctaaatgatttgagttgtatgttttggagcatgttacacgacataagggaccattacatggatatagagtgctaccaatgaaatatagccacgtcatcactaacagctgcgattatgatggtgggaccatagatatctgactttgacggctaagattgagtggagaaattagagtccatgtgagattgggtggactacaaagcaggagagagtttgatggacgtcgttacttgcagctaccggacgcaacaaaccggacttgatgcttaccatctcttgtttctcttactctcttcaattgttttgtcttttctttacaactatttcgagaagaaaaaagttctcacatttcattattgctacataatttattattttctacaaattatgaggataagtataaatttcatttatcaaaaacaaaaaagtatgaatttaaaaaatctaacagtataagaatttatcagttatagtttggattttcgtacctaagagttttacacctaaaatccatcagaatttatttcaaatccttcaaacttcagcacattaatatatatcactactttaaattttgttataaaatatcactagaaaaatatataatctgatgtcaatatatataatacaaaaatatggtatatttaactgctttttaatgtatttaattaattttgttgccaccaactaatcatgtttcttcaatgcattgcgattattattcaaaaaacattataatagggaagaaatatataaataagaaactccgtgtattggacgcggatacatagatagaaatacattaaaattttaggaatgaataatatattattataattatggttgaaaattgaaagtgaagaataaaagaaataaatacgtacacacatctttttctctgtctttaagagttaacgaaaacaccattagatttaagtcacatgtggctcttttgcatgttctgtcataaacacgtccatttcattcatcctcttcttcttcttctccttctatcctctgttttttgccctctctctttgtttagtggctgtggtcgtttgtatttggtgaaacataatttaaaaacaagtgcggctatctttaactctggccgacacatcggcggattcgactgtggtcggatcaagaagtgcttcctttttttccggcgtcgtttcttcttttatattcatcgatttggtgctctcgcaacttccaatagattacggctaatttctaaaatgaagatattaccatgctttggatttatccgtagaaagaaaaataaggtaacgtaattactactatttagtattattcttgtgaatattccggcgaaacagattttgcgttgaactcgttctgttggctgaaacaggggaattcaaaacctcagaaaacgcagagaatacttcagatcagacttgaagagccagtgaagcctttggagaatgatgagcctaacaacaaggacagtcctatcaagcacgagtcatatgacggcgaagatgaacgtgacgataaggattcaacgaaccgtgagttttctaaattccacgttcacgaacgagccgttgaatctgtgaaaagcaaggaggaagtcacagatacttctgaaaacggcgatgacaatgacgaggatgaaggaggtcacgtcagtgatcctggattaggcaaaactacggcttgggtgacgtctcctaagcttaaacgatcttgctccactctcagcaagtttaatggccggttccatggttctgatctccatgacctgaaagagaccgttccagttagtaatgaatcagtgaggtctcatagaagtgcagatagagtgatgctcaagaaacattcgtcgatgcagatacttccctctgggagccggcggctctggtggaagttgttcctatggagccataggaaccttcacaaacaccgtgtctcgctaaagtcacagcctttaaacaagaaccagcagtctggatacacctctgactttgctgagcacaaccaatccagccatgaagaagaatctacaaactattgcgctgatttcaccaaccagtcatcaaacttgtggcctcatcataatcagtgggtcgcgttctctgccgagtcctcgtcaatgaagcgagtggacgagtgggtaagaggactggatgtcgaaaccgtggttccagtgaacgaggataaggatgtcttggccatcttcccaacctctcctaatactgagagatcacccttaggaaatgtggttcagtccggaaacgtctcagaggctatagtgcacgcaaatagccttattcaatcgctgagcaaatcatcgagcgtggctcacatctcgagcatcggcttgaaagctatcccgagcatctcacattttaccagcctcaagtcgattgatctatcaaacaacttcataggtacacactcttggatactacacattgttctgttttctaaagtgtgtgttgcttactggacattgttctgtttactgcagttcaaattactcctgcatcgcttcctaagggcctccacgcgttgaacctttccaagaacaagatcagtgttatcgaaggactaagagatttgacacgcctaagagtactcgatctaagttacaaccgaatttctcgcattggacaaggtaagattgcagtcattaagtagaaaacatacaatgcttgtttgtttccctgtcttaatcaaaagctatttatcaggtttatcaaactgtacactgatcaaagaactatacctagctgggaacaagatcagcaatgtagaaggcttacacagattgctgaaacttattgttcttgatcttagtttcaacaagatcgccaccaccaaagcaataggccagcttgtagccaactacaactctctcgttgctttgaacatcctcggaaacccgatccagaacaatgtaggcgaggaccagctacgcaagaccgtttccagccttctccctaagctagtttaccataacaagcagctcattaagccacaacgagccagggaagttctcaaagatagtgtagcgagagctgcgtttggtggtggagattctttgcaccacaggcgcaaaagaacatccaccaagagtgttgttggatcagcctcccctagcgttcaccaccgaggccacattgcaaaaggacgtggatccaaaaacagaagccaacgtcaactaagaaaaacttcagctgcagggacgccatcacattgaattgttctttttgtttgaatctcatgaattggccaatgcaaattgcaaagccatctccattctttgattttataattcagcatcttttctaacgcttatgtttccggttcggtttcaattctggtttactgtctttttactttttagttgatccggttctcggaaacatgtaaaaccgaataacactttccggtttaactcaattttggagatttttcatataatcaatttcaaaaagaatcgtaactaatctcgggttaattccggtacggtacaatgttgggtaagtatctcggattcggtgaacaaacagagaaactcagtgaaaatttactaaaaagctttgaacttatttcataaacatcttcacaaatattgaatcatattcttttttcgctgtataataagagttgttatagaaccaaagttgtaaagaaaaaaaaaatctagattctgtaaaatgggaactcacggaaccagataaagaaatttcaccggcggtcttacgtccccggcgggatatatatttcatctcttcctcctttcttccccgtatcgccaacacaagttggatgatttgattccaaaatgtgaggcattggaacaaaaaaattaaaaaagtggagaaaaacctgtgtctatgttcttcttcttcttcagattgattgtcgcttggtgaatggtttttggcagatgagaagtctttgttcactgctgctttcaacctctattactcgagcttcccacttcaactgcgttatcgtctctctcgccttttccaccagctgtgccgtgtcacggattatcacccatccctgtacaaagttttgtttattatagctaccagaatacaagaaacaataatgttctttacaaagtaaacaaatgtgtacctctggacgaagcaatcggtcaatctctgtgaatatatcaataagtagacatgtttttcggggctgacttgtctgaagcgacaagagattgtctgcatgtaccaggtcatatgttctcgggtaagtcgggaatggttcacacctgaagaaaaagagatgttcagaaacacttctatggctaaaatgaaaatccaataaggcttttgaactgaccagttgtgcaaaactccgacaaagccacggtcaagtatcatggggaggtggttaggtccagctgtagggaccacattcatgacccagactgattttcttgcttccaacaaggcggaattgagaccaccgaattgagcattcatatccagtacgtttctgagcatgttataaggcggtgatggatcttcatcgccgggtctttttggatgatcagagaatatcagaggagacaagagagaccagtattctctcactgttatcttccagttctcagcatcctctccaagcacctcggggtgaagacctaaaccaaccccaggaatcaaaatgagataacaaaaactgcagacatatggattcagaagcaatttgttactacggagactaaccatataatgaaagttcagtcttgttcatgttagaccggctaggccatcttgtcctgccttcaatgggaatccacctccggctacgtgttccacctatacacatctgaagcggcctgtaataaggagactcaacatcgtgccctttggtacacacagaagggcccactccaggtttcctgtttataggcaaagcatccatttttagaggacttgataaataaccataaatgtatccatatgcagattctgtaatacaacagtggtgtgtgtgaatcactgaccgggaactataacatttggtgttgatagtctttttccagacaactgtctcatcttgctgatttaaaagagtccaacagatgctttcagcaaaatcatgaacaaagttccatcttttaagatgatccttgttacgagggtttgtgagcggagatgtccatacaaagtaaccaccgggcttgagaaccctgtcaatttctacaaggagaagcccatctacacagcagattgaaacagtaaagttggatcttccatcgggttaaggacatgaaaaaaatcattctggggtgtcattaaactgttacctttctggtcccaatcaatgccacatcttaagcaatgcaacatatcaaaggaaagagaaggatatggcaattgctttgatataaaagagccaatcattgcaggaagacccctttcgagtgttagctgaacttggctacccgaagctt

SEQ ID NO: 1259 - DNA, 111301 bp, Arabidopsis thaliana
gaattctcttctccaattcgtcaactatctcctcctggctcctacggtcacggtattaaacagatctctcttctaaagacagacctttctttcttctaaatcagtttctgttttaccatcttctctccttgttgaattggactggccttacttgtttgtttgttgttctgttatgtttcaatttttgtttctctccagttctgctggtattctagcaaagtatagagaagaaatctgattctattttgcttctccaggacttttctttccagccaaggatatggatactaattccttgatgctcattgataacaatggctcttttgagatcgatgaccaatcccatgtccatgtcgatgcctcccatacccttgaacctgtcaccctacccaccaagcgcaggaggaagaagtctgacgtctggaaccacttcactgttgaaactgttagccctggatctgccaaagcttgctgcaaccactgccgcaaatccttcgcctacattaatggccaaaagttggcaggaactagccatcttaaacgtcacattcaactgggtatttgtcccatgaaccgagacgacagcagcaccctcgcacaaatcgttactcccaccaccaccactgatcctcccaagaaacgccataggtcttctgcttcatacacccctctagatcaagaccgttgctacaatcagatggcaaagatgattatcatgcatgattatccccttcacatggttgagcattctggatttactggtttcgtgcaggccctttgtccccagttcactatggcaagcttcaataccattcatgctgattgtgtcaatatgtacttgtccgagaagcacaaactttcaaacttcatcactgacattcctgggcgggttaaccttaccgttgatctctggacatctaatcaatcacttgggtatgcgtttgtgacgggacacttcattgatagggattggaaactaactcacaggcttctaaatgttgctgtcgtcccttctcctgactcagattttgctttgaatcagcctattgcagcttgtttatccgactggaatctggagagaaggctttccagcatcactgttgggcaatcagtggtaaacaaaacctctattgaaaacctcagatgctgtttgtctgccaggaaccagaatgtattgaatggtcagttgttgttgggtaattgctatgcccgcctcctaagcagtatggcgcaagatctgcttggagctgaggattttaaaacacccataaaaaaagtccgtgatagtgtcaagtatgtgaaaaccaaagatagttgccaagagagatttgatgaactgaagaaacaacttcaaaccccttcgacaaaagatcttctcattgacaaccaaacgaaatgggacactagttacgacatgttattggctgcctgtgaacacaaagaggtcttctcttgtttgggaaactgcgatcttgattataaaatattaacatctcctgaagaatggagaaagattgagatcctttgctcgtccttgaagatcctttttgacgcggccaatgttttgactggctcaactcgattgacagcaaacgatttgttccatgaaatgacaaagcttcagctagatctaggcaactcagccacgagtgaagatcaagatgtaagcaacctagcaaacacactgaaagataagtttgacgagtactggagagaatgtttcctgcttatggctgttgctgtggtgatggatccacgcttcaaaatgaagcttattgagtttagtttctctaaggcttatggggaagatgcagataaatggatcaggagtgttgatgatgctgtacatgagctgtaccatgactatgctgaacagagtcactccctgctggatgcttatgtagtccatgggaacgatggcttttctgaaacagatatgtctcaagttcacttccatcatgaataccacaactcaaatgggctttcacatgatcaaatatttgaacaacctgaagatggaaatccactgaatgaaaaacctttggagggactatctggagaaggtcagcctacggggacagaatcggtgggaggcaataccacacagggagtagaacaagaaggccatttgggagatgctgggacacaggagaacaatattgtggaagggcagttggaagagagcaaaccaatggatgggctgacacaaaagcctcttctgacagaagaaaatctgcaatccaatggagagccaactacggcccaggagagccggctaacagatgagacaatggaggaaacacatgcgaaccagtcagctgaggagatggcccatgagacccagctggttgaggaatttccatgtgagagccagccttctgagaacgtaccccttcagagccagtcaggggaaggaaatgtaccggagacactgccaatggaggaaatcgttgaagacactcaacctgttgaagaagtgatgcaggaagaaacgtcacaggtgagccggccagtggaggaaataccgctggaaaaccagcaagtggatgataaggatataacccatgacgtacagccggtagaggaaatgctcgaggacactcaaccagttgagggagtggatcatgaggctcaagagctggaggtgcatgatgacattcagtctgttgaggaagtaggacatgagatacagccggagggggaattgctggaggatactcaaccagttgaggaaggtgctcaggaggcacaactggtggaggaaaaccatgatgatgttcagctagttgaggaagcaggacatgagacacatgcagtagaggggatactagaggacactcagccagttgaggaagtggcacaggaggcaaggccagtggagcaaattcccgaaaacagccaaaacccacaagagtattctcgtgaaggtgaatctgtacaagaagagcagcaatcagagcaacatcctcaatcacatgcaatgccacatgaagaagaagcacaacatgattctcagtcacatgcaatgccacaagaagaagccacatttacaatctctcaagaaggtcaccacgttgacgtccttctccaggaaggccaccaccttgaagcatcttcacaggagtttcccctcatcaccattggagatggtttctcagactttgagctttacatctcggaggtaggcagtcaccaacagatgaaatcggaactcgaccaatacctagaggaatctctaataccgcgatcacaagattttgaggttctaggctggtggagcctgaaccgaaccaaatacccaaccctctccaagatggcagctgatgttttgtctgtacccttttgcactgtctctccagattctgtttttgacacggaggtgaaaaagatggataattacaggagctcccttcgacatgtgaccttggaagctctcttctgcgcaaaggactggttcaagcacagctcctccaattccacctcagaaaacaacctgaagatggagtcttgaggtgtccttgtaatatcattccttgtcctttgatgtagttttagctttaccattttttttttttaaaccatattttgctttggtcactgtaggctctctggatttttagccttgtgcttgcttatgtttcttttaccatatgtctctctttggggttatgtatgttgtgattgatacagttatgatttgatattacaatttggcatcgtagaaaattattttactttctctgtctctcaatatctctattcataagtttttctcttttgttggttttgagctgatgggaatgtgttttgcgtgttcctttttttttttgggcaaactaatcacaaataaaacgtacacatttagttaaaatgtcaacgaccgttggttttctcctcaacacagaaaactccctcacgcgcccaattttttaattttaccaaaaacagccattttttgtagggtggcgtcgacgcgctaattgtgcgagtgggtaagaatttgaatttcgcagttatgttttgggctgatttttatactgcccactgggctacacaagaggaaacccagtttcatataataataggcccacctaatcgacaaagcccaattgtaaaagaaagcctagttgaccaaaataatttcatttgtacaagaaattttgaaaatgtcatattttcgggaacctgtaaaataaccacaattgcaacactgggatctactacagtacaagatttgctctaatccatcctagttaattactggtagtagaacctgtataatatgattacagattctaatcagctctcgtacaaagacagtgtaagtaagtatctatgaaggcttctctgtcacaaattggaccttattggcacactctctaaacgcttcccaggcagctctgcaatgctctttcgatctcatcccttgttcaacaacctgcatcgctcttctgtgcaaatgctcataccattgatccggattcattatgtccacacgacctgacccaaattccgccacatagagacgtttcacgtccttccgccaccgttgcagtatatactgaggcgggacttcctgcaagccgttgtggctgagtaggaggagcacgtgtctgcattggtacccattgaagctgaaacccccacagacacagaagcaacgtacttgtgctgctgcacttgtctcgtagatgacctcaaagtctctcactttgtctccctccctctctttcactacgtacgaggaggccgacccgtttgagtggacttgcgttactccaaaacatgaagacattgctgagacctcgtcttggaaccttctaaatatctccattgtgaagacctttgccatctgggactcgtaggggtgcgttgttttgagcttggggatcaactttaaggactctgagtcgcacaaggcttctcttgtgtactttttatccagaaaagattcgtacccttcaaggaattctctcagggatgtgttctcatgaacatagccactgaagatgaacggggctgccacatttcccagtggaaaagtcagcgccccggccaaaaatgtatccttgaggtaaactggagcccagagttctcgatcttgaaacatgtccctgatggtctcgttatttgtcatcccaaagcgaatgatcatctcttcccaagctgtttcaaattcttcgaccttgagacaaccgtagactactctgttaagtgccatagggaacaagtcagaatcttgtagttggacaacactctgacagatgttgtgcaggacgtgggtcaagctaagacgatgatgagcccttggaaaaacttcagagacagcggtccgcattgccttgcactgttccgtgataaagatctgtgggggacggcctaacatgcaggttagccacgctctgaagagccagacataggtctcaaagctctgatcagcaagcaaaccacagccgagcaagattgtatctccatggtggttaattccaacaaaggccacaaggggaagctcgtatgcgttagataaacaagtggtgtcgaacagaagaacgtcgccaaagtgagagtatgcagccctagctcgagcgtcaatccaaaagacattcctgagactcccgtcgtcggcaaggtccatgaggtaaagaaagttggggctggaaagctgaatttggaagaagaaatcctgcaaggccctgaaaccccctctgagctccaagcgccttgaagattggaagtgatcaaggctgagatcgctggtctccccgctagagagtgaagttccaagagcgggtggtgtgtcaagggcaagggttcgatacaatttgatagtccggacttggacatggggaggtggttcgggatttgtcttagttgcaggagaagctgaggaggaggatttcttgtgagacttggaattgtgggcacgttgaggatcaaaggagtggttgtggtcgagtttgacttgatcaactttccatcgatcaaagtggatgagtcgaaggcgaatcatggcctggcagccggtgcgggtctcctttctccgggagtgagcatctttaagcagcttgaaaccttggcagttgcaacacaagacagcaccacgtttctccttgctgttacgcttagtccaggaggacttgacgcggatagcaaaaccgagctcacgggcgtatgagttgtagaaactgtaagcatcatcgtaggactcgaactccattccaggagtaggaggaggagccatcaaacacttttcattagcaaaagcgttttcgtcgcatccagtttcttcttcgtgattaggtgcgatatgaagcaagccgtgacaacaggcgtcatcatcatcttcaaggtcaatatcgagatcagggattggaggaggagcaaggtcatcatcatcatcatcaacaaccagctgctcttccatctgaagaccatcaaattcaaaattgaaatcgaaatcggaaacccaaattgaaatcaaaatttgtagtaaatagagagagagaaaggaagacagtagaaaccaaccgccgagatgcagagattagggttgggcgagagagagtggtcggacggtgacggtgacggtgagatgtagacgctattaccgatcatcttccactaaactaaaaactaaaatcaacaaacaaacaacaacaatcgtttcatctcagaggacgctgagctacctgaatcaacggagactctatccctttttttttttttgctgcgccaaggaataaagtttctatacacttggtttgttgcatctattctatgcggtctgttttgtttttgtcgcataactaaataaccagagcggaggcatgtctttatatatatggtaacaattcctcaatgactcatttctcacgaatcgggtaaatttgactgagcaccaccactatccccttgcgtaaaatataaaacatagacaactaactaccatcaaaactcaacatgggcaattcttggggggacttcgcaggcgtacgaatagggcacacaacttttgataaagaagttgacaaacgaaaacagaataacacatatcaacattacaaaatatcaatttgaacccaaacggacaaaagaataaattacagatgaaggacgcccacggctcaagctcaagctctcataacaacgaaaacaaaacaaaaattcttttcaattgcacaacaacctcctgaaaacaaaacagcaaacacaagttcaaattataatgtggttaaaacctctcttcaattggtatcttgagagaaattgcgtacctaataaaaataggtaacaataatagcagcccaaacggcttcataaagcagttggagaagcaccaagggcctgctgctcctaaggagctcttctctctcaccctcctcctttcactccacttagtcaaattagatgaccttcttcctttccactcttctttactcacttgctaaagctcatctccgagtatctgcacatccctcgtcaacatgtgctcgttagtgtttcatttcatcctggaccaatattaacatttcatttccacaaatatctgtatccaactactcctgtggtactttgatttcaaggtggtttcacgtcacactaacactgaccgataaataaactagattgcttcaaaactcacctacgaggctgcttgtttgggttgctatttgaccgttgagaattcccattgttcgtaacctctacatcaataaacccccatacgaatcagtctctccatgtaatcattcaaatttcttattcgccaaaacacaacaaaatcttctgaatccattataacaaccccatttaattggcaagagttattacttaccaggtctctccatgggctcttcatcattaggattattggaactgttctcttggctgcaacaaaaaatcaaaaatataaggtaattgggtacttgagctcaaattatatgctttactagacgctcataatcagagatgattgacatggttacatgagtgcccaaccaagaaagtgagtctgtttaatgaaaactacatgtttctgggtgtacatagtcgagaaactactaatctaagcacttaagaaatgtaaatctaacaggtaacaagcattttgcagtgggtctagaataagaggaaccacaaatctaaaatctcacatacgttacttagttaagggcttaaagctgcattcccatactactcttcctctaaggtaaaaagcaaagagtctacacatatgcatatggaaatgacatgttgattaacaatactgagaaaattatttctaaacctggacgatccggcagaggaaggtaaccctggtttgtctgcttggtaagaaccatcaaggacagtataaggtggacaatatgaaccccctaatgctccagggccagccaaaattggcagcctgtcaataatttaagaaaataatagcagtaataaggacctactatagatagagaaatagggaaatcaaacaaaaaacaaacagcagacgagtgaaagcaataattcaggttctgtttgggctagtaaaagactagttacaagattaaacatcctctcaaattacaaaagcatgcagcaagtcaactaagaatgcaccaaatatataacttttaaaacatagctgtggaactgcataccatgtcatctcaggatttccggtaccatgttctggttggaaataacctggaagagccattccaaaagttggaaccccaccatgctgaccaccgaattgcataactgaacatgaaaatgaaaacaaacaagtttaaactagtcaggcgtgcatattagcacctgtacaaaaaggtgccgttctcaagcggccctagacatgggcaaccaggccaagcggctcagcatcaatagctctcaatttcactagcatgcatagattgattctgaaagatgtctttcaaccattacaatgtaggatgaacaatgacattcaagaacaacttaccaggtagaaaagcagggaaatttggattgccgtgaccagctgccatcccggcagggcccataaactgtgtccctccatacataaaagatccccttccactaggttggagagacccttttcccttggcaaccaaagcacctgtttctacggctgactctatttcaccagaaagatacggattttctgatgatccggtttttggaggagaagaaggcagcaaactgataacagccgaatgttgattaaaaacctgaccaggaagttgagtacagctctggtcagtgcctttaggcattccacggatttgcatcggcgaagaaactttgtcaccttgattaggagattgctggtaaagcacttgcccatgaggaggtacacctctaccatgacttgtagtctgagcagtgcgtccccacaaggagctggattttgtattcccaaacttctttccagtcggattagggttttcattaatgtgcagcctacccatgccagcttgtacatccttttgtgccaagttattgttggatcttgaaggataaaatggaggagaagctgaatttaaacttgaagcaaatacattctttttggcttggatggcttcagtctctaaggtagctgtttctgttggtggacgccctaaatcaacgtgtgacacttccacagacgaattttgggacctaaagattccgtaaaaagacacaacaattagagacctagagccttcatgtgttgactagagaggaaacaaaattaaggactcactgtttggtttgcacagaaggtgcttgattcccatttctcaatgcaacctcatatcttctggcccccctccctctcgtgacagccttcggaaactgattttggtgtccattgccagtaaattctttagaattgttcccccgagactgtccacggtcctgacccctaccctgaccacgacctctgcctcggcctctcgaagtcctcctctatgttcacaagtttaattaatcagctttcaaaaggaaaaaaaaaaggaaaaagaaaaaagaggtggcaaatgtataaacacagcaagaggaaacaagtcgatgaatacaaatatatttatgaaaaggagagaaagagaaagagagatgatcagagaaaagtacatcatattgctgtttctgtgtattcatttcctcgaatttgtcatgtccccactttctttcatctctggattgccagagcctcctaccaccacgcattcgcctacagaaataaaaaacgaaaacctatatcggttggcattaccatgtaactaaacagaatgttaaatggaaaaatagcagtgtgatggcatctcgggtagattcatacataaagattcacaatcaaagttaaaacataaaaccaaagcagttgttccaatctatctgaactctgaagtacatcatgagattgaatgacggaaagtcgtttgctaatttcacctatcaatgtactctacctcaatagtagatagatacatttgcatagtttggacaaaacactacctcctcatagaatcaaaaagagtttacctattagaggcggcatccaattcctgaaatctgtcatcatgcatatagaaagctccagcagtaggcactgcaaaaggttccttcttcttttgttcctctccatccacaagatcagtggcggcagagtcatcggtcccattgccggcgacaattgtcttgtcattattatccgcaatgtattcgacatggtcatcaacttgtccataatcaccatcttcctcttcgtcgtcatcatcaccataactatcttctatgtgcaatccttcattatcatcagagtcgacaacaacaacaccactgtgttcatcggaatgaatctggattgctgctcgcagcttatcatggtcgtccgcttcttcatcatcctcatcatcatcgctggcttctctcctccgtgtagccaaggagcggttcaactcgtcgggatcactctcatagtcggagtcttcaacgccatcaggggccatcaatccctctaaatcggagggccaaaccgaaaacctagaagaggaataaattgaatagagcaatcaatcggatatgggacaaactagtatatctctacggagagagacgacgataccaggagatcagagcgagagaatctcctcagtgtttcttcatgagagatccgcagatagatagatagagagatagataattataataagaaaaaacctcttaaagattattaagattgattgggtttactttgtagacgggaagactctttccgttgggtcttcttatcaaatcgaatgggttttttactacttgtagactgatgatgatgcacctacaacatttgacgcttgagttcttttttcccagtttttgggaattatccaacttgactactttattaacttttttttaaccaacaatactaattgataagtttaatacaaattagctctaccttatcactttttctctcaactattgttgtctattaatcctgacaaaagtgaccatgttaatataaataaaacatgtggtttctatataaatcaagggtatataactccattggtcaacaacttgaatatcaatcaaaaccggaaaattaacttccataggtgcatgcaagtgtgtaactcaatggagtagttgaacctatacacagtttgcagtaagaagcaacaagaaaatttaaaatcatttccaagacaaaatgggtagaagaataatgatatggtgatggtgattacggacagtggaagaatgcaaggaactttgttttgggtccttgtttgctttgagagatgtttcgagatgcgtctcctccacaatactaataataatgcaccatgcgttatcctctggctctttcccaacttatcccttcactttgattatttccaattaagttttttgctactgctattgagttttgcaaaaaaaaaaaagatatcaactacataacctattgaatcgaaagtcaaaacatattatatgggtgaaatctcagttcaaaacagatattctacaggtgaaatctctcataagttaaagctacataagagtcccaaaaccccctttttttttaatatgtatctgtattaaaagcacaaagcggaagctatcaatagatcagttttttaacaatggaaactaatctctctctgtgctgcctcatttctctgctgaatgtatcaagtttcaaagccaagaaaatatctatctgtgtatgtcttcactcttcaccaaccctactcttgtggcggtgttagaactgtacaacaaacaaatatttaatcagtccacggattgataaaaaagttaatggcatagagaagcactatttaaaagacagtcaacatcaaaagtaagatgatcagtaagacgaagatgggaggcagacagatgaggaaacattgatggacagatgcaaacgcaaatcctatgatatatgtgcagatggcaaaaggatattttggtgcagcgacatcttataatcaattgataaccacaaatgctataaggctgatgcggttccttcactaatcttaccccactgttcttcagactcgttaccattaactagcacagcaccatccgtagagtcagcgtccaccacaacagcctcttcttccacattctgctgtctcccatcactactctcttcctgacgatcctcctcctcctcttcctctccatcttccccctcttccccaacctgttcacaacaaatgaagcagcgacagtagaattaatgatcctaccattgtccaccatggccaagaccattggattggatatcatgggtaaaagacaatcctcttcaatgcatgtaatgtaaacatgcatacctcgtcgagaacatccccttgctcaagtcgaccctcttcctctatttgcataattctaaaagcatccactaaagttgtatgatctctgtctgcatgactacaataatccccagcaggaggatggacgcccctgcaagataagtcaacaaaaatactttgtttatgaggatcctgaaaaaatgaaatcgacattcggcttatgtttatacgggtataaattcaaattataagcaaatacatgacggctaccttgctatgtaatacagacacatgactctaaatggcttaagtcccacaattcaattaaaaaggtttcctcataagcactgtttttaagaataagctaatgacggcaacgacgaaaagatacctcgtctctgcagctctattttcaagggacagggcgacttgccactcctcaaagagattgggatactcttcgggatcagccagagattcagcagcctttggacttatctatatccagattgacagaggatgaagaaaaattgtggatatctcaacaggcaaggtttgaaattcaatcacaaggtgcatcggatgtgtctaccactaaccttggtcaaatcgtttctccacaatgccactatttcggagaccttgcttggaaggtacgatctcgccatcagagcggcttcaggtattcgattactgtaaccatattaatatcagcatagacgtaattagttgcgggaatatatgttccacatgtaagaaatagtaaacaatgtacctttccaccaacagatgcaggcagtcttctacttgacccaacatgaacaagcaaagaaaagcgacattgttctttccttgctcttttgcaagtgctgccagcttcatcattccatctgcatctcccaatgaagaataaagcagcagcagaccactcaaatccatagcatgcctcatgcattcctcagccatatccagctaagtagtccaagcatgggaaggaaaatgaaaagaaaaatacatgttagctttaacctttgtaagaatcctagaacactgattgcagctaaaaaatggtcaccttcccacttgacatagctaattctccaagttgcttccatttagattcattttgtgcctctacagcaatgtcctgtcaaaaaataagaatcgagtaaaaacatatcggtaagtcatggaaataaagcttctcaaatggtaaaaactacagactaacctttgcgacagccaatctaccgagctgtatggccaactcaaatctgtagtcaggatcagttgctacttctagagcatcttctgtcatgccacgtgactccaaaaagtgtgccacgctgacaaaacgaacaggattttgaagtcgagaatcagaaaagtaggaatgcgtgaatttaggaaaacaatttaaaccattatgtgaccttggatacatgtttactaacaccataatccagctgtaaccataatgcgagggaaagcacattctcatacctattatggtgctccttaggaattgaaggtaagacttcattagcctgttccaaatctccacgcatcacaagagtcttgtactcaatcaaacttaaaagtaaagtgtatccaataacactgtaatcataaagtggacacagaagtcagtaagttacaaaacattgttagcaatcataacagtaaaacatctgcttacttgaactctttgtcaatcaaataaaccctgctttgattagcgagataacccaacaagtacataggacggtccagatgatacattgtagttacctgtaatataagaggagtactgaatctcaattacaacaaaataaaaaacataaaacgtttctttccaaaaacctagaaatgagccttacctcaccaccaacacagtaattaagcctccaagaagagttggtatagataaaacaatccccaacccataagccagtccgaacacgttcattggtttcattgagaagctcaaatgcgtcctcaatgccttcctcatcaatttgtttaccgccatcaaaataagaggaaacaatgtcacgctacagcagaacagtaagaaaacagcttaaaaccatgtctcgaacagcaacagtactaggaaaataaactaaggaaatgtacaagagttctggctcactaccaaggtttaaaaaagatcctcacattgaacttaaggatgtagaatgatgtatcactggcaattgcaactagatcaccactgtccgcccaataaagattctgaaacattgaataaacaaaaacgttaaaagtgaataagcgagcagtaccaatctgcttttgcgtttaaatttcagataaggaactcttttgtatttctccaataaaaatattactgaaaacgtaacctataaactattttcttgtagaaactaatggatctacttctggtatataagcacttactttgacagtaacatctattcgcctaatcaacctacattccgcccaatcatagaagcatataaaatcacttgagcacattgtcaataacgtcccaccaaaaatgtgctctgctgagaaggtgggtctcacagtcttcttttcctgcaaattaaacaagggtatcagcataggttagtgtatttcagataacagaataagacacaaaaaacaaaagctttagagttaatcagtcggaaaaggaacgtgccaaaaggaattacaaacctggaaattcttgctgaagatcttgatctttgtcgagctttccctgacagcatgctccccatcagatgaccaaacaaattctagcgcagagccaaatgacctatttcgccacgccaaggcagtgtagataatatactcaccatctccacaaactaccacaaacctaccattagggttgtgcttcaagctctgaaaaagcaaaaaattaaataatagaaacataaatgacagtgggtagtcacaaaattaataaatgatttaaggtcatatttcttactaataccagtaatctatcaaactgcccaaaaataaataactagaagcaggaagcagcaattcaagaaaaacattagcactacatatccaatatatcttccataaatgtagaaatgacaatccagagatacaaaaccacatttccttcattgtttaaagggagtaacaattatacaataagaaggatgccacttacttgaggataaagatcgcaggtccctagctctttaacggccaaaggaagtctctcaccatcagtgacctaagtaggctcagaaccaaatgataaacattgccaaacatgagctaattttcaaatacacaaggcaacaatgtaaaagtgttaaaccccaaacctcatctgcgcccacactcttgatgtttacagtatgtatctcattgtgtttagcccaaataatttttccgctgttatccatactagccactggtatttcacggccaagtttcaccattatggatccttcgtcataaccaattacaaccctggaaaaagacaaggtattgccatctcgtaagttatgaaggaaacataaatttacacaaagaaataattatgatgtgaagatatatatctttaatagggaataaatattgacatagtaaaagatcagaaacttaccggcgtgaacctttaatgtgtccaatagcccaaaccctctcaaggccatagttcaatgtattctcaagcctagatgtcaagtattaagtaaaaaactgttggatgaagatttttgaaaaattgaaggaagtttttaaagacaaaatcaatagcagctccaatgcagacagcatacgagttacctgtaagtggtggcgtgccatatgcgaacagttccatcctcggatcctgtaataattataggtagctctggatgaaaagatactgcagaaacattgtgtgtatgaccttcgagagtctgaacgcaactctttgtttggtaatcccacacctgcttccagaagaaatttatgaacaatatacaaacagaaaaccctgcacgaacctatatacaaacaatacaaatggagatacatacaagcacacatatgtagcaaacaacttgcaaagaagcaagaaagctcagtacagaccttagcagtatgatcatcagaaccagtgattaggtatggtttatccccaccagtaaagtagtctacacagtttacccctttgagatgtgcatccaaagtaaaatttggatccggagagccaagattccatatctaggtaagaaaagatgtagatacaggaaaacaaatgttaagcttctcataatgggaaattgggaatgaaagaagaaggtgtaacttaaaagttgaagactaatcttacttttatggtacggtcaagggatgcactagcaaaagtattggtgtctttggggttgaaagtgacttgcataacataatgggaatggccttcgaaaatttgagtgcaaagccaacccttttcccagtcccagagcttgatgagcatatcatcagatgatgataagacatagggaagcgtgggatgaacagcaacacagcgaatgtaatcagcatgagcctcaaatactttgatcttatccatagtgttgtagttgtagacacgaataaacatgtcatcagctccagctacaacccactgcttccgtgcaatgaactttgctgaccgaactgcacaacaccaggacagagattcaacaaatgatgtgcgaaagaataagaaggaacaatgagatgctatatatcataccaggcaattcagtcacgtcgaaagattttaccattgtctgcaaaagtcatatttgggttaacaataatcagaagggagcacaaaatataagagtgaagaccaacagatagaaagtaagataaaagcaagagatgatactaacctgggtctggtaattccagatgcacagagttccggaatacaaacttgccaggatcctgaaacaatctatggattagtacttgtttccttaacgatatataaagcaatgaagaatgaatgcgctcaaattaccatggctctgttggatggagatctacagatttgactctttctgatctttgagcaaacttacgctgatcaaaacaaagaagcgtgtcaatacagtcccgaataagaatgattaaggatgaaatcgagcatcaaaggagactgcattaccttgatttcgagtctcagtggctgtcaacaaaagaagcaaacacttaggttagtgccgaagagagaaacaaaaaaaaaaatagctcgtacaaaaatacttgatgatattctgagaaaccaaaacacggcatagtagaaaatatcgttcgatttaggggatgactgaaggaacatcaaattttagtgcaatgaggaacactcttacgtagactagcccagaaatgagatttcaagtaaaaaattgaaagaggattcagaggtagatctatggagaaactgagagatcatgtcactcaccatctttgcaagtccaaacgaatgtctgaaccggagatcggattatcgacggaaatggcccctgatcgcaggggggatcagagatgacgaagaagaagaagcgcagtggtggtgatcccacttccagtgcgcgttggcgatttggatctgaatctgggtctagtaggatctctaattcgacgtcgttttatcacgcgtttttgctcttttttttaacttgaccgcaccgtatataggagatgttacattttgacggacggccctttttacttgttagtacacagtaattttcccccccaaaaaacagtaaattggaaggattcaattggtggtaaaagagtatgatgaatgagacactggttttaaaacacacaaagctgcaccaagtagaggatagaagagaaaatccagtataaacaaaaaaaagaagcaacatgaaatcaataacctattcgagtctaatgtttttttcatacaaaagaacaaattgaaacgtattccaaagtcttagtatttgaagtcactaaaaattgcagtcagagttggtgcaccagtgtccaacattgttgcttggctagctgaacttcctttcgcccattctactcctctgatttcatctctgtacatcacaattgttaagagtactaggctctactaggctctacgagtcgcgctgctaacccacaagaatcttcatcacttgttctttcaccaatcttcaaacccctgcagcagcagcataggcagccaaatttaatttcatgttaagtcagtcttgagaaagtaaaaggtaaagatatgcttgttcacacagagagatttcaagaaagaatgatcatcttacttgagtggaagcgatccatagggatctctcgctgttcgcgtttaatgcacaagtactcagctagcaaagccataacagcgagtccggttccattaacaacccaccacgccatagaggaaggccatcctccatacatgatgcaaaagaagagatgtatgatgtagagagttgcagagaaatctaagcatttccgtgctcgctccaccaaaaatatcatgtacacagccctgccaattaaaatgaatacaaggaatctgaaaagactagtaataaagagggaaataaatggatggatactattactagggggcaaagcaaaatacccagcgagtgaagagaagaggaatgaggcaataacagaccaaccggtgaaggtggaagtagtgagagtagcgtaatcgaagaagtagacaagactaaggcgaggaacacgaaggccaagaaagaccatggtgaagagtccaagagtgagatagtaagagcattggaggcaaataatctggccaacgataagccaagggtcccatacagctgtgccatagaacatggctgctgcagcaaattgatacaccaaaatttaagtgtccctatatcaaaattccctatatctctacctaaacaaaaactctgctgcaataatcaaatacacagctaacgagatctaggaaatccctagtttcgatttacatcctcaattacagatcaattcggaaaacccacctaagatcacggaaggctagattcgcgaaagggagaaatcaaaccggatccgatgaattggcgcagctagagatgcaccaacgacgccagatcgataattctccaacgattcagccaagttccttccgagagcatggaaacgcagcaaaagcactttttcagagagagagaaacctcgacgaggtcttggtggtaacgagcgaccagaaaacagaaagaagaaagaggaaagaagaagttttggcttaccatgttgttcatgatataagtaacaagaatgaccgcatagcgcagtggattagcgcgtttgacttcggatcaaaaggtcgtgggttcgactcccactgtggtcgactttttttcctttttcttttttttttgcaacttagcttttctttccaatattgtgtttcaatcattcttgtatcccaaaatagaataaaagatgccctatcgataatatccatttttattcagcaacgtgagccactaaaacaattgatatagagagaaaacacaagtgtgtccatcaaatgaggatcagtagtaacaacgcaatcatacaaagtaagaagaaaaaaaaaacaagacgaagaaaagggatgagccggggcatcaggccacagcaaaactcacccgaatcaaagctttttattgagcacacaaaaatccccacacctaaccttacaacactaaatgtcacactcaaagagggagaggcccacacaataaacccccttcactctggccatctcattacgggttaagaggcattgccataggaaacagatcctcctcttcgtaacatgattcttcagcaccagcgttctcactttccttttctgctgatacttccctattgttcattcacggaaataaaatgtcagagatgtaattagttcaaggttaaaaagaccactcaatgctgctttgtaagttggagccagaagaacctgtgattttgaggtttttctgtgctaaaagaatcatccccttcttcgtgtatctcaatatcttcttttcccaagtccttggggtcacaatccaggatgcaatcgccaaatatataagttgtttttgggtttggtccatgagaaattatacaggtatagtcctcagagagagccatctcacgcccagagagggagcgagagtacgtggagatgatatccataggggatgatgagcttgatctccttggttcctccacaatgacacaaggatcactggaaagcttgggagttgctgtattaacattgttgaccttgacctgaggggcaagcacaatgtagtcccttctgaatggatcatcgcctagttcgaagctggagctcagaagagaaagcccgactttgtgagaaagccatttgtttcggtggaggggtgaagaagaagaagacctggggctaaagaggccaccaaagactccaaaatcaaggggagaagtagggctcctaccgggatcagagtctcctcctttggcaacacaaaagaagccagagatgctaaagagtggtggggtgctattgtgtttcaaagactcatcagacgaatctgaatcacttgcctcacccatttttattattagttgaccaaccaaattatgattcctttcacctgggtggatgattcacggaaactcattcctacaaaaatacacaaattaatattttacctttttctggtttcagtagcaatttataaaaatcttgtgttatataataatgtatgcttcattcaatcaatcaatccaacattgatactctctaccaataatctctgatctacaaaactaccgaattcatggttggatttgattcaggcaagtttcaaatcaaaactacagatattgcagacacacacagaaacacaatcgatgactatctatgtatagagaatctttcaaatgaagaaaataatataaagtctcctagtcaaaatggatgactatagatagatagaatctcaaaaagtagtggtagtagaagaagaagaagaagaagaagtagagaggttaaggatgaaaagcaaatttaccatcagtggcggctctctttgtttccagataagaggaaagcccccaaatgcaggtgctcgattttacaagttggagaaatgcaaatgaacaattttggagcttctccttcttcttcttgtcgtcgttatcttctctctcacttataatttggctggtggtgcgtactctgtgattgattgattgattgatttttaggaagcaaagagagaatacgtacaagactcgtattgtttgccttgcctctgtattttcctcttataaaaacaaaattattttccataagagaaaaaaaaaaaaaaaagagagtagaaaaatgttagaaataaaaaccggaagcaacgcctacgagtgatcgtgtctcccattatcacttatcaagtcttttcattttcattttttttcttaaaaaaagagaacaatatttgttgactacagaaaaaacaacaacaaagctttgctttaactcttgttttttattctccaatttatcagaactttttaaaaataataaatacaaattatatgagacattgtatgtgattataggcgtaagaaaataattatcaaaagaatatatactaaatccactaaaaatctgtaatgaatatattaattaacacttttgcaatgaccagataaaacgaaaaaaacaagaattaaacagtcaacacagtgctgattacattatgtctacatattgatttggaaataggatttatgggtttagggatctttcttacctttccaaccaaccaattgatttggtcccttatcgctgaaatgtaaagtaaatactgaataacaactttagagaattgaaaagacaaataccttcgttttcaattttattatagttacagattcagattgttatgcgtattttcttccttttgagaattcacctaatttgactcacccaaatacatttaatttgactcccccaaatacattacgattctcaatctttacaatgaccaaaccctatattaataatataacttaccaaggatagaaacaatttgaacttaagatttgtagggctttaccccgaagggagcccttccagaaattctcaaaggccataggtcaagcccaggcccatgagggggtttggaaatagttttcaaccagcaatagacgcgcctcggttagtacctcattagctgcgtcattatagcactagcttttgaggatgtgagattttttttatagcactagctttttgtgctctaaagtcacacaagcgatgtgggacaaaatagacgcacaccattatactccagttttgggcctcaaaatatgggcctcggaaacacttgctacttaattatccgctttatcgggttctcttcatttgttttcactattaaagatgtttaattttttgtcaatgataccttaattggtactttaaacattgaattgactcaagtacagtatcatcaactctgtgtttagattaagcgcgtgagcttcatttccaatacaaaaaaaaagaacaattactattcaacgatgcattgaatgcagaatctggaactaatggaaacagatttaacacagaaacaaatctaagaaaaaaacttgcctattaattaatgagattaccaacaacgtagcgttgaacagtttcagatttgaccaatgaacccctgttccctcttaatagcatcaaatctccaagaattggtttaaaattaaagaattctgagtttgttttcatgcagtagagttgtttggagagcaaaagtctgagaggacatgccaaacccattgcagaaatcgctgcatggttacctgtcaaagatcaaaaaagagacagggaagctgcaactgtcttcctcacattcattctcatcctcaaagaattgggtgcttggtaagcatcccaagaagctctccttctccttcaagcacagacgacgcagcagcaagaccagattcagcaaagaagaacccgtttaccaccaggactctgctcacgccgccaccttgtccgacattgatcgttttcttgaggaaaacttcaaatccctctgcatcagagacgaccaggaggatgatcagcatcaagcccgggtgaccaaaaacaaggagaaaagggagtcatcatcagacgacagtgatgatgatgatgatgacgacgactatcgtcacagattcgagaggacatggggacatgccgtctacgactccccgaaacagcccccggatttgctgagaacagagaggctatctcctccgcctggatcttcggagggcaggcctagcatggaaacaacgtcaacatcgtcggagaggcaatcgagatccaccttggtgctgccggagaactgcatcgcggtgttaagatacacggatgagccgcaagaggatttcaggcagtccatggtggagatgatggagtccaagttagggatgcgggaaagcgaagtggattgggacttgatggaagagctactcttctgctatctggatctcaacgacaagaagtcacacaagttcatactaagcgctttcgtcgatctcatcattgctcttcgtgagaaggagaagagaatcaccaggaaaggtcatgtgaggtcgctcagtactcgtgccgccagggacaggcttaggaagaggatgatcatgagtgacaactaactctcatgcaatttcgttttctttttgtcacaaaaaagttttactttccttcctttcttctcagcagccttaaggctgttgttgacttgttgttacttacaaaaagaatgaagagcgagtaacaatgttaatttgagttaccaaagatgatcgattgtctttttctcgttttaatgcattcctcgtaggcaggacgatactttactggcacaaagtctttgaatcccattagaagatgatccctctcacttccacagaacagttgcacaatggactgcatcacgtttgctaacttaatctccttcttcttcaatgcttgcatgtatccaatgaacttcttatattcttctgtgttgagtttctctttgacctagtaagatcatcaccgcatgtcttccaatgtaagcaaataactggatatacaaaagagaaacatggaaatagagggtttaggatctaacttgactcaaaaacgcagatgcacttgcttcctttttatcaccacctccattccctttcgctgtcaacactgacgacgatgcacttccctgactctctggaacctttcgctttttttttagtcccattgtgttcaaacatgtgcttgatgcaagcacttcagttacacaggtctgcgtctcacagttgtcgctttctagatccactacttcacatctcctctctaccggagtctcctcatcatcacttagttccaccaacttagccttccgtgaagaacaaccctgcataacatctccctttacaatgcgaggtatcttgcctgtatgtttaagaatggtcaaaccattccgtttaacattatttccgtcacgctccaagggtgaagcccgatttgcaggaggaaacgcttccagtctactcaactcattttgtgcaaccccaacgtttttcaaattactattacctgcaaatgatcaataaccaaagcaaaatcacaacatagagagttgaagttagatccatattctaaccatgtactaaagggaaaacatctttcctcagacctgagaataaaggaaaaaatgaatcactgaccaaaggctggtgtaggattatcctcgattgattccactggtaacaatgttgaaactgtatcgaaaaaagatttggcttaccagtggatgtccaacatataattgaaaatagggcttgaagaatacgagcattttgctatgaaaaactattgcatatatgcttactactattcatttactctttttttggttttgttccaacctattaagcaaaaatcttgtggatacaagataagcaattatatcattccccgacacccaaacgcaacccatagattatcacaaggaaaaaaacaggatgggagataatagggcaggcagactaagatatggtaacgtccaattaaagttatcttttggctgcaagatgcattacctatattgttctcttgttctgttacaagccttgcaggaaaatttgatctttcagtccggaaaaatcgagcaaggtcagaaataacctctccatatctagagtagcactgcaaaaccggtatatccagaaacaaacttactctccataataagacagagggaagacagagcataacttataccttgacgttaggtcgtatccaaagtgatatcttggattgctgggatggttgttcaaatctgtcaacaatagccaatatacgaaataatcagaaaaaacgagaatgagtatattgtcttttggaggatagttaagaactatagcaagtaaagttaggaaagagaatgtcagacacaatatcaaccaaaagcaatctcaaataaagagcatacgtctcaatttaaattggcagtaccttaactaaaatatttcatgcactatctattcgcccaaaaacaagaggcctacatctttacatgcatcatgcccagaatatatgctcgaaaagaacaatcttgcatgaaaccagaaaaaaaaagccacgggtagcatgaacaaaacctgtcatcacaaaagatgatagctccataatcatgacgatggcggattacacgtccaattgcttgattcacagcccgtgcggcttcttgactgtaccacatgcttccagatagtagggttgatcttggaagctacaaaattgtaagaaatattataccttgatgtgtcaataatcaaataaatattgaactcaccttaacatctgcaagttgtgattgttcatccagaaactctcgtttcaatttaacctgttttacacatggtttaatgatgctggaatacaagtagcagcataaaatttaaagctatgtggccccccagtgccagtttaaataaaagtgaagagaaatgagaaagaaactctgaaaaagaacaaaacagttcactaactgttttttgctaccatttcgctaatgagcctaaatacaaattcagaacaaaacattaaaggatagagcagacaaaccctaggatctgtcaccctggcataaggtaacccagtaatgacgacagctctgccagcaccgtcagcaaaatccagtccttcgctgacctgacaacacaacagagagaccagccatactgaagacactacactagagaaacttattgacctcctatcttttataccagcatcctcatacatactatatggatacaggagaaaatttatacaggttgaagaatacataccttaccgcgacaaacggcaaaaaacaccacacccgaagttgctctgtcttgcaatttttctgaaaagtcctaccattaacaaaaatacaagacacgattaaattaatcctattcaagagacgtagatcagaggcatctcttgctcacccgcattgctgcaggaaagagggaggaatccttgggttcaatgacaggtttcttgagcttgcaaattctttcccatactgtcattgagtttctgtaacactgaatgatgaaaaaacggtaggtttacaagctaaagagtactcattttttcatacttaagagaaaattaacaacggccataccccatttttccaaaatgtaatgcaagagtccataaggtaataggaagggaaaaatatcagcagtccttcaggcacgactcgagaaaagttaactgcagagtagaaacacatactaattaattgatcactataaggatagcagcttcgattttgagatctccccagactctagaactcggttcacaggtcagaaattcagaatgatacattcaggccatccaatatgaactaccaaataacaaaacacttacctatggcattcccaagttcttgtttgtactctgggacatcacgattgcggtagctagaattaagaacgtaccctgatggaccagtacttacaactccagcccatagctgatttgaggatataacatggggattctccaaccgaatgggaaagtccctgcgttttccaaaaaaagatgtttccattataagctgggggaaaaggcagatagacaatcatagtgagagaaaacattagcgataggactcacagttttagttcttgagccaatgaatccatgggagacaaggtccctgatgttaaaatgatagacccaacacctttttgtgctatgtccagcatggtaatcccaggactgaagcaccaccagctaagcgttcttgataccttgcctacaaaataaatcattcatttatttcctccaaagatatgactaatctttcaaaagacactgtttccagtttcaacaggggaagcagaataagaatgattactatgttttcaaattagcaaaacggcgtttttgttaatgctttgggacagcaacaatgttttgttttaaaggctttagaaaatcgcactcttatttacctttcatcacatcagtagaattttgctccagctcctgtacatgaacctaacaaaggacgaatgagatggtgtaagagaaagataattttcttttcaacttaattataaaaattcgacacagaatataaagaacaacactcttcttaaaacttacacgataaacatctgcatggttacttccattttctctaaagatcagcttaagcatgtcagcaatgatttctagtttgcttccagcgttggtcgctgttcgttgtttttcctcctccaggaacactgcagcctcctcaactgtaccaatgagtttaggagcagtttcgtgagtgatgttaaggcttttaagcatttcatatatgtaaggcccaggcttggtaaatccctcgtcccttttgggaattggcactttagaaatcagttcctgcagcttaagaagcagtcctgcaagagaaaaacaacgatagatgagaacaggcattcatgtataacagaacgttgtaatctcagtcaaggcctaaagtttgacctttaagtatagcaaaattctcagggtttatggaaacgtcatttaatgaatcccttcttgctgccgcaagttgtacacattcttgcgcttcagaaatgcaagccgataaaagaacagaaggaaggtcaaatgaagcagagtctgcgcataaactttcctgcgcatgttttaaagatgaactgagtgtttcgagaagttggaagcagtataatcgtttggtaacccggaaaaatagaacaaaaccccaagaaacgaagagttcatgatgaacagagaatacataaggaaattatatgtgaaacaacattagtcccttaccagattgtgcgcttcatcaaaaataaggacactattagtccagttgactttcaaaaactttctatacccattgctgatcaagtagttgtaaggtgcaaatatgatgtccacgtccttgtgaagctctcttgtgatataataagggcatctgaaaaatacaaatatagtacacagatggaaaaagccaggaacgtaagaaacgaaaatatttgttgaagtagcaaaaaaaatagaggaacctacggtccagaatcttttccaatattgaccaaatcctcaatgtcaacaggttcgtcgccaatatgagggttatgcttcaaataatctacaaaagattaaaggaaagggaaaaatagtaaccataattcataaagaagaaggatttataaatggtcgtttgatgatggctgtgtacctggaaggcgattgaaatggttgcattggcgtttaccgcgctttttgcaaaggtactgacaggcattagtgagtgctttgccacggagggagttgacttcctcattaacgcataactgctcccgtgatccaagcaccaccatcttaggcctacaaaattgattgagaagagatgatgagcaggtagctataaggcagaaacagaatttgtggtgtgtccgacctgtagctacttctttttaattctttgatcacttggcggagctgactatgagtccgggacgcataaactatggtgggaaaagctcctcctcctcctcctccggattgtgacagaggctcgtctgaatcggaccaaggaatggcactgttcttccgatccttacgggttgagaaagagcccagactctttcgccaggctaaggtggcacagagaagacaaagagttttcccagttcccgtaggactctccaaaagcgcatgacatttctgcatcatcatcacaagttataaacaagattagttaacaactaattcagcgttaatttaagaacccaaatggtcagtgtgaacggggaagaaccctaaaaagcgatatagaattggggaaagcaaaataaacaacagaatagagagagagagagagagtatcatcacgcgaatatcatcatcaacaaaacagttgaagagagttggtgtgtaaaaaagagagagagagagagggagagggaaacccacgttttgaagagactcgatgactctgtccatgtatatgatctgagactggtacgcctcgaatgggaattcaacattgattcctctgatgctgtaatttggcattttcgggtcggattccgccgataacaccacaaaacctctccggagaagacgaagaagaagacggaagcagacgcgcctcttctgattttcccgccttgtagggcttccacttcttgaaacaaccgtaaagcccattataacccactactttattaacaaggcccattacctgatacctgatggtctgtattggggcccccaataaaccctaaaccctaaactatttgggggagttaaaaagttttgttttgttttgtaatgctgtgtaccaaaatttgtccgagttagtacgattttctccttagtcgcgttttgcttgtatgtgtgtctctgaagaaaagtgatacagagagaaagaaagagaagggagccaatgagagaatatcaaaactgtgaaaaagaagtttccgtcaagattccaggacaaaagtattgtattttttgttttgtttatcaatgtaaaatctcatttctgtttcactcttcctccgatcccgactcttcagaactcgactctttcttctgtttcacactcccattggccttcttcgaccctctcttctcatccatatctttcttctcatcctcatcttcactgtactcactttcgtaatcatcatcgtaatcctcctcctcaatctcatcttcctcctccataccttcttctgcaatcgcaccctcatctgaaaccaacccacgtgtccctgccctggttcttttcaggactttcactttcagtgcttgctttttgtcacacccgatccatgtgtcacacaggcagaagcaagtcaagttgtatgttccctctgccggtgcttggagtttacccatgaccagccttgaccctcctttaaccttctcaatcgcttctctcactgcatcgtttgtttccttcacccctgcacccgaaccttccattgactcactgatggcttttgatgcagccgttatcgctccaccttcatccaggaagctaaccttctgagagaaccaaacgttgttcgacactgaatcagccagaagaacccaatagttttcctccttgtggaaggggaagtagggtgcatgaggaagagcgcctacaagcccattgggtcgtttcagggtgacccaagcttgaagggtcacaatgtctccctcttggatcccctcttccccttctgtttcacatgtgatgtcgactgtaatagacggcatcatttctagcaccttctcaatgtcctcaacatcagttgctgataaacccgctacctgagtaagtagttcagaacggtcttccaacctcatttcttgaagatcttggaatgatttaaccttctgaaaataggagaaacaatgacatgttaacataaaatggaggtttatatatgtctttagactagacctttaagtaaaccaacctaaagaaccactactacttatttggagaacagaatccaacaagattctcaggaatcaaaaagtgagagaaaaatgcacatgatatggaactagatattagtactgcacttgacacatttgatagtagtataccttccgtgctatctttttgacaacggcatcactgaaatgagggagctgtaagaaaggggaaatgccttctgatgatactccagaagacttccttgcactaagaggaacagcctgcgattttggatttttagtttatgttcctagacaacaacactaagcacttcttaaactttcaggaagaagtaaatcttgtggagaaaagagacataaagaactgaaagctcacaaacaaataaaaactagaagataggcgatgagagcaatttaagacctgaacaatgcactgagatagctcaactactccaactgcaggcctcagccatccatgcccttgggcagtgcgtggtataaccgccatctgcaagaaactcacaatgttataatgaaagaatggttaagaaaaccacaatttaacagtgtaaccaaaagcatcactattaacctaaatttctaagtcttttaagagtctgtttcgagttcctctaaaggaaaatacatatcttctaggttagcactttgcggtcatcgctttttgatggttattttatcagaaattgtgttatttaaatagagactagaccttcaataactcctcaaggaggcgaggtgcaagctctagcacacgcctgaaatcaccctgaagggctggagacaggactcctgattcacgagttaactgggcttgtatcaacagctcggtctgtacagaaattgaggaagtgagtatttcagtttatccaatatttagcattacagttgcataattttaaaattcaccttcactatggcaggatgctgtttccaaaacttagcttgctcttgcttcatgttcttcaggtccaaatttagttcactcctaacagacataaagagcttctgcagaggttcatcatcagttctacgaactggaatctccatgtactcagctgccttggtgaaaacttccataactttgctggacaataaaaattttaaaacatgtcatacaaacaaacgaaaacacagcccatttgtcatgcaccaatagcatcacttgaatgtatatgggtatgagtgaatataccttggggccagagagggtttcattagataataatatgcggagagtgtttgatgcataacgtagttcccagtatactttgatgacctcgagagatatataacagcaatcacaaggggcaagagaatacagacaccaactatccaaagcaataatatgccaccagatgctccatcaatgtctagaagaaattgaggaagagcaatgcccatttgaaatccctgcgatcacataacaatattttagtctcaataggcttgtcaataagacgggagcacatgcgaagggaaaggagatgtatccttacctgtctgccatctggatgaccatacttctcaaagttttcacgggatactgaatcagtcaaagcctggtatgctttagatatgaactccacaaaatatttattggcttctgtagagatcaacaaatgcgcatagaagaaaaaactatcaggatcaaaagctgcaaccataattccgtaatgatcaaaagggaaaaaaaaaataacaaggggaaaaacttgacctggatctggatttttatcaggatggtattgaatcgacagccttctatatgctttctttatttctgaatctgtaactccaggttccagtccaagtatactgaatgggtcaaaaacttgagcctgtaacacaaaagaaggtaaataagcaagtagaattagttgatataagtcagcggtgcattcaagttcaacagcaagcaatgggattacctcacggctcatgttcttagtgtaataaatcaagaaaatcatcacgacccagagtagcacaagtgtcaagttgctccacgtagagaagttagagatctgcagatagataagtgaagaagaggttaggaacatgcaataatctattacagagcaggaggttgagtggaaagtaacctttttaaacaaggatctcttatattttccagaacggtcacactcgagacactgacaatgaatggtcctttgtttcttggagagagcaccgcttaacttgaccatggtgtaaggcaccaaaggaattgccataatcgtcaagataaaaatgggaaacaatgcgctattctcttctgacgccgccatctttggagcctttaaactgagagattctattctgctgaaaggaaaagctctgttataatctcacaacatccaaaaagcttcaaggatacaaaattatcaataacatgaaaagctggatctgaggccactgaaattaattagggattctacatgacggagatcaacactaatagatctcggctaatctagtctaaaggtatatgaatccctggactcactttgagatcgacacaaaaccttagaaaacaaacaaacgaaactacgggaaggaagcaaaaccaataattggtgaaagaagatgaaatcgaacttgaaaggatattgtagaagaggaaatcgaagaagaagctcacctaggatgatagctctctataatcagagagatcgcgctgctgcagatcggcaacaaacggcgttgcagtttttttttctttatgcttctcttctcttctaatttctgatttctgattggtgagttctttcttctttacttgcttattcacttttctttaccttctcaattaaaatatttcgcaattcatttctctctttacatttttacgagttatttattttccattaaattagagtaattattaatagcaaagtttttatggtgaacgaaaacgaatttcccaaaaaaaatcacattttttataaattagaaaggaaaaagagaaaaggatatggatcaaagagggattatatgctctagagatttaatgtgatccagatattgtaatagggattgcaacaaatctcttatatgttctagagatttaatgtgatctagagattgtaaatagttacaacaaaatagagatttaaacaaaacaaatatttaatgattttaagaaaactgttttgttgtaactatttatatttcgaccagaaataaattgttctacttgcaaaatacatcaatcttcgttattattatcgatttaatcataaactgtctaattcaattaaatttataagagcatggttaccaatacttttttatctactgtaacgaaagctaataatgattttgaatgagtttggtatgatttggttattcgattcactaaaatagtcgttttaaatctagccaaatatcgtataattttacttgttttgattatattaaataatcagttatttgaaaactttgttgacatgttaatattatatataactaaaacaaaatatagatattaaaaacaaagaaaatgttattatatagctattatcgtttttcataccatttaaattttattactggctttcatattatgatattgttgtacatagacaccactgctaaaatgcttattaacttgagattttgcttgtgagatttggaggctaatttttttctcggttaagcatttctcgcatcatatgccttccacatagtttgagcttttgttcaccaaatgttcttaccactctcaagaaactggcagcacacgaatatgctttccacatggtttgagcttttctcttggacaaaaactcgttcaccaaatgttcctaccactctcaagaaactggcagcacacgcatatgccttccacatagtttgagcttctctcttggacaaaaactcgttcaccaaatgttccttccactctcaaaaaaatggcagcacacggtggagtttaccacatttgaaaacaagtaaataatgtcttacataattcacagtcactgctttcttcgatcattttcaagaattttgaccgtgaaatttgcaataccatatcttcaagaagacatctaaaaggttttcgcaatctggtgattaggttaatgctcttttgtaatacatttctttcattttatatatgatattaacatttataacaaaagaaaacaatcatagcatattgcatgtcattgcaagtttgctatatacagtagttttaaaccgagtaaacttaagatcaggtaggaaagatgcaaataaagaagcaagtgataccaaaaatatatgtaaacatttaatatagttcttcaatctaattgacgattagaaagtactgtactagatgattacgatccaagatttttgtccacactaagaatatttcacaaaataaggtttgcaacagtaggattgaaatgccagtaaacagtgacattatctcgaaaaaatccaactcagaaatcatttactagctaataatatttttcaaatagtttagaattattattgttgtttatcattaacgcatacaaagttagttgtataatctttcaacttataaataatttggttttggacggaagagctttacgcaaatgtattaatttggttttgataatttttatttgtagactcgatttgtttacgtaaattatgaaagagaggcaaaaataaatatcataagatatagtattagaagaaaaggacataaaagtagtaattaaaaaaaaaaaggaaaagaaagtgtgaaaagaaaaaaggaaaagtagagaggaacgcaaccctgggggcttcttaataaacccctctcgctctcttgtctcttccttacgacaacctctcctgctcttcgttttctctctacgacgataaaacccagatttgggttcaagcttccataactttaaacccctctcgcgatccaggtatgtttcccaatctttattcccagatcttccagatctgaagctcctcttctattttttcgtagatttgatttttaggtttgatctatttgtatgaatggctcgcgtgttctcccgtattggtgattgtaatctaaaatgttgatttgatttaggttcagtaataagactagttatctgacctgtgttaacaccaattagtcttctcctagtctgctttcattgatattccatccttgttcatctgatacttattttttttgcttttattgatctgagaaggttgctatcaaatacttgggagcccccagtattattgaataacacagcctgacaatgagtgtagtcgggtttgattttggaaacgagaattgccttgttgccgttgcgaggcaaagaggtatcgacgtcgtgcttaatgatgagtccaatcgtgagactcctgctattgtctgcttcggtgacaagcagcgcttcatcggcactgctggagctgcttctaccatgatgaaccctaaaaactccatctctcaaattaagcgcttaattggtcgccagttttccgaccctgagcttcaaagggatatcaaatcccttcccttttctgtcaccgaaggccctgatggctatcctttgatacatgctaattatttgggagagaagcgagcctttaccccgactcaagtcatgggcatgatgttgtctaacctgaaaggtattgccgagaagaatttgaatacagctgttgtcgactgctgtattggtattcctgtttactttaccgacctccagcgtagggctgttctcgatgctgccactattgctggcttgcatcccttgcgcttgatccacgagactacagctacggctttggcatatggtatttataagacagatttgccagagagtgaccagctcaatgttgcattcattgacattggacacgcaagcatgcaagtctgtattgcaggctttaaaaaaggacagctcaaaatcttgtctcacgctttcgatcgctcccttgggggaagggactttgatgaagttcttttcaatcattttgctgctaagttcaaggacgagtacaagattgacgtctcccagaatgctaaggcttctctcaggctccgtgctacatgcgagaaactgaaaaaggttctaagcgctaatcctctggcaccgttgaatatcgagtgtttgatggatgagaaagatgttaggggtgtcatcaagagggaagagtttgaagagatcagcatcccgattttggagcgtgtaaagaggcctctagagaaagctctctctgatgcaggcctcactgttgaagatgtacatatggttgaggttattggctctggctctcgtgtccctgctatgatcaagattctaactgagttttttggtaaggagcccaggcggacaatgaatgcaagtgagtgtgtgtcaaggggatgtgccttgcagtgtgccattctcagtccgacctttaaagttcgcgaattccaggtaattggtgcatatctacgcttaagtaaatgtcgttattttcatgtacttgtaagcaactcgagaacttttatactctagattatctgactagtcatattgtgatttattttttgttctcttaggttcatgagagcttccctttctcaatttctctcgcttggaaaggagcagcttctgaagctcaaaatggaggagctgagaatcagcagagcaccattgtttttcccaaaggaaatcccattcctagtgtcaaggctctaacgttttatcgttctggaacattctctgttgatgtgcagtacagtgatgtgaacgatttgcaagcacctccaaaaatcagcacatacacggtttgatctttctcccaatgtcatgactatgtataactgtagtgctcttgtttctaatggttgatctcctttttgtagattggtccgttccagtcatcaaaaggcgagagggcaaagcttaaagtgaaagtgagattgaaccttcatggaatcgtctcagttgaatctgcaactgtaagtttcgctacatgaactatttaaaggctcattctctctagtaactgattacaaattgatcatctagagtcgtgccttccccttatgaacttgggaatcctttaatttatgttaattgttttctcccccctaattgcagcttttggaagaggaagaagttgaagttccggtcacaaaagaacattcagaggaaactactaagatggactctgacaaagcttctgctgaggcagctcctgcttctggagactgtgatgtaaacatgcaggacgccaaagacaccagtgatgcaactggtactgacaatggtgttccagagtctgctgagaagccggtgcaaatggaaactgattcaaaggctagtttctctcttaactgatactgcttgctattcgcttgtgaacatcaaataattatggatacttattaatggattgtgcaggctgaggctccaaagaagaaggtgaagaaaacaaatgtaccactgtctgaattggtctatggtgccttgaaaactgtggaggtcgaaaaggcagtggagaaggaatttgagatggctttgcaagacagagttatggaagagaccaaggaccggaagaatgctgttgagtcttatgtttatgatatgcggaacaaagtgagaatctttatttcgtcttttcattggcagtatgcatatgtaaagttgtgagtattgggtactaacgtgtcttgttttcagctgagtgacaaataccaggaatatatcactgactcggagagggaagcattcctggcgaatctgcaggaagttgaggattggttgtatgaagatggggaagatgagaccaaaggtgtttatgttgcgaagctcgaggagctcaagaaggtaatgcatgcatatgatgacactttatattgtgcaggaagaaatcatatttcaggataatgttttaacagaggagtgggattaatattttgcaggtgggtgaccctgttgaagtgcgttacaaggagtcattggaaagagggtcggtcattgatcagcttggttactgtattaacagctacagagaggcagctatgtctactgatcccaagtttgatcacattgaattggcagagaagcaaaaggtaataatttggctcaatcttggaagcacaaaaaaaatcttaaatttctcaggcttggggaaattgtttgatgttttgttgttgtgaaatgattaaggttttgaacgagtgtgtggaagcagaagcatggctgcggggaaagcagcagcagcaggacacacttcccaagtatgccacaccggctctcttgtcagctgacgttaaaagcaaggcagaggcattggacaagtaagcaaggctccttgtgtctttgtcttttaaaagaaatgctaaatctgataatagagagtgaaccagctatggatgttttacaggttttgcaggcctataatgaccaaaccaaagccggtggctaaagcagaggcaccacaagccaagggaggtgagcaggcggatgagggcaagagtgagccagagcaaccagcttctgccgaaccaatggagactgagaatcccgcggaaggtagtacctaaatgaatgacgagagagagatggtgttgtatcgattttgttcttaactctttttgatttacctagtggaacctctttttctggtttcgctattattcccggaaaaaatctatattgttaattcttccttttcgaaaacaatttttaggaagcatcttttttcttattgttccttgtggttttgtttttaatttgaaagtcattttttctgctcctctatataactattatggagtgtacacggattcgttctatgttggactgggctgtttttataaacagcaaatgaaatgcaatttggttctatatatattggagctttaaaaggcaactttgaaccccctaagcttaacatcttttctcttatatcttacgtgaaatcagtgtgacaaaactcgtcttcctcacttctcttccttaccattgttgtacaaagaacatcttccttgatgaagcagtcgtagcctttggcaacatctttgaggtcatccaggctgaagttgtatcgtttctccaatccaaacggggttaaacaaggatgaattcatttcctcgttatgagcacagaatgagtgcgactgctacgatatgtgattaagctgcctgcaccagtgaggacaatgaaaatctctaacataaatccatgaatcatctctgggcgccgcagataatggcatgttccagacaccacaatgcaattagttcgtgcatatcttatgtaccacaaattctgataacaccagccacttctctataataattttattaattttaaatacattgggtttaaataattatatgtagactcgaataaaaatatacaaaaacactgggataaaaaaaaaaaacctaagaaaaaaaaaggcaataaataaataatttaggcaaaaatatcacaaaaataaaaaggaaatgaaagtgtttttaaaataaaaaaaaaaaaggaaaggagaagaacattccagaggaacccaaaccctgtggtggtgtctgctccttaattaaaacctcttctctcttgctcttcctttataaaagaagctcttctcccttcctcttcactttttggctgcgacacgattacagatttctcaccttcacccagatttcggtggaagcttccagaacgcgaacccctctcgcgatccaggtatgctctagttgcagatcttctagatctgatgcttctctttttcctcacttttaggttttatttatttcttgttgccagattacttgttcctcgtacttgtgtttcaatatgaatcttctgctttcgctgcttccggatttgtattttagtttcaaactccaccaatcttcgttgtatgtattgttgatgtaaacccaaactggtggttttattttaggtttagtaatacgatggtttaaggctacctggcctgagttaccgccaattcgtcatctcctgtaatctctcgagctcaagactagtctgcttcgatcgctatctgatagtgtttttcttttttttgttctataaggttgctatcgaacacgtgggacgccccagtactgaagaacacaaagcctaacaatgagtgtagttggttttgattttggaaacgagaattgccttgttgctgttgcaaggcaaagaggtatcgacgtcgtgcttaatgatgagtcaaatcgcgagactccggctatcgtttgctttggtgacaagcagcgcttcatcggtactgctggagctgcttctaccatgatgaaccccaaaaactccatctcacaaatcaagcgcttaattggtcgccagttttccgaccctgagcttcaaagggatatcaaatcccttcccttttctgtcactgaaggccctgatggctatcctttgatccatgctaattatttgggagagattagagcctttaccccgactcaggtcatgggtatgatgttgtccaacttgaaaggtattgctgagaagaatttgaatacagctgtggtcgactgctgtattggtattcctgtttactttaccgacctccagcgtagggctgttctcgatgctgccacaattgcaggcttgcatcccttgcacttgatccatgagactacagctacggctttggcatacggaatttataagacagatctgccagagaatgaccagctcaatgttgcattcattgacattggacacgcaagcatgcaagtctgtattgcaggcttcaaaaaaggacagctcaaaatcttgtctcacgctttcgatcgctcccttgggggaagggattttgatgaagttcttttcaatcattttgctgctaagttcaaggacgagtacaagattgacgtctcccagaatgctaaggcttctctcaggctccgcgctacatgcgagaaactgaaaaaggttctaagcgctaatcctatggcaccattgaatatcgagtgtttgatggctgagaaagatgttaggggtgtcatcaagagggaagagtttgaagagatcagcatcccgattttggagcgtgttaagaggcctttagagaaagctctctctgatgcgggcctcactgttgaagatgtacatatggtcgaggttgtcggctctggctctcgtgtccctgctatgatcaagattctaactgagttttttggtaaggagcccaggcgtacaatgaatgcaagtgagtgtgtgtcgaggggatgtgccttgcagtgtgccattctcagtccgacctttaaagttcgcgaattccaggtaatttgtgcatatctatgcttaagtaaatgtcgttattttaatgtacttgtaagcaactcgagaactgttatactccaggttatctgactagtcatattatgatttattttttgttctcttaggttcatgagagcttccctttctcaatatcgcttgcttggaaaggagcagcgactgatgctcaaaatggaggcactgagaaccagcagagcactattgtttttccgaaaggaaatcctattcctagtgtcaaggctctaacattttatcgttctggaacattctctattgatgtgcagtacagtgatgtgaacgatttgcaagcacctcctaaaatcagcacatacacggtttgatctttgcccaatgtcaagactatgtatgactgtagtgctcttgtttctaatggtggatctcctttttgtagattggtcccttccagtcatcaaaaggcgagagggcaaagctgaaagtgaaagttagattgaacctgcatggaattgtctctgttgaatcagcaactgtaagtttctttacgtgaactatttaaaggccgattctctctattaactgattacaagttgatcatgcagaaccgtggcttaccttatgaacttagccacttatggttcgttaatttatccacttttatctctcctaaatgcagcttttggaagaggaagaagttgaagtatcggtcacaaaagatcaatcagaggaaactgctaagatggacactgacaaagcttctgccgaggcagctcctgcttctggtgactctgatgttaacatgcaggacgccaaagataccagtgatgcaactggtactgacaatggtgttccagagtctgctgagaagccggtgcaaatggaaactgattcaaaggctagtttctctcttacctcatactgtttgctattcgcttgtgaacaataaataattatggatactttattattggattgtgcaggcagaggctccaaagaagaaggtgaagaaaacaaatgtaccactgtcagaattggtctatggtgccttgaaaactgtggaagttgaaaaggcagtggagaaggaatttgagatggctctgcaagacagagttatggaagagaccaaggaccggaagaatgctgttgagtcttatgtttatgatatgcgaaacaaagtgagaaatctttatttcgtcttttcattggcagtatgcatatgtaaagttttgagtattgagtactgacgtgtcttgttttcagctgagtgacaaataccagaatatatcactgactcggagagggaagcattcctggcgaatctgcaggaagttgaggattggttgtatgaagatggggaagatgagaccaaaggtgtttatgttgcaaagctcgaggagctcaagaaggtaaaccatgcatatgatgacactttatattgtgcaggaagaaatcatatttcaggataatgttttaacagaggagtgggattaatattatgcaggtgggtgaccctgttgaagtgcgttacaaggagtcgttggaaagagggtcggtcattgatcagcttggctactgtattaacagctacagagaggcagctgtgtctaatgatcccaagtttgatcacattgaattggcagagaagcaaaaggtaataattcggctcatctcgaaagcgcagaacaaatcttaaatttcacaggcttgggtaaaatggtttgaaatgtgttttgttcttgtgcaatgattaaggttttgaacgagtgtgtggaagcagaagcatggctgcgggagaagcagcagcagcaggacacgcttcccaagtatgccacaccggctctcttgtcagctgacgtaaaaagcaaggcagaggcattggacaagtaagcaaggctctttgtatctgtgtctctaatagaaatgctatatgataatagagattgaaccagctttggatgttttacaggttttgcaggcctataatgaccaaaccaaagccggcggctaaagcagaggcaccacaagccaagggaggtgagcaggcggatgagggcaagagtgagccagagcaaccagcttctgccgaagcaatggagactgagaatcccgcggaaggtagtacctaaatgaatgacgagagcgagatggtgttgttgtatcgattttgttttaatttacctagtggaaccactttttgtagtttcgctattatcccccaaacgattctatatttagttcttcctttcgacattttttaggaggtatattttttattgtctgttccttgtggtttcattttagtttgaaggtcttgttactttatttttgtttgtctctataatgattgttgtgtgtaacgtggattagctatacattgaacttgtttttaaaagcaaatgagattcaaatcagacattgggattttaatcgaagtacatatttgatctcccatagctcaacatcttctcctctgtcgtaatccttcaagtagtgggggatttgtgtgacgtcgatgcgcttccccacaaaactcctcttctcttgcttacctattccatcttctttgacgtagcttctaaagcaggtgtagccattggcaacaacgttgagatcatcaaggctgaagttgtatcgtttctccaatcccaaatatagcacctgccattttcagatgattataaatgtacatgtgattgcgtaaagctttaaagtgatccaactattatttaccttgtcacaaccgaatgacattactctccttagcatgctaaataacgcaattgttagatcatcgctgtagatcacatctgccgcgaaaatgaagcttgaacatttgactagttcaaagtcctgcttgttccaacagtagcttgacataaacaaaggagacagagctatgtcaacggggcacacaccaagaagatatcaagagaaggaagttttttatgaatacttttggggatctctgcagtcaccatgggtgtcttgaataggccaatcgctcatccagttgagctcacgaacatttaccacagtgtgggggtgaaacaaggatgaattcaattccaggttcttaccacagttgccaaggatctcgtctccatgatctatggaaaacagaaaagcctggtgagaacaccagctacagctagaacaataaaaggaaggaagtggaaggtgcaccagtaaggaaaatagccttggcgacccgtgcaagcaaaataccgagtagccctgggaaaaaaggagaagaaaagaaagcaagataagactgaacacaagatgggatgggatgggatggaatggaagagtatccaatcctctcatgtatgagagatgatgaagggaccacctgttccagcaccgagttccagacacacaatgccatggaaatcagatgaggtgcaaatcttatgcagcacaaattctgataagaccagttgagctttccacacctgaaggaagagacagtggtcgtcagtcatggaaaaggcaagagatatatagatgaggcatacatacatacatacctgcagaccaacatgacggagatttgatgtgatagaatgctgaatagtgacagtaaacgatgggcctgctcgccaaaagtattaagtaacaaacatgattagtgtggtttgactcatgcatgagagatggaaaatcaaatcttactagggtaattgcgtctaggaagaagaagatcgccatctttatctacactaacagtattggagggaaaagagaaggtgaaacgggaaagaaagggatcgtcagtggcggcgggagggcaaccaaggtgaatctcgctcatcacctcaatctctgaatcctcctccattttcgacaataacacgttccagatggagatgtaacgaaagttggattttaagcatcaaaagagtgagtttggattaaagtggcggcggcggaataagtttgttttttttacaaaagaattcacacacagacgacgacaacaacaaatagaccaatttttctttgggggtatctaattgactaatgatgatgattcacagaggagaaaatcaatatcgggagagggcatcgacgcgagcggcgacctcatcaaaatcggggacgcaggaggagggcttatgctgccacgaggctgttcgacgactcattctcctaaaaccctctccgcttgctttccccatcgactctgatgctctcatcatgttcttactctctactttcaatttcaatgcttccccttccgtttccgcttcaggtggcgggtttgcgaatcttcgtctcactgatctcggctttggttttccgcccgtcggcgattctgttttagccaacatacatattatcatcagtgccaaataaaataaaagtaatctttacttaaagatagattactcaccggtgtccatgagatgagatgtagtcatcttctccggaagactttcctgtttttcgatcttgggtttggtgtaaggcgcaggagtcatgaatctgtagtagaaaggtttcatttcaggatcatcctccgggccagtcatacaactcccgcttgtactcatggagtcttcttcgcttgtactcattatggacttgttgctgtcatccatcgagtcttctctgccatggaacgaaaggctgcttctcttttccatggtcttttcgggttcgctgttggtcttctctgtttttggttcttcagtttccgtctgcttatgaatgagagagtctggctcaaatcaaatggaaagatgtatttaaagcagacaaagaagacgactcacatggacatgatgatgatgaggtggtgtgtacaatctctgctctaaagacttggcatcccattttatggagtactctctggcgatttcctgcagcagctccactttcatttcctttgacggcggctctgctttgaatctctctacaaactgcaacattcctccgtggagtcagcgaccaagtggcagagcatataaaaaaatatagtcaacaaagaataaatacctcagggttcacaaactgatcaagtgtgtttccgtatctctcagcaaataaagatctgaggtcgcgtagctcagggacttcagagactctagcggctgcatatacaagggaggagatggcctcgcggcactcatcagggcaccggctgctcaagcaaaacccaatatttatttagatgaatggaatccatgcaagtaaattaaacaagtttagggttagtttttacatggatttctgtaatagagagacattggatgcaacacagttgcagaattgctccaaaaactcataacaagccagcctccttttctcctctataagcccttctgcctgtcacacaaacacatgccatcagaaccatctctctatgtacttactcatgtgacttataacttaaaacaggggccaagaatttcttaagcaacaattcactctgttataaccagctggtgacagcatcagaatgaaatatatctatttctttttttttgcattgcttccatctatacccaaaatagaaccaattaacaaagatttaccgaaaccatcgtacgttgaccctctttcagaaaagaaaaacaaaagaaaaaaaaaatcattctgatggaaatgtaattgctttcacgttcggaaaaccaataagatcccgtgattcattaagtcgatagaggacatgaataacgtgtctataactccaaacaaacaaaaaagacgcaatagaggctgccatatgcatgtaataaatgggggtaaaagaaaatgatattaccctgccatatgcattgtaatcgaggctgttcttgagaagatcgacaatgtcgttcttgagatatttgcaaaccgagtttttcttcctcttcaccgtgtctactcttgtcttcgttatcttgaccaacgacttgctgagaaatataattaaaaacaatcaacgaatgaaaccaggaaaacggaaaataagcagagacttaccatttcgtataaaacttgggtttgaacagcccatcaaacattttgcctttcgaaaaaaaaacagacaaggttgtcttcttcttcttcttcttctttttttttttttttttgttgtttttttttggggggttttgttatctctctctctttcttcgtgcaagagaaagagagagacagagagaagaaatgtggtccttttgagaaagatggcgctttaaggtaagggaagggcttttataaggaagagagaggaggtaatgaaaaagaagagaagcgaccttggcttggctcggtcttacatgagatctgaagaaacggacttgtatcgcaagaaaaccatggaaccctgtctccccgcttttttatccacctctctttctctctctctacgtacatgtacatgtattgatttagagctgtaattactaaaacagggtggagttcccgcacgataagggtgttgactagggtttgtttcggtattcaattcttattttttccgttaaaactctttgttatttcgcaagtgagtcagtgatgatgacgaatcaattcaatcattatgttctctcatatatatggtttacttcaattccatcatctcattcattcattcaaaacatgtgaccattttatttgaaattgttaattgttatatataaccatggatggacacaagtgttggagaaccccaattgggcccataataaaagccaagcccatatgacaaggtatgcctgtacatctttagggggtttatatgtctctgatgagtacaacaaaatctgaatatggttgatgagcttgaattatatattgtcttaattccttcgaaaacataagtaaatcatttggtaacttgacgtctctctactcaacctttttttttgttggcgttcttgtctctttgtatagaaaaagatgttcatatgtttgtgtactctacgttacttcttcttcttcttcatgtgacgatgatggggattacgtgcaccccttcttccttaaacaaaatccattagggagttactttttgttttgatagtgtagttgtagtggagcactgagagttatcaaatgaatgaggatctcttgaataataaagaattggagtgtggaattaggatggatctaatttcattaattaaagaggagcatgattatcattttttgttaatttaatttaataatggttaatgtgaaaaacagaggaaactagaagaagagagttttggcaggagatgtaggtggcgggagtgggttgggcgagagagatgatggtgacggtgcagctccaaatcttctctaatcttttgacacttttctataaaactccccaaactgattctctctgactgcctcataagtcattataatagtttcccccggattgttttttctttctttttgctaatcatcatcggtttcttctaatcaaaaaaaaaaacaaaaaaaaaagagggactacgttcgtacaatcccatccttggtatggatttctggccggagtttatggcgaccagctggggaagagagttcgtcgccggtggtttcggtggcgtcgccggcatcatctccggctaccccttggacaccctcagaattcgccagcaacagagctcgaaatctggatctgccttctccattctccggcggatgctcgccattgagggtccctcctctctctacagaggcatggctgcgcctttggcctccgtcacttttcaggttctttttcaaagattcaccttacttttgatcacgtcgcaggaataaataaaaagattcccctactttttgatcacatctcagaatattattccataaaacaaacgaaaagatgctttcttgattcacctcttttgtgtaagatcattcattcattactctcatacagtattatattgttgcagaatgctatggtattccagatatacgccatattctctcgctcttttgattcctctgttcctctggtagagcctccttcctacagaggcgttgctcttggtggtgttgccaccggtgctgtacagagcctcttgctcacccctgtcgagctcatcaagattcgtctccagcttcagcagactaagtctggtcccatcaccttggccaagagcatccttaggagacagggccttcaggggctttacagaggcctcaccatcaccgtgctccgagatgctcccgctcatggcctctacttctggacctatgagtacgtcagagaaaggcttcaccccggctgcagaaagaccggacaagaaaacctcaggaccatgctcgtggctggtggccttgctggagtggccagctgggtcgcttgttatcctcttgatgtcgtcaagaccagactccaacaaggtcatggggcttacgagggcattgccgattgttttcgcaagagcgtcaaacaggaaggctatacggttctctggcgtggcctcgggactgcagttgccagggcctttgtggtcaacggtgctatctttgctgcttatgaggtagccttgcggtgtctattcaatcaatcgccatccccagatattgtcacaggagattgagtgagtaaagggcaaagaaggttcattagttgcagtctggacctgtgaatgtagttaatattagcacatagtttgagatggatttggattgcatagcattggtcaaacaaatctgactcgctttagggatcaggcagtttactaatcacagttgatcatagagacgttccagaaatgattacaaaccccaaagaaaacagatgaaatgaaaattctgttactatatacttctctctccacttctttgctaatggtttttgtagatactcaaaataagagtgccaaggaagtcctccaacatgttcccatagacacggtcactaatgctgattggtttcggatgaattttcaacatttttatgtttaaagaattggtgcaacagtctgtgaacatctccatagcctttggtggaataaataagacgatctttgatccactttgggagcttgttggatggatgagaatgagatgttcttttggatggatcattagaatatcgagcatctaccagtaaaatggatgcatagtccttttcgtgtctgattgccctacctgaaaaacaagccgggaagaacattctgtttcagtcccattatcaattaataaaacacaacctccacttatatcgtcacatatagttgaaaccacaaactcaccgattgattggttaactgctttcatacacagattttcatagtattctttccctctccgtttgcagctctttaacacgccaaatcctgcttgaacatctccactgtagtaagaatcatcaaccaaagtcacagaaggttttatggaatctgaatctgcacgaccttctatatgctttattctctctaacaactctatgtcagacgggctgggatacggcaaaccaaccatcacaacacaccgacacatgctgtcgctgaagttgattccttctgacaccttcccaccaaccacagctagcattattgcccctctttcgctttctatcgcttccttgtaatctctgagaacagcttctacttcagtgtttttcctgggttctctgaacacacgcttcttcttcactattcttctgagtatccctgagttactccacgctgtgtgcacctgtgtttcatactcaaaggaggagaagaagacgataattccttcaggaaccactgccacaaggttgctcattaagagtcctaactcctgtatctgccaaccatacccagaaagtcaaaatcataggttactctcaatactctttctgaatctcattaatgttaaaggaaagaaacatgtgagaaaacgagcgtcatttggattactcaccattcctattgagcttcttgaactgtggctaaagtcaaaagactgaccagaaggaccatgtgaaactgcaattggcattatgctctcaggaggaacaatgtgactacatgagaagaactgcagctgatttgatggtagccatggaaagagtcgttcccttgtctcttctataggttgaagagtcccaccggccaatatgacagcatgcgcttcatccaccacctacaaattggtttgattaactattacattgttgaactcagagataaagaaactcatgtatgaaagggccaacctctgaaaataacttcgctccagtgagcatgacatatttaatgtaccctccatgttggccagaggtagacgaactcgtccttgagattattatccgcccatcaccattgttattagtgagcgccaccaacatatcagaaaacgctctaaaacttgttaacttgctcatttcttcatgagccactggatctttctgcaacatagcagcgactctctctccatatccactgacctggacgcacagttgactagcaaagttaaaaaaagggaaatggacaggagaaaaatgttggacaagcgaaaggggaaaatattaagaaccaattcaccttatgaatgatattgctttcctttatataggcgagtaacttgaccaaatttatattgtctatattgagagaaaacaaaaagtcatatattgccattgaacaagcaccacaaggcttgcttttagaggggttttcagtatcaagaccaacatttacgctactcagattcctatcactagcaagaggtttgaggaaagctcgggtaagaatcaacataatttggatatatctcctgtttccagctcccaagagattctggaatcttcccagataactctctatgctgcaatgtatatcctccaactgcaatacaaatcatttaaaaacatgactccacgtatggcctgacacagagaacccaatagcaatgcaaaagtccatccaaacaacatgtgctcagaaagctgatgaaactgaaatttatacctgtgacactgttagttttgcatcgtgcatactgagaagagtgtcagccaaattgtgagcctcgtctatgataacaacactatttttcaagcttaggccaagagattctcgtgacgactttgatagaagagattgatatggaagaataacaagatcagctgccggggccattcttctagaaccgtagtatggacaagttctcatctctcgtccaagctgaacaagatcctcaatgtccatggcttcttgttgaaaactctcagccttgaattctctctgtagtttatgttttctaagcattgggcatctgcaagaagctttggttcgtactattcttacatttgcacctaaattctgaaatgttgaagcttccattagttagcaaaaatcttacttttactctacttagctaaatgaccattaacaatgacgaaacaagcagatattcatttaatttggaagctttgattcagaattcagaggctaccagcaatgcgagacggaacacacttttatatatagataaatcatctcataaaacaagttgataaagtgtaccttctttttagagacttgagatatcttcttcttttgcaagtccaagcacctctcgttgattcgggtcacattcccaagcttaagaacatctgtacatgagctatggtaagtgtaagtaaatacgaagcaaacaatgaaaaagaacaaggagaaatggtgggtcaccttcgtttatgcacaagttctttcgggagccgagacacacaactttgagttttttggcaaagacagtctttctcaactccttgacaaactgggaaagctgtgaatgtgtgcggctgcaaaagaaaaccttgaagcctccttgttcgtcatccgagcagtcattctcatcttcctcatcctctgatgaactactgtcaaaacctcgggcaggttttcttttagagttgcctccgcccggagatgattcatcttggctttcgtattcatccaacaaaaattcttgatcgtttagctcatcagccttttccccttccgtgaaaacttccttagcatgcttcctgagagaaaatggggatttggtgtttttgatgctcttgtcaccattggctccatctgcttcgttgagagtaaaattcctcatccaatcgggctcgtcctcatcatcgtttccatcaaccttatgggattcttcggtcaatcctgagtttcgtttctccttgcggtcagtaagccactggagagcactgcagataatgcttagagattttccagtccctaagagagagagaaagagagagagagatcaaaccctaagtgagtctacttacttactactgagtaataactgatccaatgtggaaaaaaaaatatatatatataccagtggggctttcgagcatggagacgcctcccttatcgagaaattgatagagcgcattcatgaaatcgatctggatcgagtacggcttgtatggaaacgccgggaactctcgtatctccgtcattgaggtcgtcacagtaagggaaatcagttccggtttggagggtttgatggcattttgccgccgatttcgaagaagacgagcctgtttggacgtaagaatactctattctataggggacattgaatagcccaaccactaagctcaaacgatagaaataaaagttaagcccaattaatagatgggcctatgtgacagaggtcaagccagcactgttaatgggcctattaatgtatgagatccaaccccttcaattcccctctctctctctcgtctcttcttcactctcgtcgtctcttcttcaattgcagctagagagccatggcctcctccttcaacgaagaaaccgccaagaagttgcttacccaggtctgtaatttatctatgcttccttcactctcatctctaatttccccgatttcattttcgtagcttcttttgctgatggttgaaggttgagttctacttcagtgacagtaatctacccacagacggatttctcaacagggaagtcaccaagagcaaagatggccgtatcctgtatacatatatattgttgtagcatacagatatagttgaaaagttattccttagatgcccgaaactagtggttagtttgcctctggtttgttccttctctcgtatgaggaacctccttggcctcggtaacatcaatagagaagacatccctccgaggattgtggaggaagttgctaatctcttgcgcacctctgattttcttaaagtttccaataatggtacttgtgctttccctccctttggtttgtttgtcaattcttctggtgtgagatatatactttaaccttgttgatccaggacaaaggatcggtagaggaactaaactctccaaaccggaagaggtgcttgaacaagtccacagaagaacccttgcggcttcaccttttgagtacagcattaagatggaggatgtctcatctttcttctcccaatatgccaaggttcttcttctcaaatgactgtccaaacgagctttttgaatttgctcatctgattttacttgttcaggtgaacagtgtgagactacctcccaacatcgctgataagcgacgcttttgtggcactgcgttggttgaattctcctctgaacaagacactcaagatattttgaggcagagcttggtctatgcaggcgctgacttagtattaataccaaagtaagtaagtgggagtgggggatgctttgtgttttgatatatatatatatatatatatatatatatatatatatatagcggattggcatgacctgactattcctgtttgatatgcaggagtgattttgactgtcaaagagagaatatgatcaagcaactcggaaaatcagagtcccacaacgagtccgtttcttgtttttttgtcttatcaaaacgcttcttgattgaaatgcaactttgctcatttctactgctcatatttatattgctacagattccgcagaggacaaattgtcaaatttgcattgaaatggatagccagtgaagaaaaagtaacaaacaaaggtattttctcttttctcaggactgttaatctctgaaaaagtatgaactgctctttaagcaacttctctgggttgcagaaaaacccagcgctctgaaaaataaaattaaagagaaggaagataaggagacaggcattgctgatagagagaaggaaaatggagataactcatgtgctagcttgtgcaaggacaacactgatcaacttgtggttcccccatggaacaacagtaattctgtcagctctgaggttctcaaggatctttttcaaagatttggcagcgttgaagtaagttgcaacactttttgtcaaaccaccaatcccttaaaaagtgattgttgagttatcatcttttcctgtgcttactgcagcacatagaatactctggtggattggattcgggttacgtttggttcacagattcagaaacagcaatgaaagcccgtgcagctgtggagtttgttggaggtttagttgtgaagaataacttctcagtagccttagaagcaattaatggtaaggtggcaattccatggtgttagttataccaaagaaatggagttaatcatagaaacgttgaaaatgactagtgtactaatggccttcaggggagatggagagagagttgtggaaaagactatcatcagctgagctggaaggagggtatgacatcaaaccaaaccttgtttattcttcattgtagggaacatacttgggatttggcttgtaccaccactcatttgttctccttgctggtacttcattggttgtttaccaacctaactccaagattctttgttaatgtgcatcaggaaagaaggtcacaaaaaggaaaaaggcaaagatgagtgttttgaaaacgtgcaacctaccaagaaggcccgaaaggagccctaattaaagttttgggttttgttttatgtcatcctcttctctacgtttttttaggttcagctgattctcaacaaaatagatattgcttcacttgactgacatctatgagtagttttgtaaacgttttttggtctgggatggttaatgacttgacgtattgccgtatgcgccactcgtatactagaccaatactttgtgaaaagaaagatgagtaagagacataaaacggagaggattcgcctagtgttcaaatccgttccttatatacgacagtgcaactttcttttggaagagaaattacccttttcatgagttcgttaacataaaaacctttcaaatgaagtgaaaccaaatcccaaatgtgtcacatgactcagacgaccggagtcagaagtgatttcccagaaaagtgcgcttccaagttacccacgacaagatcggccatggcattccgtgtttccacagtgccactcccaacgtgagggaggagaactacattctcaaggccaaagagctcctcgggcacgtgaggctcctgctcaaacacatcaagggcagccccacctaggcggccttctgttagagctttaataagctcttgctcatcaacatgtggtccacggccaatgtttatgaggacgcccttagctcctaatgcatccatgacctgccggtccacaatgtgtctggtctgctcggtcaacgggcatgcgacgacgaggatgtctgagttttgagcaaggtcaaccaccgtcggataatacttgtaggcgacatcaggcttaatggttcttgagtagtaattgattgggcagctaaaggcttcagccctctttgcgatggcagtcccaattctacctagaccaatgatccccacggattttccactaaactgagtcaaccaaaagaaagaaagaatgtgacgctaaagcagagatagaagaccaaagataagatagggcagagagctcttttccaatcaatcaatagtgggtaagaagtagaaaccttggtagtgagttggaattcaccttgcttccattttccgctccttacatagcgatcgcactcacacagccgtcgaaggagagccaggataagcccgatggcgagatctgcgacgtcttcggtgagaacgtcgggggtgttggtgacgcggatccctttttctttgcatttccccaaatcgatcttgtcgagcccgacgctgaagctggatacaatctcaaggttgggcagatcgctgatgagctgagcatcggcgccggcagaagcattcccaacgacggcgcggatggagttccgatgagtttctaggaggacggatttctccggagaagtccagaagcgaagaaggttgaagcgcttctcaagctcgttctcgaggtaggaggacatggggcacatcataaggactccgattgattccatatctccttttctctgttttttttttttatttttcttctgcaaatgattgagtcagtgagaggtctgtgtataatttatcggaggttgacgataaagatgggcctatttttgggcccataattgatattatccgctttttatgggccactaaatgacccttttcaagttttcctcttggttccgaaatcatgacttatgtttaaagacaacattgcacgtttgatgatattcatgcaaattgttgtaggattcatgaacatgatacaaacacaagaagacatacactgtatgtgtatggaaacgtagcagattccccgttgacattgcatgtttagggaatccagtgacaagggtgtaatcacattttagtatgttactatatgataacattttataatttaaacggctctctatctctaattatcaatgttcaaaatcctaaataatgattagttaaaattaagaggtgtggtctgaaacatgcgccccacgtcccatcttccaaaaaaaggaagcaaaagaagaaagctccacaattttctcaaagccaaaatcactgtaacaattaccctttattgttttgcggctcgattagcttctccttcccttttgattctccccatctcaagagaggcccatttgatcctctctctttctctctctctcctctctaattctctattgccatcaagagaccaggaatggttcgtgcttcggaacaagaacaggaaacctataggagcaggctcttcaatttcaaatggaggaacaacgacaacaatagtgctacgagacacaacaagagtctcagcgtcgagaccggtttagatgaggctgccaccggatcccatgacgctgaaccattgaccattattcatcctagtcagggtccaccactttcaagatcggctgcggatgaagcagtcctcgccgccctcgccgcctcacaggctagagaaaggcagcttttggcagacatggagcagatgaaagagcgcttctccaagctgttgctgggagaggacaattccggtggaggcaaaggagtatcctctgctctcgccctttcaaacgcaatcacaaaccttgcaggttgctttaggaccctcttttgttattacacttagtttatattaaccagcaaccaatatctcatgtttatcttgttggtatagcttccgtgttcggagagcaacggcgcttggagccaatgcctgcagaaagaagagcaagatggagaaaagagattgattggcttctctccgtgaccgattacgtggttgagtttgctccatctcagcagaaaaataaagatgggaccaatatggaggttgtctatctgctgctgctgctgcattatatttcatttggtaacatacaatgattcccttattctgttggtattgatttaacagataatgaccacacgccaacgtactgacctccacatgaatatccccgcattgaagaaactggacgccatgctcatcgtaagacctctctctctctctctctcgttgaccaaatatcaaccctactttaataatttcatttaggatattcaaaagcatcctcttatcccccttttctacctaggattgtctagaaaatttcaaggaccaaagcgagttcagctatatctcaaaagactcccctgacttagacggtaagagaaacgacgaaaaatggtggattccgaccgtcaaagttccaccagatggtctatcagaagcttcaagaaggtttttgcagtaccagaaagattgtgtaaaccaggttctaaaggcagccatggccataaacgcacaggttttgttcgagatggagatacctgagagctacatcgactctctcccaaaggtaaaaaaaaaaaaagacaccaacaattgatgttattgattagaagagttgatgaagaataatactcacttgtttagtttgtaataaataaataaacagaacgggagggcgagtctcggggatcagatgtacaagaatataacggtggacttctttgacccggaccagttcctgagcagcatggacatgtcgtcggagcacaagatcgtggacctcaaaaacagaatcgaggcatcaatcattatatggaaacgcaaaatggtttataaagacaacaaatcatcggcaccctgggcctccggagtaagtctggagaagcgagaggtcttcgaagagcgagctgagaccattttgctcattctcaagcaaagataccccgggatttctcaatcttcactcgacatcagcaaaatccagttcaacgaggacgtgggccaggcggtgctggagagctactcgagaatactggaaagcttggcctacacggtactttccagaatcgatgacgttttagaggcagatcgagcggggaacaagaggaacacgccattggaagcagaggaagagacgctggttgggagcatgacgctgtcggatttcatgggatgggacttcgatcaggccgcgaacgccgaattggagtcgaagaaggatctaccggatgatccgttgataaaggagaagctaagcgtcgtcacgaccaagaagacctcatacctcgaaaccctaggcggtgtcaagagtccaacggcacggcattgatatttgtgtggaaaattaggcgcaaaaaagagcgaagacagatttattgattatttaattatttttaggattcaaaaactttacaaaagggcttttgtaaattcctttttatgaaaaggtgggcttttaagattaggcccagtttattgtaaaacccatttaccatctgtatactgtatacatcccttctaaatagtagtagtactcaccttatcttcattttcatcgattcgattccaaatcggaaggatgataacgtcgtccctaacctcatctctgcaagctctcaagctttcgtctccgttcgcccatggctccactcctctctcatctctctctaagcccaattccttcccgaaccacagaatgcccgctttagttccggtcatcagagccatgaaaacgatgcaggggcgcgtggtgtgcgcaaccagtgacaagactgtggcggtggaggtggtgaggctggctccccaccccaagtacaagaggcgcgtgaggatgaagaagaagtaccaagctcacgaccccgataatcagttcaaggttggcgacgtggtcagactggaaaagagcagacccatcagtaagactaaatcatttgtggcgcttcctgtcatcgcaagggccgccaggaaagccgaagccggaggagatgaactccttggccttcccttggagtctcagcagccggcgtagagaatgattgctctttgtttcttttggtaaagccgtcttttttttgctctgcttctgtttgtttgttgtgtatcccggaaccagtgtaatttatggaatgcttttgtgatttcattgcttatgccatgagtgtgttttcaatctgattgtttccgactaccaattgtttgctcttacttcatcttcacctccagttacatttagaatgtgaattaatatgtttctgttgctactgtgtgcttgtggtctcagtgatccgacttttgtttctgctaattctacggttcttgctcctcttgttatggttcatttgccaatggaatggaccaaaaaggtgttggataataataggattggagaagagagagctggtcgtttttgtacaaaactttaatgcactgctgctatacattatcatataattatatataggtaaataatatctgctgtgacttgtcatcagcaatcttcgatttgtagacttctcttaatgttgtgtagtgtgactgagacgaggtttgtcacggattccacagactccatattcagctttgctgcaggagaagggttgatgagggtttggagggcgagtgtcaggagcgaccctccttggctgtttctgtcgtcttgtgtagacgttattaccagtggccgtgactctactccatcaggtatgattgagaatccagaggggaggatttggatgttgcttggatcatgtcccgcgagcaccagctgtgtcgtgtttatatctacgggagcgtataccaccaccgactcatacgagttagtgctgctgtcttgcagcacccatatgctcttttctctcgatttcactgtctggaaatgtatagaaattcagattatcaaggcctagacagatttagaggaggagaagacaaaataaacgcacctggattgccactgagttgcctctgtcttgtcccttggataagtttgcaatagactgaacatgagctccgtttgacaaagcatcccactgatgatatgtatcgttagataaatatatgagtggaaaccgcttttcttgtttgcttaaatgtgtgtgaatttgacaaggtacctcatgccgacgagcttcatctctaaagaaatcgaagagaagagctggagaaacaggtaaccacagcgaagaagaagcgcagacaatgactcccgtgggctcgccaggatcatgaaggttcttcctggaagaaacccgcatgtcttgtccagttttggtggtgattttggtccattgatggtagcttgatgcagcaatggcgcggtagaagctttgtgtcattctctgagccatcttcagcacactctttctcccggcaagagttgtaactcctgattatcaacagaggagtgaaaaggttatatataaagaaagatagagagtgtaaatggaggatccggatatatagacggaccgagagagtctttggtggggacgttggtagccatgaagaagacaaggcgttcgcaatggagctgaagggtggcgacccagtgtcgagccccaaaggccaaaccggtgttgactaaggagcggaagagaggctgaactgtggatgcagacacgtcgaggtgctccacccaggtgaccttggagtgaccgttggaggtgtcctcgatgatgcaaccggaggggagttttcgacatttcagaagagaagcctccttctccgtgttgctgtcctccacggagaccgagacgtccactattgcccatttctcagggctcagctgccggcagcttctcacgaagtacacttctcttgtggggacgaccggagtgagcagctgcatctctccgaacatctgccacaatagttataaaccatatccatcccatgtatcagctgagtcgtcattcatcaattatcactatatgtatatattgatgagtactcaccagctgaatagccccgtcgatccgtgaaggcccttcgccttgccggataacatcgaccgttgcagcctttgagatcaagcatgcaaatgtctctttccattgtccctgcgcgttacacgtacacatcaattcctttttatacacatagaataagttatagtagctggtaacagtaataaataatggaaaagtaccacgtccatgaaactctgggcaagtttatgtgcgtccataaacacaatccccgcatctctagatgcttcgatggttttccttccaggaaacgaagaggcttgcgcttggggaaactccttgaggtactcatcgtagttgagaatctcacggccagtctcaacgctgcggagccacataggttcgcctgaggtggccatcttctggagttcaagggtggctcggttagaaatctcggcaatacgggacttctcgagggcaaagacgcccgtgtagaaatcgagagagccgagacggtgttcttgatcgtcggagcatgaagcctgcaggggatagggagtgcgtccaagagctgcacgaagcttatcgagctcggctttcagtttggagttttcgaggtggagatcatcggggcctcctccgcagttggggcaggaggaattagccttggaaaaagactccctcatggctttgttttcctctcgcagcttctctagttccgccttgagcagggagttctcgtgccgttcttgaatagcctgtccatgcatgattgattcataaactatatatatactactatagtcagacaaaaatccatatcacgtaagatatacattaccttgatctgtgtgcggcggttttggaaccagaacttgacctggcgaggggccagccctagttgcttgctcagctgctgtctttgcttctcgtccggatgtggtgtctctttgaatagcctgcaacgtcctcaaattcagacatttctaaaagatgaaaatctttacatgcaactgaaccctaactaggcatatgtatactattactgatcagctttaattgtgatgaaacaaattaacactttattgtttaagcctttatatacgttataacgcgcatgtacctacagtcatgtcaggagaagacggggaataataacgagtaagcgtccgaaaccatataagcgcattgaaactaatgctggatcatatatcatcgatcggcaatatatttgtatgaatacatcatctaagtatatatatgtatgtgaaattaatggagaattgaaggtgcgtaattgagaattgctcttcaacgcaagacaccttctccttcttccactaattaagtactacagtatataccgaagaaagggattaaaatcataattacttataaaacatcaagaaatatgagcaccggaaaaaacaactaatgaatgtttcttgatagaagctagccctaatgaatcggaatcccctaattaagtgttttaatttgtgaagcataattattaagtttatacttattaaaaagtggggtggggggtttaattagttagctaggtaaggatggaataattatatcgaacgtacgcttccatgtgtctgatctgatcggtggtgtgacgatgatacttcttcctctttctcttattagtgcccttgtttccagctgcgccgtcctcctcttcctcctcctcatcgtcgtgatcctcaccctccaaatcctcctctgatctggatctcgtgggtcctgagttctcgctgctcatctccacagtgcgatcctcatcgtcaactactcttctgcccaggaaatcctcctcagggttggtgctgccggaggatgcattccggaatatcccagcctgtatatattcctatctccattaaaatcaagacatatatataatatatgtttatgtgagagctagcaagtacatgtatgtagaaaagagagagtagtatacgagagatagagagagggctggagaggagaaaaagtctttggtgggttgtttggaagacatgtcgacggccattgacatacaaatcctgtccctagctagcttctttgcttaattatgatctcttccctcttctcctcgcactccttcttccttatatattatctctctttttttctttcttctttaattacttatacaccaaaatgtactttcaattaatatataagctaagatcgatatatatatatatatatatatatatagcctcttcaattccaatgatacatatatatataagcggtcgtttttcagatatttcttccatttctctactgctcttgacttttaggtgcttcttttataattaattagttttaattaattaatacctattatattattatatttagtccttttacggttttatatattttggctatacttcaatccgacaattgagtagtttaaaacatggccagctacagcattggcagccatcgatcgacttcatttttcttcttaatattcgatttttaatatatacatatatatatgatgagcaaaattcaaatttgaattatggaaaatatatcagccttccaatttcagctactaactttaatatgaattatgttggaatgatataaaggattgagaagaacttgaacatatatacaatgaagccatattgaaacatgagcaaattatccgttaaaagtagtacataatggcgttgctatagattactgtagacagggggggaaggaatgagaataagaaggaagggttacaattgcatgattgatttaagggtataaaaacaaaaaagacgaacttctctgtctcttctttaattgaattgtgtgtatagactagagagagagagagagagagacatatgtgtatgtcagatttcttaattgttttctctagagagagagagagttgaccgttagatactgagatggactcaactaacttttagcacctaattctccaaccgcattttctgctttcttcttccctccttaattatcctctcattactcttattatgacttgtgtatttatttattactatatactactacttatgatttattattgtgatgatctcttctttcaaacaattggtaacttatacaaaacgctatcatcacatcttaatttaagatatggcttaataagaaaccctatctattaatcatatatactttattatgtaaacttggctctattagtataattgcgtcaggattataggaaactgggactctgggagaagcatatatatatatttgataagaattagcatatacaatatatgggtaagagagagttactaacagtatattgcagcgctacatggaaccctaaattgcttgagacttgtcctcttccaatatttttataaaaactaatgggatatctatattcctggattaatcccaatcgaatctaatacactgactagtatagtaggggtatgtacgtagcagtattaggaaaacaattagactaacggtaaaggcaggaaagaagagttgttgaatataagttagaaagttaaaaaagaattcggatagagaaagtttagaagacgtacgtaagcagagaaaattaattcaacaaatgtaattcagcagcggaaagagacgtcgaaatttattttatttttatttgttgttgtaaaaaaagaaaaaggtcagcgagaggcattgaccgatcgttactcattaatttcagcgaccttaaaaggaaatgaatgctctttatgggtttgcctccaacccctttccaattcctccaccctctctttattacttactttcctattcactatacgcatctccctctctctctatatccaccatatatacattttataatgccacctggacacatgtgtatgtgtatgttgttttaatatttgacaaaatttgaaattttgatcatcttattgtatcacgggcacgtcaagatttcaaacattgattcatattatcgtatgcatacaccatgacatattattgcaagatatatctcaacagttacattgttaacaatatagatatagtagcttaaaccgtccgtataatacgtacgtaaatggacgaagacgtatagtgaaggaaacttaggtctttaataagatatataatggtataactgtagcagatgatttatctacaattcaaaagctttatcagtttcttttgtttttttctttgttagtcgtcgtacggcctagggaattgttagttaggaaaggtagatacataatgtatagagagggaagcaaccataaacatttacattcaccacatgctcttaaataattaattaatgcctcctaacctctccttttgctctatctatctactttaattaattacttgaatatatgctgcctatagagattcctttttctttcttccattcattccttttggctactgactctctctctcttttttgctctcgattaatacttctacttaattagggttttgggtaaaaaaattcgcccttttcaccattaatctattacccgtgttggcaaacttccaagaccagtcttctttcttttttggcttttcttattgagggccaatgaaagcaactaattaatttttaaagtagggtctatcaaaattaattaagacaacccttaagttgattccaagatgcagaaactgaccatatatcttttcttttatctcaacaagtgacgacgatcccttttaattcacgtccttacaaataactatctagaaagagaactgacccaccaaaaatggaatatggtgatgatctcacgctaaaagcaaacgtgtttatacaaatgtgacatcgagtgtgcacacgtacgtgtgaagagggaatgatggcataggagattgcgccagataaagacagtgaggacaactaactccatatactaacttatatataattaatacaatgcattttgatattcactttttgtacaaaggaaatgataccatacgagtcgtacgttgctaatattcttggtacctccaagtccaaccgcaaaacaaaagatggatagttagttggagaggatcagctgatgaaaaccaaaagacacagttgtgagagagctactagctagtgagtaccacatatatacgtatattgggatatatatataccttgaatcttacacattttgcttacatctaaaatagaaaatgaaccagtaattagtttttgtttggatccataaatatcacatatattacttaattatttcatataatttatcactcaaattacatttctgtataccagttgtagtattttaatgaataactctactagtaaattgtaacattcaaacagaaataaaaatgaaaaatgtaaatgtaaagatataatcgtgatctgaaataggatggtttacaatacgtaagagaatacgaatgtacatcatgagtatcaaaacaaatcaagattcataccaaaaggaagagaaaaaacatatcaacatatgcataggttagcgtcttagcgagcgtgcggaaccgagggtgccttggtttgctggccccaaaatgggtgggcttttaggggcccaatattgttacttacagaggctaaaatggatcctactgttttccctttacaaaaacggagacaggccttgtatataaaaaattcagaccaaagccgcttagaatgaagtaaatgatatcaagacagaacgtttttctaatccgcgaaacgacgccgtttgtaccgccggtggccgagggaaaaaaaaggatttggattttgttggatctaaaaaaacataaaacacataggggtgggtctctctcctccggaattcgatcacgacggcaaggacgacgcatctccttctcgtaagccattgatgatcccaatagatagctctattctgctttatccaatcgcctcgtcttaataattgattcagtgatgtaattgggatctaaactcgattggttgattgttttccttggaagccacagggctggagatggatctggtccggtgatttctgagatttaagtcgatcgagtttccagatatatctctcaagtagagatggcttggttcagtggcaaagtttctctgggaggattcccagatctcactggcgctgtcaataaattccaggagagcgttaaaaacattgaaaagaatttcgacaacgcccttggcttcgacgacaagtccgattctgccgctgaaggtgttctcttcttctcactttttttccaatcaatacacataatattatcatccttcccaataatctgctgttagtcagctgggaatataggatttgattactcaaggcgcatttgttgataggacctgccatttttcttcttcttctttatgtaggatgtttagatcaataatctgctgttgcaataatacaatcttgcaagttatgggattctgtcttatttttcttagaactagcttagctagtgtgcttcagattctacccattgcattttattctgaatttgaaaaaaacactttgttttggatctttgcgtttacttggtgacagctttttctggctatgatttcaggggtattctgtgtttacctaactgtagcacaaatcattttcttctctagtttgtcttgagtttcttgtacctttcacaacaaaaatccttttgttctttctttttagatgcagcttcaagtatgtggccacctgcagttgataccaaaagcctctttgatcccgttatgtccttcatgggtaacacctctgatgagaaacctgatacattggaagactctgtgcgtacagaaaatccgtctcaaattgaacaaaaagaagaagaagctggatcggttaagctagctactgaacaagcagtatctgttgaagcaaataaagaaacaaacgtgagaagagaagctgatcaagcagataatcctgaggtaacagaaactgttgttttggatcccaaagatgatgaaccgcaatcgcagatacttctcgaagagtcctctgaatattctcttcagactcctgaatcctcaggttacaagactagtcttcaacctaatgaaaagctggaaatgacagcttctcaagattcacagcccgagcaacccaagtcagaggctgaggaatcacagcctgaggattctgaagcaaaagaggttactgtagaaaacaaagacactgttcactcccctgtgttagatggacagcataagattacttatatggatgagacaacaaatgaacaagaaattctgggtgaaaatctggaagggagaacctcgtctaaaaattttgaagtttcaccagatatcaatcatgtaaataggatagagtcccctgttgctcatccgtctttaatttttgagtctgatggttctccttacgagtcttctataccaaagagatcgtcgtcagatgaaatttcggagagaattgtggattttgtttctcgtgaaatagattcaagactggatactagtgagttaaatgaaagccagcgttcaagctctgcgacaaatgtttccgactctgctgatgttattctggaattagagaagaccaaaaaggaaataaaaatgttggaaaatgccctgcaaggtgctgcaaggcaagctcaggtacatctttagatcctcatgaaaggttttgctacggatatggtgcttctataccaattttctggggatttgtttacaggcaaaggctgatgagattgcgaagttgatgcatgaaaatgagcagctaaaatctgtcactgaggatttgaaggtacaatagagtatgcggaatatgggatattagatgaaggattacttttttccccagtcttccgcccatcttcctttcatttggaatgattttgaatctacattctaataacctctgctctggaacagaggaaatctaacgaagctgaagtcgagtctttgcgagaagaataccatcagagagttgcaactcttgagaggaaggtattatatcttttatcattcttctctttcaattctcttcttttcattatatatatatatgccttcacagtgcttatctttgtaggtttatgctctcaccaaagagcgggatacacttagaagagaacagaacaagaaaagtgatgctgcggcccttttgaaagaaaaggatgaaataataaatcaagttatggctgaaggtaagacagccttttggaatgcttgaattatggatcgtatttttctcgttataaaaaaatggtgttgaaagcgaacacctgaaaaatgaaaggacgtcatttcttgctcagcttgagctcttgatattaatgctaatcatttcaggcgaagagctttcaaagaaacaggctgctcaagaagctcagatcaggaagctaagggctcaggtatatattcaacgctatgtgtttcatttttatcaataccaacagtctcatggcaattcttatttgtacgagggttagattagagaggcagaagaagaaaagaaaggactgatcacaaagcttcaggtaattgatttttttttttttgtttcattaaccacgtcattaaggatgaaactgcctgaaggggttttcttgatttcccagaagcttttgtgaaaggctggtttgaaaatcagtcttcttgtaggcaggattaatatctaaataactaaagcatttgcaaagtttgttaagcttcttagcttcattaatttttcctttcaattgccagtcggaagaaaataaggtcgaaagcattaaaagggacaagacagctacagaaaagctgctgcaagagaccatagaaaaacatcaagctgaacttacttctcagaaagactattactcaaacgcattagctgcagcaaaggaagctcaagcgttagctgaggagcgtaccaacaatgaagcgaggtcagagttagagaatcgtctaaaggaggctggagagcgggaatctatgctagtccaggcgctggaagaattgaggcaaaccttaagcaaaaaggagcaacaggttttgtcttcctcgatcaaatttgggatagagtactactgggatctcatcattttatttatactcacctagtcggtgggctctaatttttacaggcagtgtatagggaagacatgttccgtggagaaattgaggaccttcaaagacgctatcaggtcaaatcaagatgtttcgttgtctctatgcatatttctttctttggttatcgccttttggttacgtttgaaccataattctagttactaatagtttgttctgtttactgtttgctaaaccaaccactcttataggctagtgagcgaaggtgtgaggaattaatcacacaggttcctgagtctacaaggcctctcctaagacagattgaggctatgcaggtaaaaaattgacccatatgttttttctgaaagaacttctcctgagattagaatcttaaattaaattgtaacattgcatgcctcttatctgattggcgataggaaacttcatatagaacagcagaagcttgggctgctgtagaaagaactctgaattctcgattgcaggtgttatgaacaacactgctctatgctatattcagccaattatttttgttttctctatctttttgttcactttctagaaatattcaggaagcagaaagtaaagctgcaacagctgaagaacgagagcgctctgtgaatgaacgcctctctcaaacattatcaaggatcaatgttctagaggcccaggttttctatgctttttgacactgttcttcatcaattttcgcagctttctctaaattttagcttacccagttctcctatccagctttcatgtctcagagcagaacagggccagttaagcaagtcacttgagaaagagaggcagagagcagcagaaaatagacaggagtatctggcagctaaggaggaagcagataccctagaaggtcgagcaaaccaacttgaagttgagataagggaacttcggagaaaacataagcaagagttgcaggaagtgctactccacaacgagcttattcaaaaggttctacattgctttatggacataacttaatctaataagagttagtcccatgaaaaatgccccatcagttacggaatttaaaggactgaagtacctagcgaattcaatcaaagtagtgctttcccaaactttttcatcctgagtagcttctattaacaaccgaactgttccagtttattactcttctttattgtccaagtagtttctcaatatggcctatttttttcaggacctagagagggagaaggcttcacgtttggatcttgaaagaacggcccgtatcaattcctcggcagtctctgaacagcttcctatagcaaggcaaaattctgcctttgagaatggtgatgcatctagatctatactactgcttaataagtcaggcattgcacatctgtaattcattaactattgcatcaggaagcttgcctagaaagctatcaagcgcaagcagccttggaagcatggaggagagctattttctgcaagcttctcttgattcttcagataaattttctgagaagcgaagcatgcctgaggcaactatgagtccgtactacatgaagagcatcacaccgagtgcttatgaagccacacttcgacagaaagagggtgaacttgcttcatacatgacccgcttggtaggtgtagaaaatatccaactgggacatttttgtgtaactctgttggtaggcttttggcaattggcttagtaatgggattgaggttgacatcagtccttacaatgggacactatgggtgtttggatcatgttgagaaattattggttagttgcacaccgtggttagccttcttttataagctggtttagaaggtttagctctactcgtcgaggtagtataggctggttgttagtatcatcgttatctgtagaatctaactgtaagagtctatttgcctttggacaggcatcaatggagtctatccgagattccctggctgaagaactagtcaaaatgacagcagaggtatgtatagcgctgagagtttagagttgatattatgctcagtgttatgatgatatttcgtctatatctggtaactgtggatgtagtgtgagaagctacggggggaggcagatagggtcccgggcataaaggcagagctggaagcactaaggcaaagacacgcggctgctctggaattgatgggtgaacgagatgaggaggtaagatatgtgaataaaatagtagtgtatccagcattaacaacagtagttggcattgagttaataaaaaagtgggtttgggtggtagttggaggaacttcgagcggatatagtggacttgaaggagatgtacagggagcaagtgaacatgctggtgaacaaggtaaggcaaacagacacaagtggagtcaaagtgttgacaaactcaggctaatgggtttgtgcaattttgggtttgcagatccaatgaggggcaagggaagatggtgttggcaagctcaggctcacgagtaggaccacctaatccttgtttccccaatattgtatagctctataagctaccaacctaagcccactatattcatttgtcgttttgtctctcaggtgttggttgaacttgaggctttttaaaacaaacttttgctgctcgaaagaagatttttcttacagtgaattcgatcgtaaattattattttggagacgagaataaacttttgtctgtgtgacttatctacgtatgtaacatgtattgtctgtgtagtagaaaaacggtggagagacccattaataatgggattcgttgatgtagcaatccatccatataggaaaactgtgtgactcgaatggacccgaatgagatatcaaaatcacagaaatgatagataaagaaaataaagaacaaaaaggcctccggccctcttgtaaatgttaataaaagcccaaaggcccaaaatagctctgcaatggcttctcctgtaatgaatagttgtaggctggtttcagcatcaatcaatagtcataaagcaggggagggatcctttcatcaaaagtcttgtactcttgtacatacagcattactgaattcatatataaatgtcattatttcattggtactagagtatagtttgctgagttccatgaaaagaacggtagaggcgagagcaggtgattaaaacccatcccctgtgaacggagtgagtgtaggtgtagccataaagttgtcgtcgctcctctgtaaaagtttcttctattcgacgattcctctcgacgttatcatatttcctctccaggttggtactatcatcatccttgttctctttgtttgcatccctccttccttccttgcttccttgtagatctgccattgccttttttaatccaaatcttatatttctgatttacattgcttccgtcagatccgacgatctcactttctcatcatctgtcgtcagcttttttgtttcttcttttatctctttttatttttaaaataaatatattgttgattctggaattttcctagtagctcacgtcacgttacgtcatgtgtgtgctttgaattttaaattgactcgcaaggctggttttgattatgtgtaagtgatcgctggacttcacacacactaacaagtagcacttgaatgaagctttcctttaatggattgattatttaataaattgcgactttgacgtctttgagcatccatccatgttgaagaatcccattattcgtatgcttttcttctatggccttgcatcagtcagcactcaacttgtttgaatgtgcaggagcgtgtttccagaggggatggattctgttcgacgcacttacaccattatgcgaggtcgtcacatagacaagcgtgttccttctaaagagtttctctctgctttggataaagctgaaactgcaggttttttgtacccaccctcataatagtcatgattttactctattgcctactttttggtgcacacggacagtgttatatattttaaagaccacttctgatctttttattgtatttgctcatcaactctatattgcttgtttgtgttttagacatagcattgtacctagatataccacttttttcttgttgcctcaatatcttgaaacttcttctgcatagactgactcttgacttttctcaactccagtacgtcttcctactgggacgggaaaagactgcgggaatccttcctggaagcgatctctgcctcacgtgctcgttgcttctctgacttcgcttttattcggctatcatctcgggtctctccttgtgacatttgttctccctttttccttttttctttttcatctttgcatttatagaccaaacatggaaatttacttctcatgatgctaggctattatctttttctttcgtaagcttatttttcaggctcaagttgtatttcttctcgatgcattgtttttcttggagcactcgataacattatctatttgcctcaatgactcagttttttataaatgtatatgtctgggaataatagcaaattcatgcctcttttctggacacagggttgttaatgaaactctcgaaagcatatcaattgaccttggctttagtgggaacaccatagctgaaggtaccttacctatccaagaagacaacttacttgtttttctgtttatccagtctttgtgtctatctcccgtctgatcattccaaaaacctttttctgatggatgaaggtcttgtggttagcacctgcttaggcggcgcctttattgggtctctgttcagtgggttggtagctgatggtgttgggcgccgtagagctttccagttgagcgctttaccaatgattgttggagcttctgtgaggtgatgttttgttcaggttaattgggggtttaggctgttcagttcacatgactaagtacttgtttcaggttcttatggtatgatatatatttttggttgaatgtctatgtgggcacttgaacatttcagattcgaatctttgcctgttgatttgctgaacctgtggtctaggctagtcattatgcagttggattatctcgtagtgatttcctgcttggatgtttatagttatagcgtggtgattttaacatatttggcctcatttgaacatatttggtctcaagtcattgccatggtgattttcacttatcccaaggtgtactcactagttaggttaattcatcctgtttctcttttagccagagtccatttatgtaatcatgaaatctgtgtgcttacaagtgtgttgtttgcagtgcatcaactgagagtcttatgggcatgctcctgggaaggtttttggtcggaattgggatgggcataggtccttctgttacagctctctatgtcactgaggtacttgacatatacgttgaagtctttcttatctgcacttgttttgataggattgctacatgaaatttcttcctcacttttgatgtgaatattacttggcgtatattattttaattatgtcaaaagatgtttggagtcaatgtaaatagatgtctatttcagacataaaaagacttgaacttggaaccattaacatgcagaaggtcattgacgcacataattttcattgtaataaggacttcaatcttgaaagctatattcgcattattggatttatttaatgtgaaaaagaaggttctgggcacacaaatatcactaactcgctttgtcaatacatcttacattcatacttagagcaagactcacagtttctctttgcaggtgtcacctgcttatgtgagaggtacatatgggagttctacccaaatcgcaacatgtattggactcttaggttcgctgtttgctggaatcccggcaaaagataacttgggctggtaagatgttgataagaactcaaggaatagatgacttaacagcttatatggcctgtaactcttcgaggttgaaattattgcaactctgtgccatctgtgacttccaaacgcatggtagttcaccctttttgcttgctttaggtggcatgtttgatccccgttgtctattccaaacccacctatatgcaatgtgaatctctagtgccttgttaaaatgctgcaactctataggaaccacctcatcttttgctgcaaattcattagtgattttgacatgagaaccgcctttgtagggaaagaaatcctggagtttctaagctactagcagatcacatgctttggtctacttggctgaattactagttgaataggtttctctttcttgattggtgtaggtggcgcatatgtttttggatatccacagtcccagctgcaatgcttgctgtcttcatggaactctgcgtggaaagtcctcagtggctttttaaggttactgtctaattttaacccgcatagctcttaaagacgttttgatttttataaaccatttctttggttgattctttttctgtttaaccgtagaggggaagggcagctgaagctgaagctgtgtttgagaagctattgggagggtcgtacgtcaaagctgctatggcagagttagtgaagtcggataggggagatgacgccgattcagccaaattgtcggagttgctttttggacgcagttttagaggtatgtgtgatctttaaccaacaagattggtgaaaatgtgtggcattagttcgatgtcaaatatcacggaaatattagatctagatttttattcatcaaaaagttgaatcatttgcacggaaggtatgttaggtggctaaactggatccatagccaaaaaaatgacattttcatttgccaaaaacatacatatagatgatgtgtagcctcttaattaccttcatttttacgtttaaattttctccgattgcagtggttttcattggatctaccctttttgctttacaacagttgtctgggataaatgctgtgttctatttctcatcaactgtcttcaagaaagctggtgtaccttcagcctctgcaaacatatgtgtaggagtttgcaacctcttaggtattgaaatgtgactttttcttgtacattctactatggcttgaaaggccatcatattcatgataagctagataagcaagtaggtgaatgcagtcttcctgaatacaaacacaacattaggaacagtaaactaatcactggtttaagtgaacaaccttcctcttaccacaaagatgatgatctgaaatctttcctttcaacatgttgatgatctgtatttaaaacgaatgtgagcatcattcatactcttgtacaggatcaactgttgctgtggttttgatggataagctggggagaaaagtgttgcttattgggagttttgcgggcatggtaattgttgaggcaaaaagtgctatttgaatcaaactttacgcagctaatatttaataacgctccatgtatgtagatgtaaatgtttatcatctttaacaggcagtatcgctgggtctccaagcaatagcatatacttcgcttccttcgccctttggaaccttgtttctctcggttggaggaatgctgctgtaagttttctatcacaacaacagcactggaaaagggggatgttttattttgataaactaggggtgtgattacgaatgcaggtttgtgttgtcgtttgcaactggagcgggtcctgttccaagtcttctcctgtctgagatatgccctggtcgacttcgagcaactgcgttggctgtttgtcttgccgttcactgggtatgcctttttttttttttttttttctctttgtggacttttttaggaaatcgataatgttgaaataataataagcttggagaattacacgctacaacaggttataaacttctttgtcgggctgctgtttctgagaatgctggagcaactaggttcggtgcttctaaatgcaatatttgggttcttctgtgtggtggcagtcatctttgtgcagaagaacgtggttgagactaaaggaaagagcctacaagagatagaaatcagtctgctctcttccacccagtgattgatctctttattctgagaattcgtattattcttctggctctctttttttccttggagagacacaagtaacgtgtacctaatatggaagtaggagtgagtagtaagtaggtaaacaacatgtaaggaaatggatattattcattcgagtatagccaacgtttcaactgattttgtaataaacataagaccaaacttcattcaacaatggtaggttctcaactcatgtacagaagtgcacctatctaatttttttgttgcatcacattcatgatgttcccttattgtatagtctgtctgcaaacaaacacctatcagattcttctctgctttcggctgcttgccttggctttttacacttccactattgcatctgcttattcttcaagacttggtggcatgactcaacaatttgtcacctccattcatttgccacttgaaacaccttcccgttgtatggcaaccacaggctcgttacatctaagacaccggaacgatgctgctgaagcgcagcgggtccttatgcagtagtaacagtacctgcgacaagtcaattcttttaaatgtatgtaacaactacagcacatactatgaattcaacaagtcaataaaatcacttctgtgtcttctccaaagtcagatacacaatcatgtgaaattttttgcttctagtacaatcagttatagtacatgtctggggagagagttaactactttattctgatccaaaacttttgcacagaaaaataccatacctgtgctgacaaggcagagctataaacggaattgcaggatccacttggcaaatagggcaagtcactgtatcctctttagtgcttgaggacttgtccttggcaaatggactaagaatattcttaacagctgaagagttgagcagcgggagaagcaacaaaagcatttcctgaatatcaccaaacaaatttaaagctgaatgccaaaacagaaccaggaaatcagatcctaacattacgtttctggtagcaagtctaaacagaatgttttgatctattgaaggatctgaaagagagaaaaagcgacaaatacagtgttttgaacatagacaaggtatttgtactccaatgaaactgttgagtcacaggatctacatagttcagaattccagatacggacacaatatgttttcagcttttaacagctcaagttcaagcagcaaaagtgtttcttccaaagaaaaagtgaaggtaagctgatagatactatcattcaagaaaatgttcgagaccagcaagtatcaatcataggccagaaaccatcagccaaggatgctactcagaactgacaggttgccaaacttttaaattgatgttgaactagttaagcaacacacagagaagacctaccgaaaattcattccacacaagttgccgattcatgtactcgaagctgacagatcggttcatatggggactcctatagacaagcctagcttttaaagctttttcaatgaggttcctatacctggatcaagaaagaaaaagaagagtagcggaagtgagaatcatcaaggtatttctgtttgtgattttggttcttgtttcgatatttcactgtgaactcaaaagttaccaatgaactgaatcagattttaaatggtcataagaagtaactgcactgcagtgtggttttatcaggataagtagaggaaatgaaagagtccatgtaccaagttgtaccttcccgtataaagaaatgacaataggttaagaaaagaagcagctttgtagatgccttcgattcgttgtacgagggtccaaagtcgccttgccaatggtctctacaagtcaaaacaaggagaaaagaatcaaccatagcgatggcgtgaggatgactgcaaacgggagaaaaaaagaataaaccatgctcctcatacagacctgctcagaatcaccccatctacggaaagcagaaaatgactgcaaacgggagaagaggtactgaccaccaacggaggcaacgcagtaccaaatcttttggggagaagtaagtccgggtccttccagtcctgttctgactatacgagagtacaagagtgattagaaaaaaagggtgacagaagaagagtgtttagaaaataaaataaaaaatacctttccccaagtgctgagcaacgactcctcgttcatctctgtatctaagattcatgagagcgtttccgggggtgggtttgtcaacccaaatagagaatctccaaatgagaaactcaaggaaagcatcaagctctggttcgtattgaaagagcattcctggctaataaaatgccaaagaaagtaaatggcttaataaaatgccaaggaaagcatcaagttagctctctgctcaccttcatcagagtgaaaaccttaacgagctgttccttcaacatggctgacatttccacatctagtcgtgctgcgtcgaactgattcactctagagattgcaaccggtataactgactgccatcaaagaccacatataataagcaaacaagccacgacacaaacaagcatccctgagacagaacctacccggcgggaagcgagaagagactgcgattcaggaagcaagcgctggtaagagcggatccaagcatcgtctgcaggcgtagacggcgtcattggcggtgtagcagggctagggtttgtaattccggcgatagacaacaaggcaaagttgtttattgatgaagcccgacgagggtcttaccgtcttttccaatctacagctacgttgtttgttttctctctttgtctcacactcacacccacagagattcatccatgtctcctcctttcttcttcttctttcaaaattgtttagtcttcttgattcaccacttttatcagattattattttgtcttaaaaggctcatatggtattaaagacccatatcaccaaaaataggcccatagcaataaaaaggcccatatctgttacaaactctagggcccggttctattagtactaacgacataaaattatccttattgatgatctcttaacattactcttagttaagagatatgtcttatatctaacaaaattgtattaaagtctcttatttatgagactttgttaattataagctattataagactgtctcttaacttaagaattgttttaagaaactattaataacgatgctcttgtgtagtttgttgatagattttttattttttttccacagtttgttgattgatttgttttgaacagtgaaaagtaaaacttataataaatgtcagagaagaacataaattggattataccataagggttcgatgaatgaaacaaaaagatgaagaaaagtaaaagaggagaagaactataagggaaacaatttgactaataagaaatgaaacgaaagctagcaatggttaagaaaagaggaataagaagacaagccgtaggcagggaggaggcagcagaagatgcggatgcggatgcgtagggagaggcagaattagaaagaggcgacatggatggaggcatggaagcgtcatggtcatggtgttggtggatatgcatgacttctacgatgagacgctggccgctggtgcagtgctggttggagccgctgatgaagtagaagagaccaggacgatcaaggtcgaatgtgctgtttccattgtcaaaggctgtaatgggatcgctgccgttgcagtggtagaaaccccatttgtctacctccatcaccgagtccttgtcgtacacaaacgctgacatatttttgattagaaaccaatcaattattaccgatcatgaatgataaaaaaaagaaaacacaagttgggaacaagctagctcacagagtgaatcaccgatgtggaagcggttgctgctggcccagtggctgtaaaccgctgaatcattctggagtgggactctccacccgaactcgtctccaaccttgaaatccctaggaccttccgccgccatggaagccaccacaagggcacaaatgcagagcattagtgttagattacaagtagatctcatcatcatcatcatcatcttcttgttcttttgtaagtatatagtatgtttgagaggaattcgtacgtagctttgatggttgtgtgtaaaaatgaaggtggctggctctgctttatataaacaaggagaaggaaagtggcggttgagctctccgaggccgaggagtcgtggagatgaatttgaaacggtttttatttaattcattcattctccttcgtgctgcaagtcatgggccacttcttcttcaccacgtcatcctaattactgacgtggaccaatcaccttctcctctgcgattttctctctaaacgctgcgtttcgactcccctgttgtcatttacaaatgatgatgatcggaactagaaactaggtagtttctgatggcggcggcggcgatgcacacatcggcggaattcatcaatctgaaacccaacatgtggaagaagaatcctgttcgggcctcgggttcttgctgtctgggcagcagcagtggtgatgaaatctctcggaaaaggaagcttccgattctcctcttcgacgtcatggacaccatcgtccgtgaccccttttaccaggacgttccggccttcttcgggtgagaaagtgaaatcctcgaatttatttctcgattcatcaatgataaactgaggttgtggatcagaatgccaatgaagcaactactagagtgcaagcacccgatggtctggatcgaatttgaaaagggtttgattgatgaggtgaggtaccaccactctttctttctttttttcttcatattatctcctctgacttttggttttaggaggagcttgctagaaacttctttatagatgggagggattttgatttggaaggtgagattgccatatagatagataggtaaatacacagagagagggtttcctcgtacctatttcaatcctctttattgcagggcttaaggagtgcatgaggtcaggttactcctacttagatggcatgcaagagctccttcaaactttggcagctgacgacttcgagattcatgctttcactaactatcccatctggtttccatcccttgcctttcactctttgaaacggagcttcatgtctctttgtttactcttgtcgtgtttccataggtacaacattatcgaagacaagttaaagctttctgcctacttatcatggacgttttgctcctgtattgctggtacatcacacatctcttgcctctttttactacttattgcttgtcagatccaaaccattcctactacatacaaagctcctcatgtgttatatctttcagggaagagaaagcctgatccagagttctacctcgaggttgtgggacacctcggagttgaaccttgcgactgtatattcattgatgacaggttataacatgaactcaatgcctttataacttaaaagaaagaaaccattttgatctgaaggagtgtctgatacgcaggccaaccaacgtcaagtgtgctatagagatagggatgggtgggttatgctttgagaatgcagattcgctcgctaaggatctctcagatctagggatcaacgtctctgtacccaaattatgattgtaatttcatcacaacgcatcatcttaaatgtattgcatcagagaaatactcaaaagagaaatacattgtttttgggattgcaagtagagtctttgttggattatataaagcagcgaaaatattgagactagggagtggagagcacaaggacagtaaagaaggaagaggaagcgaggaagatgaaggagaggaagactaagaggagagacagggcgacatgattgcagaaagaagaaagggtcttgcagaagtcggggagaggagtgtgcctgatgccggttttgttgaggttggtaactccggaaccggctgatccagcgctcatcatcaaataacaaaagagctgcgtgcacacagtaaatcaaatgggttacattcggaagaaaagggaatggagaaaaggagacgaggaacctgatcggaggtgaagcaaagccaagcttggaagcgggaaggcgtgatgggagatccggtgacgagtctgtaaacaccgaggcagagctgtaacagggagtagagcacggtccctgcgcatgcccccaccacataccttaacaccaaacaactctttcttagtgagatgaatgaaatatacactatatataatcacaaagtttaaaactagctaggacacacaataatgtcatgttgttgtttggttcacggatgtgtttctgttcaccggaatatctgtcatccgaacacacacattctgttttgctgcttttcttttattataatatatatatatgcattcagataaaaagaaaattctaattgctatgtctgtccctaattataatgctcgtaagaagaagaagacgaagaagaagaagactgactggtaggagggagagaaagaccagttggaggagagagtgagcttgaagccgtagatgtctgccactccctcctcagtagcggtcagcatcaccgccatggccgtggctgaagcagccaaacaacctcccctgagagccacctgcactagctccttaattcccttcctcctcctcttcgccaccacctctcccccttctccattactcgtcattcgaaccctttctacgttgtttgtttgtgtgatatgctcctgcttttttatttttataaaactcacacacaaactcactccttcattctttataccacaacaagtactctctttttctcctccaccttttccgtgttgctgcttcctcctgtttcgctctctcttttttttatacgactttgtatttctttcttttataacaaaaaaagacgaaagttgtgaatcaagcctagctcattcctttcttatatatttatttatatgtaatttaaaaaatgggatggaaaaataaacatctctattgggggacttgtctatctctatgtacatgagcaggtacaatcagcgtgcctcatgttctctgcttattaagacgcaaatgccaaagaacccgatttgaatgatatttgtatttactttctcatatgtttcacattctcctccttataacatcaattaatatttgtatgtacgtggacgataggttaattagatttttgagatgtgatagtgttataactaatactacaacaactgagagaagagaaatttgaggagtcacaaacttaaatctatatatccggaattcaacggagacagaatttaaaggaaaggggatacagccaaagaaaagttgacacgtgtcgtcataacagatatacgaataggtcgtccactcggccgggtggtaaactagcggttatatatgatgagttcacctgaataagagatttgcaagaatggacccatcattgatcatcccatcccacatccattctattcctctgaattgaaaatttatagcgaaaaaacaaatctatatagacagttcatgatcccttcatttctatagaaaaaagtatctggttcctttggattgaaagaaacgaaaatacataggaattaaatacaacttatattacgcttgaccaggatatctggatcagttttattaattagtactgtagtatatatatatatatgagtgtttagagtactagtagctatagctagctagggactaaattaaacgttaagatattagaagagacaaattaattaaggtccctggtgatggcaggaatacagcttgaagtacgggaaatggcgggcttagggataatagactgacccctcgtgcttctccggagcatatctctcatggcatcagcttggaagagagccggatactccctcccgagcttgttgaacctgaggcaggcgctcatgtgctccttcaaggccccttctagcccttcctcttccctcttatccctctcctccttcaccgcctctgagcacagtccgcatatccacttcccaaagaacttctccctcaccctctctatgtactccatcgtgcactcctccctcatcccgcagcactcgcactttgccttctctacctccactatcgtccccagtcctttctcttcttctctgtgataatccagcgatatgtctgacagggacctatgcagtgactttttccctacctttggcgggggcggcttcaccaagcttccgctcacgctcttccttctcccgtttgctgccatatccaatcttctttttttcacctagagcgtctgcgctaagctttggtatttataagcggtgctgtctgtgttgacatattcatgtgtattgtgtggttcagcattgccatctcacgtacgtgctcacgctatagcgacctagctctttacttactctttgttttacttttcacaacaatactaattaatgaagccactaattcacgtgctacattgcaactggatcctagcctttaatacaactcttctaaattggtatatctctctctgtattgagttcatgcatatatggggatatatacaaacaaaaacattatttattttttgtctgccgtcactaatcgatctcaactaaacttttgtcatttttttaatgaactgtaaacttggtgttcatttcgttctcattaatgtagtttccttagagattgcaaaaattagatacattttgtagcatgaaatctgaattatagaaggaaatcagataagcaagtgtgcaaatatacaaaaatgtgctattcgagctaaaagtgaagatacaaacaattacgtaccaaaagcaagccctcaagaattgtgtggaggtaagtaaaaggaactatatggatcgcagagacaacgatatataggtcacgtgtgtgggagttttgtctaaccacacatataagagaggaacaacatggactcgaggaagaccactcgtaatgaagttaaaagttgaaacttgtaaatattatcaatcccaacaaaaagaagaagaagaaaaaatatatattggttgttttaaactcacttttgcgataacttggaaagtgggaggacgctcacgtgcatgcatacatttcttgtctattatatgtagctgattcaacataactctatatatcttgttgtctatattgcattatagttacacttacattacatacgtagtgtgaaaacgatgcatagcattactatacatcaaatctgtgcatatatatacacgttacgtttcttgcagtgaaatactcgaaggtggatatgtgctcttgcaccacctaattaatctcgggttatgtaagaattacttcagagttcagagtatatatctatgtgattcttgcgcagtgtcaagtggattgggcatgagattgataaccgaatgggtgaggggtcaaatatcgttatttggatatagcgggattttaaactgaatgattgggccatgcattgcttgggaaaaaggctaaaattaaacaagattgagatacacattacccacttgtattttagtttccaaagaaaaaaaggaaaaaaggagcaacaaggcaacaagtatgtaatgatcaaggaagtaaaaaagggaagaggagtgtgagaaagagagcaaagaggagctgttggaagagggaaatggtcttcttcttcgtccttttggtaatttttctgcttgtgttgtggagagtggtagtactagtgtagagaaaggatatggaaatcagattgtgatgaagatctgatttgtaaagaaggggcctccccacaacgcccttgaatcttccgctccagccttgatctccgattgtgacgatcaccgcatcgggacgtggggagaaggagacccaacctcttttggagtagacgtggaactctgcatggcagaagttgagacatagagaatgtctttcgtcatagcctcttagcagcatccttatggcttcttcctttgattcgtttttaatattatgcctcttcacgtagcaaacccctaccccttccttttggcttcttcctcctgctcctagcttttctctcaccgccttccctatcctctctgcctcacccatcaactccctgcatcttcaaatcattacttactactttattttaaacaatatatattcctaatcaattactatatatagtaaattttgctgccttacctcaaatctgaataacaagccgtgtgatcatcagcattaatatctttattaaacacgaactcctccgtctcatcgtggaaaatggttttgtccatggcggctttcaccatagcctctggaacaccgtggttaacgagctgaaaacaaccgatggtggcgatggcatcaagcagagccgagagggagtccaaccggtggaaatcgaaggtgggagggttgagaaggaatgtgtgcttggggaagactttatcgggcaatacaagatttgggactcgaccacacttgtccaggaactccgagaggacgtcttcgttggccgtgaaggaggcacggcggctggatgctaccggggacggaggaggggctcggaagtcgggagaggaaactcccatttttgtttggggtcttactcgtgataatacttgtatatatgtagagcaaggatcgatcattggccaaagaaaaagtttttgttaaataaagcgagagcataatgatgagatgcaattctcttgtttgcttttattcattgcaacttttccttttccaaaaaccagagaggatgacactattcatcatattatggatggacccaagttgggccttaagcggccttttgtttacccaattgacgtggatcctcacaggatgggcatcgagtgtgacacaagtccaagttggaagagtccttttctgtcacataaataaaaaaataaatgtcaagtagagagggcaagtggtgaatctctctcataccaattccaaaccaactaaatctacttagtaccagtacattgatggtagttgcattttcgcttgaaattgtctgtccttttgctagtttgagtcacaattttcaattgaaaagaaataagagagagaggtcagagtcaacgaaaagttataatttagattttgtgggctaaaattgacaaaagcgtaccaatacagggaccggtgagcaatggcaaattggtaaataaagggagaagccaaggagtggagacgcaatttgggaagagatagaaaaggaagaagacacgtcaacaatggaggttctgaagaagaagactctctcccagcagatttagagcgtgtgagggagataggaagagagaaagtgagcgagagacgatcacggccgcgctgaaatccacgaccacggccgcgctgaaatccacgaccacggccgctctgaagaagaagactctctccgtctcctcccttctcctcctccgtctaagagacaaggcatccccagacgccatgatctctctcactccctcgttgtttctggtattatttacatcattccttctccatccatcgtccatgtctcatctttttttatatacgaaaaagtctcattgctttggtttctcagaacaagacggttgttcctggatgttccacacgcctctctctgcgccagcctagaactataattactcctcctgcttccttgagagtcttttcctctctcggatctaaccaggatcccaccggcagcgttttgattgagaccactgccacttcatcctcctctctcgagacctccgccgccgacattgttcccaaatccaccgtatctggtggagttcaggatgtctacggcgaggatgccgccaccgaggacatgcctatcactccttggtctctctctgtcgccagtgggtatacgttgttgcgtgatccacatcacaacaaaggccttgcctttagccacagagagcgtgacgctcactatctacgcggcctcctcccccccactgttatctcacaagatcttcaggtttcccgtcttgtcaggtttcacttaccctttctatatatatatatgcaactggagatttggacttttgatccttttactgcacgctttgtctacaggttaaaaaaattatgcacactcttcgtcagtatcaagttcccttgcagaagtatatggctatgatggatctccaggtaaactaactcattaggaagtctcgctatctcaactacaccaagtgccttcctttgttacccaacttctttcacaatgcttttgtatttcaggagaccaacgagaggctgttttacaaacttctcattgatcacgtcgaggagttgctacccgttatctacactccaacggttggggaagcctgccagaagtatggtagcattttcctgcgtccacaggggctttttatcagcttgaaagaaaagtgagcctttttatacggaaatcaactaccactttcactattcttgttctcatcttttaagtgaggatacaattttcaataatagaggtaagattcatgaagtgctgaggaactggcctgagaagaacatccaggtcattgttgtcactgatggggagcgcattttagggttaggagatcttggatgtcaggcaagttgtttgattcttttctgctttcatgagagtggtgagtcagggtttatcctcttactaatttgcacattacatgccatcattaatgtcttcagggaatgggaatacctgttgggaaactttctctctacacagcccttggaggtgtccggccatctgccgtaagtatagttttatgctaatcagctttattgcattcaaccatatccactcatctttttctctctgtatattggttgccagtgtctgcccgtaacaatcgatgttgggacaaacaacgaaaagctattgaacgatgagttctacatagggctccgccaaaggagagctacaggagaggtaattggcacctttcacctttcagttagacggtcctgtgaaaattatggtgaaactgaacccttaatcctcttctttctacaggaatactccgaacttatgcatgaattcatgacagcagtcaagcagaactatggggagaaagtcgttattcaggttagcttgagacatggataagtgggataagtgtactccaccaacatgaatctgctgtcttgtaaccagatatgtttcttttgatgatttgcagtttgaagactttgccaaccataatgcttttgatctgttagctaagtatggtacaacacatcttgttttcaatgacgatattcaggtataactatatcctgtttaagttgtgagacaggaggtgatttcggcttggattacatatttaccaacttgtgaaactgtaatttcatatatagggcacagcatcagttgtgcttgctggacttatcgctgctcttagatttgtggggggatccttgtcagaccacagattcctcttcctcggggctggagaggtaagggttgggatttcactgaacattccgtcattatgtttatctattccttggatggggatgggacaatctgcaggattgttatatggttttacttccactttttttttttgtgatgcaggctggcactggaatagctgaactaattgctcttgagatttcaaagaaggtaagtaatatgtttgtgttaattttctctgttaagcttcttgttttcttagatggagtatcttttattttcttttgactgtagtcccatattccattggaagaggctcggaagaatatttggctcgtggattcaaaggtaacttatgagatgcggattcatctttgttttgcatgtacttaaatctaagtacacctttttatctatgtagggattgattgtcagttcccggaaagaatccattcaacatttcaaaaagccctgggctcatgaccatgaaccaataagggaacttgttgatgccgtcaaggtgtgttggctgttgttctgctgcagaagatatctctgcggaagaagccttttttagtcaactgaaccctttttctttttttcttttttttcatcaggcaatcaagccgacagttctgatcggaacatcaggtgtaggtcaaacattcactcaagacgtggtggaaaccatggcaaagctaaatgaggtatactttttccgcatggacttgcatgaaaaagaaagaagcattttggcatattcattttttctaggagcacatagtcctgaccataaagtcaaatttggtgcatacagaaacccatcattctttctctttcgaacccaacttctcagtcagaatgtacggcagaagaggcctatacgtggagtcaggtaaacgagttaagattgtgatttctcatgatcagagagaagtggagtattgtcgttgacttacaaagtcaaactatttttacagggacgggcgatctttgcaagtggaagcccatttgcgccagtagagtatgagggaaagacgtttgtgcctggacaggttgtgaccacagctgtagaataggatttgacaagtaatttaagagagttgattctgacgtttatgtggacaggcaaacaacgcatacatcttccctgggtttggactcgggctaataatgtcagggacgatccgtgtccatgatgacatgcttctggcagcatcagaagctttggctgaggaactgatggaggaacactatgagaaggggatgatataccctcccttcaggaatatcagaaaaatctcagctcgtattgcagctaaggtggctgccaaggcctacgaactgggtaagtagttgtgttgcctgatgtaatgtgtttcaagtgtgaatcgcactagtaatgtaatgtgtgtgtgtggtgtttcttttttaaagtgtgaatgacaacattacacttccttatatatataggactggccacgaggttgcctcagcccaaggagctggagcagtgtgctgagagcagcatgtacagcccttcgtatcgaagctaccgctgaggataagcttaatctaatttgttatgtctcatacgactcttatggccatttctctcctctcctattcgttcaccttccacttcccgtgagatttttgtttgtttgtttgtcagcatctttaaaatcttgtgttgtaatcactgtttcccttgttgtttctttttaagtccgtaataatcctcctatggaaattgtttctctgggccatatactcgtgtatgctagtagtctcttggtagcaacatgtgattgcatatggtgtgctttccttttaggaaatattcaggatcatcaattttattgtgactgctagctagctttgttgtttttttcttcttcttacttaaatacttcaagtatggtcatcgtatactgcaaatcatcgatagctaaaacattctagtgcgtggtaatgatgagccaatatcttgattgttgagtgtaatcgtttagtgcagtgaaccaaattaaggatgatagtgaattgaaagtggtggaaactagtatcgatttcattgaaaatgtaattaagagtgaaatgacgacgacaattagaggaaggaagggaaagtaaaactaggacgacgacataagaaagaaggagagcaaaatatcgcgaaaaattaacttctcagaagtgttggttccggcgagaagaagtgaatctctttctctctcggtaaagcagcttatcccaattactcttctttatcccaaattctctttgatttcttgctacttggtcttctccgattagatcttcgaatctgtttctctcctctccgggaaccggtggctacgtcatgtgtctttctcatattccggcaatcctcaagaggaaatctagaatcctccatacatttcttatttccttactagggttttgtgtgtgttggcaggtggaagctgacgaagaacaacatcatatatcattcaccaagtaagtaatgtaaagtaaagtagcagctctatttattttctttcctatgattgagatgaaaaattcgattgttgttgtgtgagacagtggtacgagaaaaagatatctgctgggaatacgcagagaaactagatggtaacaaggttaaatgcaagttttgctctagagttcttaatggcggcattagtagattgaagcatcatctctctcgccttcccagtaaaggggttaatccatgtgccaaggttagggacgatgttactgatagagttcgttccattttatctgccaaggatgatccccccattaccaacaagtacaagcctccaccacctttatctcctccgtttgatgctcctgcgtccaaactagtctttcctagttctcctcctaatgcgcaggacattgcagagaggagtatttctctcttcttctttgagaacaagattgacttcgctgttgcccgctcaccctcttatcaccatatgctcgacgccgttgccaagtgtggtcctggatttgttgctccttctcccaagactgaatggctggacagggttaagtcagatattagcttacaactgaaagacactgaaaaggagtgggtcaccaccggctgtactatcatcgctgaggcatggaccgacaacaaatcacgagcactgattaacttctccgtctcttcaccttccagaatcttttttcacaagtctgtcgacgcctcctcatatttcaagaactcaaaatgccttgctgatctctttgattctgtcatccaagatattggtcaggagcatattgtgcaaatcattatggacaacagcttctgctacactggtatctcaaaccatctcttgcaaaactatgcaaccattttcgtctccccctgtgcatctcagtgtttgaacatcatcttagaagaattctccaaggttgattgggtcaatcaatgtatatcgcaagcgcaggtcatatctaagtttgtctacaacaatagccccgtgctagatttattgagaaagttaacaggcgggcaagatattatccgaagcggtgtcacaaggtctgtctccaattttctatcattacagtcaatgatgaaacaaaaggcaaggctaaaacacatgttcaattgcccagagtataccacaaatactaacaaaccacagagcatttcatgcgtgaatatcctagaggataatgatttctggagagctgtggaagaaagtgtggctatttccgagcctatcctgaaagtgttgagggaagtttctactggaaagcccgctgtaggttctatatacgagttaatgtccaaggccaaggagtcaatacggacatactacatcatggatgagaataagcataaggtcttttctgacatagttgatactaactggtgtgagcatttgcattcacctcttcatgcagcagcagcattcttgaaccccagtattcagtataacccagagataaagttcctcacttccttgaaagaagattttttcaaagtgttggagaaacttcttcctactagcgatctacggcgtgatattacaaatcagatattcactttcactagggcaaagggaatgttcggctgtaacctggccatggaggcgagggattcagtttcaccaggtatggacaataaatacatttatattttctttaagtcatgactagtgaacagagatgtataggtagtctgagtcgggagaaaaataatccacttatctatgaccgcaattaaagctatggtcttattacacaactaaataagtccaggttgatatagcctggcacgtagtaaaccgaattgcaaaactagtagatatcttcccctcaccaggctattaggggtatggtctgggatctttagaattggtaacgaagcactagaagactagaagttgatgtctaataatggtttgcttagtaatgcaggtctctggtgggagcagtttggtgactcagcacctgttttgcagcgggtggccatcagaatactaagccaagtttgcagcggttacaacttggaacgccaatggagcacattccagcagatgcactgggaaaggcgaaacaagattgacagagaaatattgaacaagttggcgtacgtgaatcagaatctaaagttagggaggatgataaccttggagacagacccaattgccctggaggacattgacatgatgtcggagtgggtggaagaggcagagaatcccagtcctgcccagtggcttgaccgttttgggaccgcccttgatggaggcgacttgaacaccaggcagtttggcggtgctattttcagtgccaacgaccataacatcttcggcttgtgaagtcctggtaagaggttttcataagttggtccagcgtgttgagtgtttaaccacacacctcggttcgctatactgtacataatgtttgagtaattatcaatgtagaaaataaatattttgtgttcctcacacagtcacacgtcgatgagcttggtggtacaaagcatgtttcgttcatatttgggattcataaaacggtgagcttaagattgtttttgtttgtattgaagccgtaattatcagaacccatatgatagtagcggttattgggccgctagtgaggcccaaattaaagtaaaaaggaaaaatcagtctgaccggagctatataattaatatatatcaagaagactcgttttagttggtttaggtgattcagatcacaaagtacaccgagaatggcgtcgtaccggccgccgtatcctcctcttcctcagccaccatctcaaaattctttggcccctccgcctcccccgccgtcgttaccccctcctgttcctcccccaccaccgtcgcatcaaccgtactcatatcctccgccgccgcctcctcctccgcatgcttactatcagcaggggccccactatcctcaattcaaccagctccaagctcctcctcctccgccacctccctcagctcctcctccgctcgttcccgatcctcctcgacaccagggtcccaatgaccacgagaaaggggcctccaagcaggttggaaggcgggagcgtgctaaaccggatccatcgaagcaccaccacaggtctcatcttcctcattctaagaaaatcgagaccgaagaagagaggaggcttaggaagaagagggagttagagaaacaaaggcaagacgaaaaacatagacagcagatgaaaaattctcacaagtctcagatgcccaagggacacaccgaggagaagaagccgacgcccctactcaccaccgacagggtcgagaataggttaaagaaaccaaccaccttcatctgcaagctcaagtcagtattcttcaaacgactacctaaatcttttttacatattattgttagactctgatattcatcttcttcttcaaggttccggaatgagctccctgaccctagtgcacagcttaagcttatgaccattaaacgggataaagatcagtatgtttctctattattgccaaattttatttctgtgttattctactgtccttacttgccagctattttgatcccactagatttacaaagtataccatcacatccctggagaaattatggaaaccaaaaatctttgtcgagcctgatcttggaatacccttggatctgcttgacctaagtgtgtacaagtatgtgctctcaataaagtcttagtgtctttaatgccagcgacctcatctactggggatacttactgttgtagctcttttcagccctcccaaagtcaaggcacctcttgcccctgaagatgaagaactcttgcgtgatgatgacgctgttacacctattaagaaagatggcatccggaggaaagaaagacctactgataaaggcatgtcttggctcgtcaaaacacaatacatttcttctattaataacgaatcggcaagacaggtatctatccatctcgcttgttggaaatttgttttgccatgtatagcttctagagacagtttccaatttcctatgtttaccttgtgtagtcgctaacggagaagcaagcaaaggaactgcgagagatgaaaggaggcatcaacatcttgcacaatcttaacaataggtgtgttgtttctcaaatatgtgtatttctaaggaaagtgagaaaaaaaaaggtctaatggtttatttttctttggtctctagagagagacaaatcaaggatattgaagcatcctttgaggcatgcaagtctcgaccagttcatgccaccaataaaaacttgcagccggttgaagttctaccactgttgccatattttgataggttggatgctctttatttccccttgcagacaatcttaaatctgaaataccgaatcaggcaaaattttctcataatagtcctacatgtagacacagcttgaaagctgacactttacagattatctttatgttggctctctctgaaggatctcctgtggtcggaaacatgcacgaatagttttcctataggatagtgtaatcaatcgggtgggaaaataggcagccttgttaaggtctaactatacaacacttaagagagatgttgggtctttaatttttcccttttctctgctccaactcttgttcaaatgtttctttgctagggttttagtgtattgccttttggatgaaacatccactaataattttcactgaacctgtagcatactatgctattacatttgactctccccttccttttttgacacaggtacgatgagcagtttgtggtagcgaattttgatggtgctcctatagctgattctgaattctttggcaagttggacccttcaattcgtgatgcacatgagtcacgggtgagttatgagttaccgatatccatgagtatggtccaattatctctggtctctatcatagggatactttgttcctgagagaaaagatgactgtatcaactatatcgtttttgttgcttacataagtgtacttgaatgaggataggatatatgatatatggggctgaatcttaactatggttgattgccttattttcatattgatgacgagctctgacctcatactccacaggccattttgaaaagctatgtggtggctggatcagacactgccaatccagaaaaatttctggcgtacatggttccttccttggatgaggtagacatgcctctccataaactgatctctcttttacacaaattttgacaagtcaagaaaagttcagtttgattgatgtgttatcaatttatgttgctgtgccagttgtctaaggatatccatgatgaaaacgaagaaatctcttacacttgggttcgcgaatacctctgggatgtatgtactatagccaatgtggtttaagtgaaattttgattgtttgagttgcagattgaaataaatatgtcacctgatgttataacaggtacaacccaatgcaaacgatcctggcacatacctggtatcatttgacaatgggaccgctagctatctggtattgcatcggtttttgttacatattccagttgtgtatcttttttttcttctgtctataatactttgggatgaccgttgagaatttggcagcccctacccatgaggttgaacttgaggaagaaaagggccagggaaggaagatcttctgatgagattgaacactttccagtaccttcaagggtaactgtaaggcggagatcaactgtatcagtgatagaacataaagattcaggggtatagtaaatccatacatttagcctttaaaagagtaacacgtggaaagttctagttctcttaccaattcctttggactttggggctttggatgtaggtttactcttctagggttggtgcttcgagctccaagatgagaagattagaggacgaaggcggccttggtagatcttggaaacacgagccggaacaagatgccaatcaatatagtgatggtaatgaggatgattattctgaatgaacgtttcgtgtacctcaaactattgaatcggttttgcaatggttttcctgcaaggctattgtaggctaatttaaaagcgtaatatggcctccaccacagctttgtagtttggcaagtaaagaaattttgatttggatagctggcgaagttgaaaaacgattttacatgtacacgtccataattaatgaattggccatttacgactttgatcctatctaatgtggcagctccgttcatcttcagtggctatgttcatgagaacacatccctgagagaattccttgtacagagaagccttcttagatacttacttacactgtctttctaccagagctgattagaatctgtaataatattatacaggttctactaccagtaattaattaggatggattagagcaaatcttgtactgtagtagatcccagtgttgcaattgtggttattttacaggttcccgaaaatatgacattttcaaaatttcttgtacaaatgaaattattatggtccactatgttttcttttacgaagggctttttctattaggtgggcctattattatatgaaactgggtttcctcttgtgtagcccagtgggcagtataaaaatcagcccaaaacataactgcgaaattcaaattcttacccactcgcacaattagcgcgtcgacgccacctcctcaaaatctgtggaccgtttttggctgtttttggtaaaattaaaaaattgggcgcgtgagggagttttctattgaggaaaaaagcaaccgtttttgactaaataatgtaacgttttatttgtgatttgtttgactgggaagctctgcaatgtgaatatattttatttacaactttcttctttcgatatgttttttacattatttttaaacaagtttacattcttattgtttcatttattatttatttatttagttatttgctttttataagtatcttaatgtagagattttataaaaatttaaaatgtcaattactgaaatgaccaatcacatgtggacttcgaatatagatttaatattttcctttcctaataatatggataataatatatattttaataacaaaattttgcatttttcttcttttcatatgattttttttttcttttaaaattacattttctctttgtatgtctattaatttttttctcttataaatatcttgatatggaaattttattaagttttaaaatgttaattgctaaaatcagttgtgttgatttgtgattggctgaaaaaaaatataaaaacagaaaaaaaaaaaaaagagacaatgccttgtttttagttatgcttaaatctaatcattattcaagctattgttgatacatacaaatttccttaatcactgctatcaatttcaaacgtttatagattttaaaaaatctgtataataacatcaaagattaaaataaaatggtgagaattttagcactagcggccaacacttaacatcagtagcaccaccatctcacgttgaattttatttttgtaacaaaagaaaattaacatatactaaaaaaacaaccaaaagacattgcaagtttttagtaatttggtaacaaaattgcagtaattcacgtgaatccccaataatttgatctcatgcacacatagtggggtccaatcttttttgttcatttgccacttctcgccagcctctcctcttttgttctcttcactacctccaaacttcccaagaatctctctttctctcctctcttctctctcgcctcttctttaatttcctctgaagagaatcctccttacgaaaatgttcaagaaagcaacattgaatctttcacttgctcctttgctacttgtttttcttttccttctctcgtgtgttgttcatggcgtcgatgagaagaagattctcagtgtacataacaacatctggtctcccaagaaatcatacgaagcttcaacttcatgtttttctcgcagtcttggtcagttctattttcatcaaaggctcaccaaccgtagagatactgtttcttttgctttagtttaatatttaatggcgtaatttaaggttaaactcttagttaaagtcattagcttttacactactttatattatcctttttccttgtattgatttgggattagtatagttactttttacaaagagacaagatttgttgatctttatgagaactgatgattctgctttgaaaaacttaggaaaaggaagagaatccactacattggagatgaaacatagagaactttgctcaggaaagactatagatttgggtaagaagatgagaagagccttagttttggataacattcgagttcagtcacttcaactcaaaatcaaagcaatgacctcaagcaccactgaacaatctgtttccgaaactcagattccgttaacctcagggataaaacttgagtctttgaactacatcgttacagttgaattaggagggaaaaacatgagtttgatcgttgacactggaagtgacctgacttgggtccaatgccagccttgcagatcctgttacaaccaacaaggtcctttgtatgacccatcagtctcatcttcttacaagacggtgttctgtaactcatccacttgtcaggaccttgtggcagctaccagcaattccggcccttgtggaggtaacaatggtgttgtaaagacaccttgtgagtacgttgtcagctatggagatggatcatacactcgaggagacttggcaagtgaaagcatcctattgggcgacacaaaacttgaaaactttgtctttggttgtggccgaaacaacaaaggtctgtttgggggatcctctggtttaatgggtttgggaagaagttcagtctctttagtctcccaaactttgaaaactttcaacggagttttctcatactgtttaccttctcttgaggatggagcttctggctcattgtcctttggtaacgattcctctgtttacacgaattcaacttcagtttcctacacgccgttagtacaaaaccctcagcttcgttccttttacattctgaatctcactggtgctagcattggtggcgtggaactgaaatcttcaagctttggcagagggattctaatcgattcaggaacggttatcacaagattgccaccttccatttacaaagctgtgaagatagagtttctgaaacagttttccgggtttcctactgctcctggttattcaatcttagacacttgctttaacctcacaagttatgaagacataagcattcccattatcaaaatgatcttccaaggtaacgctgagctcgaagtggatgtcactggtgtgttctactttgtcaagcctgacgcatctctagtctgcttggccttagcaagtctgtcatatgaaaatgaagtcgggatcatcggaaattatcagcagaaaaaccagagagtaatatatgataccacacaagagaggctaggaattgtcggagaaaactgcagagtctgatgcctacaccataacttaatatccatttgtgtgctcccttcatatcatgaaagccaatcatctcttttggcaaagccaatttgaattctcccactaatcttataaataaatatatttctgtatcggtatagcaaatgatgaattgtaagcaaaaatgttcgatgatcttctgcgaggaaggaaaattatctaaaccataagaacaacaaacaatgaacggtcatctcaagaatctgatgttcctgtacctaaaaacagaactgatataactcaagcttcatcactgatcagagcggtcatctctatcttctcggtatcaacaccttcacttattctacttgttaacatctcagcagggagaatggttgagtttgaatcaacatttggtatcaaaaagaccaatccaattgggattaccctcaataaactcctgatcacaataaccaaccagagattatcaaactgagtacgcgtaactttcagggcatggagtagtactcctccgccccatgacgacactagatgtcctatatgttcaatagacatgagcaaagcaaagaaagtgccttccataccggcagggcagagcttggagctgagaacaagtaagggtaaccacttgattctacttatcatatgtgaaacaaactcatctaccacaataaagaagtaatcagggagaccaagcttcagatttatgcgcagcaccaggattaaatccagaaatcctgacaggacagatagggaaagtgcccagaagacgacattcctgaaagggaagttcttcagaaagttctgatagagaagtattcccacaagagagccaattgcaccaaacgacataatggatccaacggcttcctaagcaacagaaaataactaccttagccaaaaacatcacagagagttcccaaatgttttaagcaaggccatggaaggtgaattacagctctagagcttatgcaaaaggtgaaagcacctttgaaaaggaagggccatcctttgaatccgtgtaccaatagaacatgccttcgtgaatgtgcaagctcactgcagctgacaatagcatgaacaagcatggtcgccacacctcaccatattgaaaggttttccatattgcacttccagcatccagaaacttgtcgttaacctgaaagcacagttactcgattacattactagcttaaagaatctggttggaccaaagggtagcaaaacacttacatgcttgcgacctagactgcgagaaggagattctttcagaaccatcccaaccacaacaagcaatcctgccgtcacaccgagtaaaccgtacacaccctgccaccaaaaaaagaagacaaaatgagtggaaaacacttgaagcatttcgactctatgcattcaaagagatctttaaagagcctactttggacccaaccaagtgcaccaaaacgccgctaagggagaaaccaaccaaggaaccaatcgaagaacacaaaccacacaaactttgcatatctgcagcaagtgtaggatggcttatgctacattgtgtcacacaagcatcaatagttacatctgctatagcaactccagcacttcctgccacaagacaggacaaagccagtgcaagatgcagattcgtgtgaagccataacaccatcatggagatcatagcaagaaaacctaaaatcgaatcgaacaaaaaaaaattacatctttcattcattaagaagcaaagaaactaactttcagtgaatttaccggctaatatgaaatagggtcgtctcctgtaacccaaaactgggacaacatcagtcaacaatccccagagaggtttaataatccaaggaatctgaatcaaaccaacgtaaatctgagcttgagagggttgtatcttctgctcgtctttgaagtagtactgtgtgctgactttgctgagacctttaccaagtccttggctaactccatagacgataatcacaccgaagaagaagctccagtgaagctcttcgatgagcattcttagccaccgtaaaggtcgtttcagtaccagatctaaaactccttctttcttcttgtcttgatgatttcgccgagaatcgttctcgtactctgcttcctccgatcgattggccattagagagagaagttgacgaacaagcgatctgactaatgaattggtacccaactatatagaaagcacacgaatcaaaaatcagagaatcttgttaaataaccaatgtttgaagacgtcacggatgacgaaatcacgcacgcacacaaaaatgtcttggaatttcaaactcaagatcaatgggactttggttccaatcttttcaaattacttattctaaagatatagaacattagagtagatgggctttttgtggcccattagttctttagtcgttcggtaggcttatttgggcccattgtttctgtagacgtcttgtgggcttcatttggctcatgtcctgtctgttccaaactaggcaaagcctctgtcttagtaagagggtctttaatgttgatactttgtcataggttcatctttgtcattctagaatcaatgttaatacctaataatttcatgcgaaaataaacaaagtatttatttaaatgcttacttatgatttcagatggccaaatttcacaatcacatagattcctcacctgtcactaccaaatacatttgatttgaagggtgcttattggactctaattggcaaacttttaccataattgttgacaactccttccacctgcataaaaatgagggcaggtagtagacacattatatttaataaattatgacttttattcatacaaacattaataaaacagataatggtttggaagttatgaaatttattgtgtgataaaatttctcctgtttgtgtgtgtgtgtgtgtgctgttatgatcaaaacgtcatatttgtttaccaagtgctaaattattgggagaacaggtaaatatgtacaaaaaaaatgaaaaaatataacaaagtttcttgctagttcggcatcacatctctcatgggccgaccaagaagtagatcaaccaagaatcgataaaacttgaggcactccatttttttctttggctaattaggttcttcgacaaaaatgagcagataaaaacaataatacagatatggatcttttttgctagtcataatcaatttagaaaatggttcattaattctgatttgagaaattcttaaccgtggtgtttaataatcaatctgactaagaaaagtgcaaaaatggtagcatatatgaatctaattaagaaaacgtgacagtggactagacacggttatatcaccggaaataaaatctattaaaaaaaaatacaagataattagtgccataatcttagtgactttatcatatgatcagtacaatttaaaatattcggctgagaatctgtatttaaaccaaaaaattgttctaaaattttaacatatatatatatatatatataaacgaaaaaaaagatgtgacggatttaatataaatatactcaaccatttccaactatctgtctctcattttcataattccattttcaggattgtctctcaatcttttattcttctcattcaccggtaatggcaaaagtctctgggaggagcaagaaaacaatcgttgacgatgaaatcagcgataaaacagcgtctgcgtctgagtctgcgtccattgccttaacatccaaacgcaaacgtaagtcgccgcctcgaaacgctcctcttcaacgcagctccccttacagaggcgtcacaaggtctctctcctctcataataccataaacgacatcgttctttatcaggtaatttaattgttccgattgttgaataataataggcatagatggactgggagatacgaagcgcatttgtgggataagaacagctggaacgatacacagaccaagaaaggacgtcaaggtttgtctacacttaacacgtatatgttggtaacaactaacaagaatttgttagatctttttggtcttagattggattccgatgaactcggagactcctttttcttcggaccagactttgtccttcgactgttcttgatttgattcttgatctttttcatatatttttttaatttggtatttttgatgatggtgatgtgcaatggatgatgaatgctgactcatcaagtgcagtttatctaggtgagttttttttttttcttgccaatatcctatttttttatataagttgcaaaaaaatacacattttgataaagtattgtacttttccttctttttcttttttttttcctgtcactttttcttttaaatactcttcgacaaagtgatgaaaaaagtccatatatacatgtgtgatatggctgtaaattaaagaatgaattc

SEQ ID NO: 1260 - DNA, 132990 bp, Arabidopsis thaliana
  modified_base (132953)..(132953): a, c, t, g, unknown or other
ggtacgaccaagaccatgtcatcttgtttctgaccggattgaatgaactccacaaagccgataatgttccagtttggtacggcggttcgttccttaaccacggatcctttcatttgggagggtttaggacccaactcgaagttgccgtttggtaataaacctgaaacaaaaaatattaagaaatgttaatttataatctcggatttgagttgaaatgagctttaactagagttactaccatcgcggactggggccgataagacgacattcgaagagatgaagaggagagctaagaggagtgctgcttcttggtacatcatgacttccttgggtgatagatgaagatcagatggtgagtactatccaaagggtgaagaaaggctgggtttttatgagtttgagaatagaagacgagcactggttttgaagaaaacaacgggaatgccactggaagcatcctgggttctattgtcaggtgccacgcagacacagacagctagctcaggaaacatttgacttcatgattagcatttccatttcttcaatgtattgtttaaggggctgccttaacaaccattatattaaactatatattcaaacgtaatttgcgtttgcctatctaaattattcacataaattttcaaagtattaaaatattttttggctttttcagaaaaacatttttgaagatcagtacatccatgcgtaaacgccaaaaaagttctttttgaaaaaaggtttacgggtaagtattccttaaaaagtgattaatctggaaaaaacatacacactaattaatataaatatatagggtacgtaacaactaatgcaaacaaacaacggaaaactaaaatatgtagagaaaaaaacatatatatcatcaccactcaactataatgccatggttttggaaaatgaaagaaatataatgtatatttgagatgtctctaagattagtcatttaacgccatgcaactcatcccaactctaatcaataaaaaataattatgattttcgtatagaatgcgacaaccaaaagttaatgacgggggaaaatatgtgctgttttggaataaatcaactcaacttaaaaatgaagtcaaaaatggtattgattgatgttagatattgatcacattgggatgaacacgtgcaggggtaggttgttttctggtgcagggcacgactgccgactttaccgcattagaagtttcgatcaatattcctaatgtccttattaacatgtcaaccattatcataatccaaactcttcccaacatctttgattaaattatgtatacattagttttaagtttcaatttgttaggcaaagtagagagggacattatggtgaaaaaaaagacaagggacattaagaaactttagttatacgtcaacatatatataaaagacaatggttgggagagagatcacgtgcgacaaggctggaaagattgatttgccgtaatttcaaagcgaaggatttaaaaaaagatgagtcagaaaaaaaagatgaggatatagttcgggggtttgaacccgacgtgaatcgaacacgcaaccttctgatctggagtcagacgcgctaccattgcgccacggatcctcaggtaattacatctatacgtttacttatttatactaacaattagtgaatgataaaaaattaaaaaccccttccgattctaatttcctggcggagcaaatttagggtttatcgtttgcatcggtctcgcgtctcgtttcccacagacacatctctcgaatcttttgaaggccttcattgcaatagattgctcgtaagggataggtaggcctttatgttctgccgcttaatttcttcgccggattctgtttgattcattttaaggtgagtgaccccatcgcttttagattacagacaagtatgtatttatggtttgaatgatgcttattgtcttgttgttagcttagattttacattcagccattaatttagtattaataagcttcggttctacttgttttaagcagttaaatgctttaatctctgaatctttgaaacttgctcctctcttaggaattaggatggaggaattaacccaaatcttgaagaacaataggacagatgatctcacttggttttgctctctctctgaatctgaactggtaaattctgcttcttccgtcagtcaagcaaacattaatcgatcgatgaattaccgagatatccgctgaacttgttttgcaggatttgctcatcagcttaaagaagctagccattcaacgcgccaaaataagtggtcaccaagaactagctgacaaatttgatcttaagttgctccgatctctcggttctcttcttgcttccttagacttttcaaaatgttgcacaatcatgaaaattcttctatgattagacatcagggttgctttgtgaagctttccatctttgaccttatgaatccagtatgttattctgcagggcttgtgctaatggagcacgcgaggaaaagggtacaaaatgatacttctcttgctccgagtgttgttcatcaactcaggcttttggataactgcaatttgttgaaaacgcatgtagatgatgctgtagacattgaggagattctgactcaaatctgcgacaacaaatcaaaaaagaaagcacggaaaaggttggtatacagttagcggaaggaccttagagtatttgatgctagatatttatgctttccttttgtgtttgaaggaggcggtagaagctacctgttgcggtggggaagtccggctgcttaacgacggacagtgagaggaagaaatcaggatgctcatcagcaggagcacaagaagatggagttggcggagaatgcagagcatggtcttgaatcttgatcctcatattctctggtgtttggtcattctttctgatgaacggtggttggttgcaaatgtttgtaattgaggatggtgtccttaatacgtagagtatatagcaaaattagcttactttgtggtctctggacaaaattttgaaaagttgtattattgtatggttcatatttaattaaagttacggtttcttcatttgattggtgaagttgcgttgtttgaagaccaaacgagtataccgcttccttcgtcatctctgacattggtggtacttgaaaatgcaactatggtaaaaatttcttagggtgatcataaactattctaaaagcatggggtcatatcatgaatagtactgattataaatccttaaagtgcaaaaatagtcaaggaagaaagtacttttacaaaagggtaattccggtaaatgcaattgatcggcgacgcattctcctctcacagtctctctcagtcactggctctcaaattcatactacttggcaagcttgctcgatttccctcgtacagccaaattgtgctatgggaatcaaaattaacagtcgcagaagccagtaataatggagtcgttgcttcgagctgatcaaaccctaattccgggagcgatgtgtagccgcagagtttggacacactcagaactggctcttccctcagtgagcgtaactgaattggatctggtaagcccacacaattctctcaatcttttcttttgacttgttcagtttctatgtatcctcaatttcttcgttgaataggtgagaggtctattacaagctttgcaaggtctgtctagtcccttccttttctgggaccaaactggacaaactttccgcgccaaaagtcatatacgcgtctctcatttgtctcactcaagccttcatgttcttctcgctgggttcctgtatcccgctacatgtttgaaactcgttgagtctatcgttgctgccattaatacctctcttaggtctcctcctaccttaatggcattctctgactctgtctccgcatggcttgaggcaagtttcctcaactttcttttcattttgtttcttttaacatatgttgttttgctttagactaatttacatttggcattggatcagagactcagagatattgctttgaaagaggaagtgatgatcgacaattctgatattactgttactccaaccctcttgggattaaccagttctttatctaggtgtgtagcctatactcttttttcatatatcaaatgctaaactctgtgttcatgtttttatttaacggtattcttcttcttttctttccatgtacaagtctttgttcaggtgctgaatatctcttacaagttgtacatggtgccatccctcatacgttttttgattcaaactctacgatttccgctgctgagattgctgtccatgttcttgattatctttacaagaagcttgatgaagtatgccttgtacaaggtggtgaggttgtgaccgtgttcatgactttctgtgtttttctttttaatctttgttggtggttactttcgtaattgaattagcgataaatatttggaccaggtggaaggatttcacatgctgttgcaaatgtttgctggaagtttattgccatatatagagggtttggattcatggttgtttgagggaactcttgatgatccttgtgaagaggttagtgttacattgatgttcaacgcttttctttctagcaatttctgcttcaatatagagtattttgtattatggctagcaaattgaaggtttgatctttggtacttcgcagttgttttttacagccaaccaatcggtctccgttgacgatgcagagttttgggagaaaagctatcagttgatgaaggtgcccaactcaaaatcaaatgtaacttcactaaacgaaaagaaagtaatgagtggacatgacgccaactcatctttagcttctgacaaagacaaagagcaaaatactcgggtgttatgtcccttattcattaaagacatctgtaagtctattgtttctgctggaaagtcactgcagctaatgcagcatattccttccacgtcttcagaaaattctggaaagactcagttccatgggcgaaatggttatgggaaatctagcgttggtagtctcctgactaaaatgagcagctgtagtagcactgcggacttatccttgtctgaagtcttttgtttgacactcgccggccttataggccatggtgatcatgtctctagatatctgtggaaagatgaggcggatgagtgggagatttctccaactttagcatcatatataagtggagagcttgtgaatgacatggataataaagatcttccagttctcacatgctcagagcgaatgtggtataagttgttggtcggtgctgtgcaagagaaaagagctatggaggccaaatcagaactccagagtgcatgctatgctacaggtgttaaggatggaaatagtggtctcactgcccaaaaggcgttgcaggggttattctgtaatgaaaaccttgttgtttcagtatctaaaatggatcttgagaggaatagaaatgcttggaatgtcttgaacttgtcgcaaaactattgtctaccctctcttaatgatgagagtctgttgagtgctgtttttgaagaatctggcatggcagatgctggactgagtggaacaaactacaaatttggattccaatttggtagatctgaatatatttcttctcaggatgacacaaaccttctagaaacattatttccctttcccactttgcttccgtcattccaggtactttgatactgatgatttatgattattttatggcacttttcttcgattttctctcatttgcaatagtttctgtttgcttatcttgaaatctttgtgatcaacaaaaaagccgaagctccatctgtcagaattcttacctttccaaaagaatagtacacttccttcaagagttctcagctggttgctaaaggcagagccaatggatactcgacttcccgttgtaattatgcaggaatgcttcacaatttacataaggaggcaggtagggtgatgtaatcttcaacattgctgcttgtgcctatggcatgcatactcttgttaccttctgaaagttgtgtatgttttaggtggactacattggcaaagtgattttgtcaaaactaatgaatgactggaaattgatgcacgaacttgctgtattgcgcgccatttacttgctaggttcaggtgcgttttatgtgctcaactgttttggcaatatggttgtatctgaaatcttaataaccccttaaaactttcaggggacctgctgcagcattttctgactgtcattttcgataggctgggcaagggagagtcatcaaatgatgattttgagttgaacataatacttcaggtaaccaggtttggtgtatttttaagagacactgctctcatctttatagttgttatcacttctaaaatgattccgcttgttaattgtttgcttatgtatccgtgttctgttgccgtatatgtgttcatacaccaaacttatttctaaagtgtaatggtcttctacaggaatcaattagaaattcagctgatgccatgctgttaagcagtcctgattcattggtggtatctatttccagagaagacagagacaaagatgataagggtgacataatacccctttcttcaactcgtaaaagccgcgttaacagctttggaatagattgtctcgagtctctcaaattcacatacaaggtctagagaaacaacttagtcttccatccaatccgtactggtatatctcataggccacatctatgtgtatttgaagagctgaactgttttcttttttaaggtgccatggccacttgagcttattgccaatagtgaggccattaagaagtataaccaggtaaccctttctcatccagctatttttgtggtaaacagtttgttgttcctctatgtggtaattatttaattgaaaacaggtgatgggatttttgttgaaggtcaagcgagcaaaatatgtgcttgataaagcacgaaggtggatgtggaaggtctttgatatctctcaaactcatttctttcttcttagactgtatcccgtgacttccaaatccagtttgaaagagcctaatcagtcttttgatctatacatataaatataaagggaatcataagaatgtggttcagtttgataaacttgatgactttggtgtttgtgtatgatagggtaaaggctctgcaacaaaaatccgcaagcaccactggttactagaacaaaagctcctcaactttgtggatgcttttcatcaatacgtaatggacagggtattgtccaatgctaaatgattggttataattacagtatcatttttcgttggagtaatataagtttgtgctagagttgtggcaaaatcgaaagctgatcacatggcttgagtaagatgaaaagcttgccatgcttaactgtattttgtaagcaggtatatcacactgcgtggcgtgaactgtgtgaagcgatggtaaaagcagggtctctggatgaggtcatatatgtacatgaaacctacttgttatcgattcagcggcaatgctttgtggttcaagaaaagctggtaatggaccatgaaggcattaagcgacctcttaaaatgcatagtatatatttgaagttgtaggcttctaaaaacctagtgtttggtggtttttgtatagtgggcaatcatcgcaagtcggatcaacatgattctcggtttagctctagaattctactcaatacaacagacactgagcagcggtggagcagtttcagccatcaaggctagatgcgaaatggaaatagaccgtatagagaaacaatttgaggactgtattgctttccttctcagagtaagtaaatcgaaaactgtgtacttgttgtattgtgaagctatatataattgattaatgcttaatgggggatggaacttgcaggtattatcttcgaagctgaatgtgggacacttccctcatttggctgatttggtgaccagaatcaattacaattatcactacatgtcagatactggaagcttgatgactacttctggagcagagaccaactcatccagaccttggactgccaaatctgatgtatgaatggaccgggaaattatcgcaatgttggattgtcgcaacactatcacacgtaattgttcaagcctcatgcttttcttgtgtctggtatctaatttcctgattatgtattttctgtttataaaagttcactgttttgaattagacattgtacaaaactgctatcaaggtttaaaaaaaaaaaaacattgttaacattcttaacaagaaatcatcaaagtttaaaatctaatcgtgaccctactatgcatagtacatatattaagcattaaccaatacgacaaaagaaaaaaaaaagcattaaccaaaaacaaaaagacgataattaaggttataggttatgagtttattacgaaaagcccatttatggatgcaattaagcaaaccttgttggaggacaaaatggtcaaaagaaagaaaacgtaaaaccctaaaacatttctttaacactcgacttgtctcataaaccctttgtgtttgtagtctctctactctctagatcccatcccatttcttgatcagcctcgcgcattgtgtgcttacacgtaatcctctagcttctttcctcggtattccttgtctaattcgaacttctctctttttttttctgggtccgatcgtttcagtgaaaggcgtaacctttccttcgaatctgatagcattgcaaaatgataatgttagtctgatttttgttgggtgtgtgtcttttgattgaaagagcaggtaatttccagagagattttcaacagaggaagcatgttcgctctttccaaggttttacgaaggtaaggatctctgattttgttcgaaaaactgttagggatgtagctatgtatgtgtcttcaatggcagtgaaacagatttcgagtaaaatttgaaattttgagcatggttttgatttgccattaacatatctgtgttgagttggtattagcacacttttccaacttttgtttttgtgtgtgaattttacagaacgcagagactccgactgggagcttgttctgctgtgttttcaaaagatatacaattaggaggagaaaggagctttgattccaattcgattgcttctactaaacgtgaagctgtgccaagattttacgagatctcctctttgagtaatcgtgctctttcctccagtgctggcactaaaagtgatcaagaggaagacgacctcgaagacggtttctcagaactggaaggttcaaagtctggccaaggttcaactagtagtgatgaagatgagggaaagctctccgctgatgaagaagaagaagaagaactagacctcattgaaaccgacgttagtagaaaaacagttgaaaagaaacaatctgagctatttaagaccattgtctccgcacccggtctgtctataggtagtgctcttgataaatgggtggaagaaggaaatgagatcactcgagttgagattgctaaggcaatgctccagctgcgcaggcgtcgcatgtatggaagagcgttacaggtagttctcttcttactcgtgatttaactttctgtatctgaactggttcaagtgcttaccttggtttcttttttctgtttgtgtagatgtcagaatggttggaagcaaataagaaaattgaaatgactgagagagattatgcttctcggttagatctgacagttaagattcgtggtttagaaaagggagaagcttgtatgcagaagatcccaaaatcttttaaaggggaagtgctttaccgtaccctcttggcgaattgtgttgctgctggcaatgtgaagaaatccgaactggtgtttaacaaaatgaaggacttgggattccctctctctggatttacttgtgatcagatgcttctgctccacaagaggatcgacaggaagaaaattgctgatgtactattgctcatggagaaagaaaatatcaagccaagtcttctcacttacaaaatcctgattgatgtcaaaggtgcaacaaatgacataagtggtatggagcaaattctggagacaatgaaagatgaaggtgttgaactggacttccagacgcaagctctcactgctagacactattcgggagctggccttaaagataaagccgagaaagtcttgaaagagatggaaggtgaaagcttagaggcaaatcgccgggcattcaaagatttgctctccatctatgcctctcttgggagagaagatgaagtgaaaagaatatggaagatctgtgaatcaaagccctactttgaggaatcccttgctgcaatccaagcttttggaaagctcaataaagtgcaagaagcagaggcgatttttgagaagattgtgaagatggacagaagagcttcttctagtacttactccgttctcttgagggtttacgtagatcacaagatgctctcaaagggtaaggatctggttaaacgaatggctgagagcggttgcaggatcgaggcaacgacatgggatgcactcatcaagctctatgtggaagctggagaagttgaaaaggctgattctttgctggacaaggcatcaaaacagagccatacaaaactgatgatgaactccttcatgtatatcatggacgagtactcaaaacggggagatgttcataacacagagaagatattcctaaaaatgagggaagctgggtatacatctcggcttaggcagttccaagccctcatgcaggcttacataaacgccaaatctcctgcatatggaatgcgagatagattgaaggcggataatatctttccaaacaaatccatggctgcacagttggctcaaggtgatccatttaagaagacagctatctctgatattctggattgagtagtctctctccctacacttttcttctatctgcttgcaagaagtatctcatttgtcgtcctaacgtttagtttgagagagtaacgttaagtttaagaacctgcttagttgctgtgtttttaatgtttctattcggttctttggtgatcacacttcagagaccttcaagtttcatgacatttaggagtacacgaagaaaataacgttttcaaactgcgcgtattctaccgcaaaattttacaaagatttagccactcttctcttaagtggaaaataaacagaattattccaaaccattaaaaactctgatgagaaaaacagagaatgttacaataactctgcttataatgaatacagacttactaagacctcaatcaccccaacttctttccttttggggcagacaaaaaaaactcgcaaacactaatcgattgtgagctaagaagacaactagaagtgatcactcagtcactcactcctcactaagtacagtgatcactcagtcactcagtcctcactaaatacaagtctgcttatgaatgggcacatggctgcaagaagtgccttgggacactcctcatgtggcagatgtccgcatcctgagattgctactagcctctgtttgttgacatgtataatgttagttacgtatcaacagagtttaggtgtttaattagatatagagagggaggacttacagagttttcgagttttgaagccatgacttgggaggacttgaggggaacaagtgcgtcttcggctccagcaacgactaatactggtaagttttccactgccttgagaagtgacaatgcattttgagttggaagcaccatctcggatgagagtctgcctatctcgtgaagtgcctcatcccagccttccacatgaagtggtgccttgtatagccttaagacatcggttgtcatcttggcaggatcataccaagctctgcgattcaccacctgagctatttcagtgcgtaaaagcggacgaacaaggtgtttctttcctagtgatgtgtgcagaagtattcttgcaaaagctggcactacttccctcgtcaagcttacattaagcaaaaccactcctttgactttgatgggatcttttgtttctagcaatctttgtgcagccttgagagcaagcaaacctccatcatcatggccaaccaagactacagaagcaaatcccatttcgtggcaaaaggcaagaagcatgtctacctgaaagcatcaacagatccttgagttttaacatttctttctaagagcaaagacaaaaagctctcataagtaataaacatagtccggaattgaacagaacttcacctgattatccagagtgtaagggtttggcatctctctttcttccaaatcctttttatgaggtctggcggttaatccccaaccaggcctatcaaatgcagtgacaacacagccaagttgatgggcaagagaactcatcacatgtctccaagaaaacactcctccgccaaatccatggaccaacactacaccaaattggccgtttccaccaacatcttgctgttccgtggcaccaaaattggacacattgatgccatcctctcggcacgattcttcctgaatatctttgaaaagacgaggagaagtaggaagaccatcaaggagagggtcgtgcaaggaagaagaattgttaaacagactgctgtagctcctatggtggtgatggttgagcttgtttctcgtgaccatgctcaatatattcctgtcaagcttcaaccttcccaccatcgcctctggcatattaagcatagagttggcttcaactgaggaggagatagagtggcgaggagaagcaggtgtgcaaatcttgtaatgcacagtgagccctctgactgtaatgaataagctgtcaagatcagcaagcaatctcgcaggtagctctccgtcatcgttggatactgaaggatgcagctttcgtcttgcctcgccatcaaccttggaggcctttcctaccaaaggaattggagaacgtgggactttctggtaaccagagaagacacttttgcaagaaagaacctgcaacacaatcaataagttaaacaaagatcaaagctttggagcaaaaagagaagaagaagagcatgatgataataataaactcacagcttcagggtcaactctgtgatacaagagtttcctcctagctctgcaacttgttctataagcaacaaccatatgaccaagagcaaaaacaacagatgaaaggaacaaaactggcatcccccaagactttttcagatggagtctttgccttgacggagaggacgaggcttggtcgttaagttgagaatttgcagtaaaaacgcaagcttttactgatagaagaacaacagaaacaacagaacacagcgatacagttccaaggtaagggccatgcgaaagtgcaggagcatcggatagagagtagacacctgttcatgaacagaagaatacaatcatatcgagaaaaagcaaaactcagagagaaaagaaggaggaggatggttcttagttcttacagatgacaaggaaagatctgacgagggagacgagaggaatatcagtcaaagagctcttgaaagcgtatcgactcagatgctccttgaagccgtaacacgtcaaacaggtaaagcttgaaagcaaaaaggtcggaaccaaaacgtcgccgatggctacaagcacaggcaacgaagaaactaacagcgagacaagcatcgcaaccatgaagaacaccgtccttaagcatcttctagctttctctaccatgaaccaacctttccccattcttttaatttcccccaaaatattcaaatccgaaaccggagatcgtttcggttattccgatacagatccttaaattatgagggagtaggaaccatagagagaagaaacggaaacgaccaacaatccaccaacaacttcggaggatttcgcgacgaaggtggtggcgagttggccataagccggcggcgaggatgaagaggaaaaaaagcgaccccttaaacgcaatgagagagagagagagagacggatcaaaaacaaaatcaaagaggaaaagccattgctacgattctgaatggaaagcttgaggagtttcagaatcgcaggaacagcgaaacaatgaaggaagagaaaaaaaagagaaacttttggacgatccggaaattaaacaaaaacctccgttttcttctgctcctttttttctctacaacgtttcttttctctctttcaaacacatacagtagtagtacataaattataataatcatatgtagtattattacgaatatttatttattaaattctttttttacgaatattttttgcacgattctgcttgggcctatcagttaccatttaccagaaaagtcttaattggcctaatatatatataccctttatattagaagaaaaaagggaaatgcgactattacttagctgtattatctattaaaattagtagttttgcttacattcatggaaataatgtttctttaaagagtaaaaatattttctataaagttataaacagaaataatacgttcatgacaggcttgtttttaccctataataagacatgcattttttcctctataaaagtaatttcagcaatttttgtatctgagtataagaaaaataaagaaagaaacaaccgagatgacggttatacccctatagagaagtactgtaacagtgacaacggatagcgggacgaacgaggctgtttctttccttttcttttttttaattattttgtgaccgttaactttcaaacttggatttcgtgaggttttttcttgaagattcttgtcgggaccatttttatttacacagcagtccctacattcctcatcttttccccaatcactgtctatatcttaaattaacaatatgggccatccattaattttatcgcttttcacatgttaattatttgcaaaaacaacttaataagtatcaccaaactatcttgttgtaactagaaaccaattttatgttatccgaccaaaatgtcacttgattcaagtcacaaagatcagtgtgatctaataatcaaatcacatgcctagctagttgattgaagaagggttgatgatataggtgctttagttttgttgaccctagaggcaaaccaaatgcatgaaacacaacacacttatagatatatatatatatatagagagagagagattgcatatataaaaggcaaactaccaactgaaaaagagcaaagatcacgtgcatgggtcccaattccactctctgcactttcacggtttgagcagctcacatgggaccttacctgctgccgcatctaaagctgccccgatgtacaagcccctcttcgattccccaccatttactcactttcatgcatctctcactccctcttttacctatctatgtttttattttagatctttttttccttggggcaaaaggttattaactagatctcaatattcattcgtttgttttttgtctccgtttctatctacaatggaatcctaggcagaggattctgtcatgacttgttgatattgaatatttgttttgtgcttgaaatctcaaagattagtttattaattagacagtgtacctatgactttgcttaaaataaacgaccaacttgtttctgtgctttgtcatcgagttaaatgacacacatgttttgtcggtataagtgtgttgtgctgtgctggccttataactaaactagacactacgtatatagtagtagcctctcacctatctcacccgttttgttagttaaatgtttttcttttacgccataagccgtaacataccaagaaagatgtatgggctacgtttgtttttcaaactctattgggctttgcttgtatttcaaactatattgggcttagttacataattcttatagggctttattagtgaaaacccacccacttgcatttatgattcactttagcttcatgtgactatgtgagccgttaattagcctctaaccgccgaagatgatggtcaactccaactagtcaatcggaattccaaatctctagacggagattctgatgccggaatgccatcagcttccgaggtaattttctctttgcctgtttgttgacatagacacacgcacgcttataggaaacgaaattgcgatccatcctcgaatgctacatccatcgctcttctctgttttatcgatcaaatcggaactaactgataggatagttaggctgatatgggagtcaaatcggtgaggttctctatctggttccttttcgttgttacggatctcgtgttttgtcgcacgctctcaggggatccagatccatgtgatgcaacgaaccagagagaatttcaaaaactcagatcggatcagatcaccgttctaatcaatggttactcagaataccggattcctcttctgcaaaccatcgtggcctcttattcttcatcctcgatcgtatcctccatcttagtcctatggggtaaccctagcacacctgatcaactacttgaccagttgtatcagaatctgactcagtattcgcctggttctgcttccatctctctaattcagcaatcttcgagcagcctcaacgctagattcctccctcgttcctctgtagacactcgtgctgttttgatatgtgatgatgacgtcgagattgaccagagatcgttggagtttgcgttttcagtgtggaagtcgaatcctgatcgccttgtaggaacgtttgtgaggtcacacggtttcgatttgcaggggaaagagtggatatacactgttcatccagataaatactcgattgtgttgaccaagttcatgatgatgaaacaggattatctgtttgagtatagctgcaagggaggtgtggagatggaggagatgaggatgattgtggaccaaatgcgtaactgcgaggatatactgatgaattttgtagctgcagataggttaagggcagggccaatcatggttggagctgagagagttagggattggggagatgcgcgtaacgaagaagtagaagagagagtaagagacgtgggattgagcagtagaagagtggaacataggaagagaagagggaattgcattagggagtttcatagagttatggggaagatgccattgatgtatagttatggtaaagttgtcaactctgttggggaacaaggattgtgtcgtaaagccggcaaacttgtcttttgtgatcgagattgaccgttttttttttgtgtgtgtgtcaaaatatcgacactaataggatgtgtaagctcatcatcgtgtaatagaaattggcaactagcagcaagttaacaacatggaaaccaagttttgaaccaagcagtaaaaagtgtaaatttgagtttcgctaaaagaagaagctgggcttcgagaatattgtccgtttgtattgtaaatgggccttacaaactatacaggccgcattaacaaaatggaatttcaaattatgaaccaaactcaaattacgaaaatcgtaactaggattttgtttttttttaatataaacatagattgaaaagagatgtattagtctttttcgaaatggtaaatttgtagcgtgtgggcgttactcactatgtgatcatttttgtataaaaggaaacaggaagcttaataataagttcaaaaatggcgtggcaaaggcggagccgtcggaggatttttagtttacgagaaaaaaagaaaaagagagaaatatctgaaaaatacgggaaagatgcaggcagctgtcacagccgcaggtaaagagaaggtgtgtgacgtgtctcaataaaacaccgtttctctctataacacgattctgtcattatgtgtctgagcaaaagtgcctccttatttacatctctagaaccgtttactattggccacgtggaagatatcggtaccgttgcgttgttaaaaagggttactagtactcctcgtgaaatgatttggtcccacttcacaagtgttaatgtttctataagaaaaaaaagagaataaagaaagacagaatcgagaggagagagtatcggatcttcctaagccataaacaatgcagcaatacgctccatgcctttggatatttcttcggcaacttgtaaaactgacaatcggagccgtctctttcatcccacggctctcaattatcctctcgaccatatatatcatcgacaacgtgtatatatgtgtttaccaaattatgttttttattttatttttcaaaaaattgcactattaggtggacctacatatgggttcgattcgactccaataaacaagctaatgatgccgcccgatgaccattcaaatattgttggtagtggctttctcctaaatatttgcattttcttaaaagaccctctttgaaaaaatcataattgaaacacgacgtatcacctacatgcacctcttgaaaaatatttccattttattctcaacgaatgtatttattgatgtatattatttcacaacgaaagttcgcatatatgttttctaattggtccctagaatataattatgcgatattaaagttggatgcaagggaaaaaaagataattctgaaaaaaagataattctgaaaaggataattctgaaaaggacaaaatattcctctagaatgtataagagttggtcattttttttttttggggtgaaagtaaagagtttggtcatcttatttcgtttgacgtccttattttggaccgccgtcggaaataagcggtcaactctgaggaggatgcaaattcttttacgtttaaaaaaggggaaaaattgacatcaaaacaattgagtgtagatgactactttattattgaccaattacggaaattcataaattgaaatatatattttgttttgacattggccacattacacgaatattttttttaatgaaagtttatttttaataagttttttaaataataataataattatatatatattttttgcatttgtacccgaacattacaagttatgtaaaagtcgatgaaggcactattttaaactccctcagattttgaaaagccttgaaaactaatattttaattttaaaaacgacacgtgatttaatatagataaagtaatagccaatttagccaccaactcaaagaaaaaagttgtagccaccaactacaaaacctcacaacaacaaaaaaaaaaaaagaagaagaagaagtaataccaaaaggtcattacagtcatttgaagggtaccctcgagactatttctgtgttggctaccatgaaaaagctcacatgcctcaacagtcaacaacaccaccgtaaattgatctaccccgataccaatttgataaatgcgaaagattagcctttccttgcattaagcacaagttaaaacagtgagcgttaccacatttcatttacaagtgcaaaagaaaatttcaaaaaaatcctttccttttaccggatatatacacatcaccacatttgttaatattcaattggcgatactatattctttcattgcactaaccaaccagtctcctttatcatctctccatctcatcatcctcctccatttctctcccattttttcttctgtgtatctgcgggagagagtgaaatagagagatggaagctgtgattcaaaccagagggcttctctctttacccaccaaacccatcggagtgagaagccaacttcagccttcccatggcttaaagcagagacttttcgccgcgaagccaagaaatctacatgggttgtctctatcctttaacgggcacaagaaatttcaaacctttgagccaaccctgcatgggatttcgatttcccacaaagagagaagcaccgagttcatatgcaaggcggaggccgcggctgctggcgacggagctgtcttcggcgaaggcgattccgcagctgttgtagcctcgccgaagattttcggtgtggaggttgcaaccttgaaaaagattatccctttaggattgatgttcttttgtattcttttcaattacacaattctgagggatacaaaggatgtcttggtggtgacggcgaaaggaagttctgctgagattatacctttcttgaagacttgggtgaatcttcctatggccattgggtttatgctcctctacactaaactctccaatgttctctccaagaaggctctgttttacactgttattgtccctttcatcatctactttggggcctttggtttcgtcatgtaccctctcagcaactatattcacccggaagctctcgcagataagctccttacaaccctcggcccaagattcatgggtcctattgcaatattgcggatttggagtttctgtttgttttatgttatggctgagctttggggtagtgtggtggtctcagttctcttctggggctttgctaatcaggtgactaaactggtctatcatttgaacttgtgctggtctatggatttttgtgtatcttcatttgttgtttgacagattggtgtgtttatgatttgatgataatagtctttgattgctaccgactttgatgtgtaatgatgcactgaatatgattacaagcggtgatgtgtgtgttttaaagcattgcttctatctctttgcagatcacaactgtggatgaagccaagaaattctatcctttgttcggacttggagccaatgttgcactgattttctcaggaagaaccgtgaaatacttctctaacttgagaaagaatcttggtcctggagttgacggctgggcagtttcgttgaaagccatgatgagcattgtggtgggaatgggactcgccatttgtctcctctattggtgggtcaatagatatgttcctcttccaacccgtagcaagaacaagaaggtatggtctgcagaaatttgtgttctgtttttttcactttatgactcttcttcttctgatttattgtctctctgctactcactttacaggagaaaccgaagatgggaacgatggaaagcttgaagttcttggtatcatcaccatacattagagatcttgctactttagtggtggcatacggtattagtatcaatcttgtggaagtcacatggaaatcaaagcttaaagctcaggtaaatatatacagctcctcatgcatctgtcgatttattctcgatgtttccattttctaagttccttcttatgctctgcagttccctagcccgaatgagtactcagcatttatgggagacttctcaacctgcacgggtgttgcaacattcacaatgatgcttctcagccaatacgtattcaataagtatggttggggagtagctgcaaagatcaccccaactgttctgctattgactggtgttgcgttcttctctctaatattgtttggcggcccattcgcaccacttgttgccaagcttggtatgacaccgctacttgcagctgtgtatgtcggtgcccttcagaatatcttcagcaagagtgccaagtacagcttgttcgacccttgcaaagaaatggcctatatcccattggatgaggacaccaaggtttgctaacttttcctctcttttaaggaatctatatggcatgaaagttgtggtctttagccattgtgatgtggtgcaggttaaaggcaaagctgcgattgacgtggtctgcaacccattagggaaatcagggggagctttaatacagcagttcatgatcttatcctttggatcactagcgaattcaacgccgtatctaggaatgatcttgttggttattgtcactgcgtggttagctgcagctaagtcgctggagggacagttcaacagcttgcggtctgaagaagagcttgagaaggaaatggagagagcttcatcggtgaagatccctgtcgtgtctcaggacgaaagcggaaacggttcccttggagaatctcctagcagttcaccggagaaatctgctcccaccaacttataaaaagtttttttttgatatttggttttgttgggggggaaagaaagaaggatgatgaatcaaaaataagattttgagagcagtctctcaaacaatcgcccttttgcaccactcactctttatagtctgtagcttttttttccttacattcttttcagttcaatgtggtttcacgttctaagtttcttccttgtgtgtatcgttgaagtcaaaaagataatagatttagttcttctactctcaaactcatcagagtaagaatgagtgaagttgggtatcgttgagacaattgctttatttcttctgattaacatcaatcgaatcgaggagtctttgaaaagagttataaacaatacaaacactgagtgctgctgagtgagtctctctattgctacctgaaaaaaaggaaagcgtttgcgcgaaaaaaaaaaacagcaggtagttgtactgttgtaacaatattttcacatggtcccgggaaattcaataaattatttattttagatacaagatggttgatatttgcacgtcgttaggacattggactcgtccagtgtctgaaaagccgtcttttatccaacttccccggggattcccaatcctttttatctttcttatcaaatagaattgtcaaccaacagagagaaagagagctttgactttagatccaatcatggagacaactacaactcctctgctccccggtgatcgcagcagatgcgggtggctccgtcgccgtctccgcctcaaaaaccctctttcttctgaactctccggcgctgtcggtgatctcggcaccttcatccccatcgtccttacactaactctagtctccaatcttgatctctccaccactctcatcttcactggtttctacaacatcgccaccggtctcctctttgacatccctatgcccgtccagcccatgaaatccatcgccgctgtcgctgtctccgaatccccgcatctaactccttctcagattgccgccgctggtgcatccactgccgccacgctcctcctccttggcgccaccggagctatgtctttcctctacaacatcatccctctcccagttgtacgcggcgtccagctttctcaaggtcttcagttcgccttcaccgccatcaaatacgtcaggtttaattacgatactgccactctcaaaccctcttcttctcctcgtatttggcttggcctcgacggccttatcttggctctagctgctctgctcttcatcattttgtccaccggctctggcaacgacagagaagctgaagatggagatctcgccgagacttccagcaacgaaagccagtctcgccggaggagactgcgtcttctgtcttcgattccatctgcgctgatcgtgttcgcactcgggttagtgctctgtttcatacgtgatccatccattttcaaagaccttaaattcggtccctcgaagttccacattctgagaatcagttgggatgattggaaaatcgggtttctgagggcggcgattcctcagattccactctctgtactgaactcagtgatcgcagtttgtaaattatccaatgacttgtttgacaaggaactctctgcgactacagtctccatcagcgttggggtgatgaacttaatagggtgctggtttggcgctatgcccgtctgtcacggtgctggtgggttagctggtcagtatcggtttggggcaaggagtggattatccgttatttttctcggaatcgggaaactgattgtgggtctggtgtttggaaactcctttgtaaggattctgagtcagtttccgattggaattttaggggttctgttgctattcgcgggaatcgaactggcaatggcttccaaagacatgaactccaaagaagattccttcatcatgctggtctgcgccgctgtgtcgatgactggctcgagtgccgccttaggatttggttgtggagttgttctttacttgttactgaagctaagaacgttagactgttcttcagtaactctgttttcccggtcaagtgatgagtcgcaggtcgattccgaagccgctcctcgtgatgtctaagatggacttgccaaaatgacttgatggagaagtacttatgacgaaatggcgggcagctgcgagtgcatcttatgtcttcgattccatctgcgctcataggggttggtgccctgtttcattgagtgtattgagatgtgaaaccattaatcaatgttttcattgctcaactttgtgcttaagattataataatcaggtatgattaaggactaatattgacaaaccttttaactaaagaaaatcataaggctgacgcataaaagagccaaaactggatctctcccaagtattgtcctttctataaagaatcgaatcccgaatccactgtgaatgtacaattgactttgacaactactggtttacatgtttctataaatgcaatgctagagtgatctctatatacatcatcatcacctgaccttttggctatccagtccaatggactcacatgaagagcaatgcttacctatcctcgacttctccagcgataaactagtgcgaggcacgagtcactggatcacgaccagggacgatgtcagaagagccatggaggggcagggttggtttgtggcagagttcagtggcgtctcatctgacctcagggacaacttgctggccggcatgaaggagatgtattatctcccagaccaaatcaaaatcaagaacgagaaccacaaggcgtcccatggctacatgtctatggtagttgacgattaccggatccatgagagcttggggatcgattatgcaaccgagcttcaagcttgcaaagacttctctaaactactctggccacagggaaacgatcccttctggtaaaaacacacacataaagactttctttcatttcatctatgtcgttcttgtcacatctcagatgatttgcagtcaaaccacacatatgtatgcaatgacaatggcggagctagaccagacggtgatgaggatgttgtatgaaagctatggaatggatgagaagaagcattctgtgagtcactccgagtcaactcgatacctgttgaggatgctgagttacaggagacagcaaaacggtgaagcaaacactggtttcgtgtcacacactgataagagcttcatgagtatcctccaccagaaccacgtcggaggtctccagttgaaaaccatgaccggccaatgggtcgggtttaacccgtccccaacaagattcgtcgttctctccggcatgggtctcacggtgagctctaaaccaaatccgattagtcgaaacacctagacatagcaataaatgtgaaatctttttgttggtgatgaaggcgtggagtaacgataggataaaggcatgttaccacaaggtagtgatgagtgcagatgagattcgatactctttagggtttttctccttccacaaaggaacgatccgtacgccggaggagctcgtcgatgaccaacatcccctccgctacaatcctttcgagcacgacggcctcttacgcttctacgagtcgtacatcaattctctcaagaaatccagcgaagatcttctccagatctactgcggcgtcacaccctaatcgccgccgtaattagataaatcgacggcgagattgtgtatgttaaatttggtcatcatcatgtgtttaatctataatacaactctttttcagtttttgtaataataatacaagattcgcatttaatttaggtttttcattaagagagtatttgagaaggagatttaattggtgggattaacgaccctaattgcgtccatggccttgtcgaaaacctcatactttatttggagatactctttccatgtaattgaccggtaaagagacggttcagccggaccggttaacttagagataggtgcgatttgcacatcaccagctggaccaccccataagtacgcaatcgaaattcttgaccgagtatggttaactttggctcgatgaaccacgcttgggattttcccgttcgataagatgtgaaagagatcaccaatgttgaccacgaggacaccaggagccggctcaaccgtgacccaaccggactcttccctgaacacttgtagccctcccgtgttgctctggtgcagaatggttaggatagtggagtctgtatgagcggctagacccatggctcgttctggttcaggacaaaccgggtagtggtttagtcgtatggcgcctctgcccacttttgatccagatttctctagcttgtgagcccattcaatgtcttccacggtgacaccaagtgagcctaatatgcaatacagaagtctgcttgctaatttttccatttcgtccacgtattcttggattataccgctgcacaataccaaaaatgaaaagcaaatacaatttacagtaattaaggtttttggtaatctaatgttaagacctcgacattagccaaattatcacatttcatagagactttggtactttaatttgctgtaatatgcaataagaagtactacttcataaaatataaggatgttgctcaaactatttaattagaaactttgaaggctacactctatgtgttatcagttatcactaatcataaacatcaattactcggaacatataaacacttttttatgaacagaaaaaaacatttaaacacttttaataataactaagtcttagtgcaaaaaaaaagtgtgcaatttcctttgccacacttttgcgaaataagcaaaaaatatatatatgtgtgtgtaatagacgttaccagtacttggtgtgatcatgaggccaaagagtattgaaatggttgcggtaggagtcatcggcaatagtaaacccttcagaccacattttcttctcgaaaaagggggagattcgaggttctccgtagccactaactcctttatcggaggaagccgcttcaagcttcctctctgacggcatgtcgaatagggttttggacagagactcgatatcatcgagaagcttctgagaaatcccgtggttggctatctgaaacgctccccatgttttggaggcatctccaatgagggtggtaacgtcaggattagagaggtcgatcacaggaatggactcttccactgcgtcgaatgagacggcggaggagggacgcagaagggagtcggcggctgtgagtttccaggtgaacgactcggggagtgtttggagactgcctaagttaccaatacatatctcttctgctagtgaaggcatgacttgtgaactaatgagagaatgggatgctcatcacataaacaattactttggatatatatgcatagatactacacacatatgttatgaatgtatgtagatcacagcaaatttattacatgcatatatgatgataaagataaaatcagtttatttctgtccttttttgttgagcgatcaacccccaagagatttattagcaaatgtagtgattagtgagatatacatcattagtttttctttgtatatattatatcaagtttaagtatatttggtaaaactttcaatttttcattgaacctaaagctagcaattagattggatccacgtactatcattagcaaataatacgtggtttgattggcatatctttatgtaatgtagttgacgaaaattttttttttttatgtaatgccaatttcttattaaacctaagcaatttgtttggacccacgtaatattacaattaaacaagtgtgttcatgcatgctatcagttacgataggttttgtcatcattaattagttgtaacagagaacttttaaggacctttagggcatctccatccatgaaaaacccacaaagtttctcaaacaaaaaaattattaatattatattataatttaattatttgattaaaaaagtatttttgttaaaaaattgaaccaataataagatgagacttgtcatgatgggttgtagagaatatctcagagtttctcaagtgagaaactttcgacactctctctcttttattttcattatttttatttttttaattgtgagaaactcttatgagataccccatatggtcttagatattgattcctctagagtatgtgcttttctttattattatttttattttatttttaaatatataaatactgtactttgtaaaagctctgtaaatttagttgtaatattgcttatatatagttcatgtaaaacattagcaagttttcatagttttgtaaatttgtggaaaacaaaaactatacgaccctttttatgtaacatgacaaaatcaatattaagctactaattgtgaatttgaagaaccactcatctaaaatcaaaacagtaatagatatcatcatattactaagaaaataaatagtaaaatctgaaaatcaagaaattcagtcggaagacagttaatttctaataatggaaagagattgattaaaatgagtagctttggtagcaaggtattgtttccaagtgagagatgggtagagaggagattggagaggatcaaccagtttgggaagtggagagatcattatatcggatggtggaccccacaggtaagccattgagaaccgagatcggacgtggttaaccctggctcggtgaagcacgctcgggaagattccgttggttaaaatgtggagcaagtcaccgacgttgaccaccagcgagccagggacaggtggcgcggtaacccagcccacgtcatcccggaaaacttggagaccggcggtgttgttctggtacagaattgtcatgagggtcgagtctgtatgggctgcgaggcccatggctctgtctggttctggacattttggataatggtttagttggataactgcttgggttccttgaaagtctgaattaggcccggcccattgtatgtccttttcttcaactcccagtgaacctaatgcgaaccacatcaacttggctgccaacttttgcatatgttcttcatactcttcaataatttcactgttgaatcgataatatgaaattagtatcttaaccttcaaatctatagaaatcgtcatgtagccaaaggaaaatcttatactgtatttcacattctcctgataatatttattttcatttaatttttgcacataatattatataaatatattatataatatttatataaatatatatatatatatatattatatcatgtaatctttttggtgggtccatgagttttcattgtgctttttactaactacgacatggcaaaaaatggtttctactttacccttttcgtattattcccgaatctatatcaattgaatagtcaactgtactaacgtccacagtttttttttttttttttcatacaaagataagttacgttacgttaatatggtcttaacgttgataaaatgaaccattgaaaaagataccagtatttgaggtggtggctgggccagagtttacggaaatcgtggaggggagagccaataacggtgaaaccttcggaccacatcttcttattaaagaacgaagcaatacgagctacgccgtagccggagacgccattctctgaccgagccgccttgagcttccgctgtacgggaagccggaaaagacttccggtgaggaactcaatgtcgtcgagaagtcgcgaggggacgccgtggttggtgatctggaacgctccccacgtggtacaagcatggcccacaagagtggccacgtggatatcggagaggtcgatgagcggcagggtttcgtcggaggcggaggcggagaagaggagatcatctttaggagtccacgtgtaagaatccgggagagatttgaagtcaggtgggtttgagagtgggatgtgaatgggatgcgatctaaacacatcgctcaacgttgaactcatgctaaaaggcttatgtgtttatattttggctttatgtttttggtatgatatgatacttttggtggagaagaggagtgtatttatagatcggtgaaatactcgagactgaatagtgaagactgaagagtgaagagaagagtatatgtggagtaagttttttttttgtcgattcttattggttatcaaaaccattttctgttgtcacatttcttttcgcttttctttttttttttgtaagacaggttatgtgactattataaatttatcatttttgtgttttgtttcttggaaatagacagcttaaaacaaataattcattgtaattttataaagaaagaaaatacatattgtttcctgttgagaaataagaacatttatttaattaatttaaaatattaataaatatttcgtaaacacaatgccaaaaacagcaactagttttttgatttgcaaggcgtatacaaacatacaagaattacatacttaaacaagataaagattatatatgtttcatcataaatttcgttttatgataatcattttgtttaaaaactaatatcgttaaacatgatatctgatttaacatgtggttgagttaatcagaacaaaattaaaaactaaaatagcctttaacagaacatatggcctttgggagttcattgatgccatggcatcgctcactaacaacaaactcgtcttccccggcctcaactaaagaggaattgtttggcacgaagcgtacgtcataaatcgaggcccttccttcgacttacgatttccaatcaaaagttgcgtatgttaaaaagaaataatacagatttagcaatatataatatatatctaatgttgtcttttaacgttccacttggctctcagcctctcacttgctagtgttataaaaagaaagacgacaaatttcgaaatattgcaatgtttatttttttttattcgatcgaaaacaccaaaaattaatattaactgaagattctagttatgcatatggcaaacaaatcgacaatcatctcggtttagaattagtgatttatgcgtttgtctgtctccgacgaaaaaaagggttatcattttatcatgagagccaagccttataccgttacaagtagttgtctgtttatggcaacgaatcacaattattgatgctacgtaacttttacgacaaaaccataaagtaatataagatttatatatgtatgtatggaaaacacgtagataatacacataagtacataactcatggacatgcacattattatcatttgcagttcatctgcacgtgttcttcttcttcttcacatgatcatgatttccacatctatttccatatttattgtcacagaccacgataattatatttatatttcatcggaatatatatatatatgagacgtccctggaatcgcataaccttttacgtttttttctctttttctgttgggtcgattccatttggaacatatataactaacaacacatctaggagttgaaatgcgtttttgacatggttgataatgatccacgttgaaataacgcctatcttacatatcctttcgacttattttgaattgattattaaaactatacctgaaacaccactaaagcctatcctttggtcttattttaatatatatactaaaaatttattttgaaacaccactaacgtattgacaaaatatgtcggacctcattgattcatatcttttcaacacacatcactaagaaatgtacataactacaaattgtcttgtttatgcccaaacggattagatgttactgggaaagtatgtcctaaaatcttaagaactgggaaatcattcactgagatgcgttggttcaaaaataacacgacaattgttattttcccactaattgaaattgacaaaattatctcatcttggcattttttttttatttttttttggaagtaaaaggttggtatcgatgcttattgttatatctatacatctaataggttttccggaaattattatctgtaaaaaagatactattagtttagaaaattcaatataatacaactctagcaagtcacattttagcttttctctacatccggagtcctccttagctagctatagatgggcactacgtacattttgatactatttactagttaattgataattgtagtgataactgatcaatctgacgttttctggcagcaattcatgcatgttgttatttgatcattctcaggaaaaagaatatcgtataaattacataaaagatgtggtacacattatattcagatttctattctattggctggacaataattcaccatgaatgatttgtaatatagatgagctcgaagtaatttaaaatacatcaaaagaggtcaaaagacattttccaatgttaagagatatgaggaaacatgaagattgctggcatattttgaagatcgagggaaatgtcgtagatgtgatttagggtaatatacatacagataatgccacataacaagccaaacataacaagccaaacatcgccaacccatgcatgcacgcagcttctctatagctttctttgattttttttattttatttatcacaaatgagatatttcgatctaatatagaaatacaaattaagggttgtcgggattagaaaggaacaactgaacaagtaacgaagaaggatgaagtgtaaagatttgattggaggcatgcagagatatcatgttcttcgccgtctctacggaaatatactatatacgtcacctcgaaaacatatattgatcgatcatcgatgatcacatattcatatgatagaattgtatttattttgtttgtagacgatatgatatataatcacgtagacaaaattgaggagggagcccaacgatgcaggaacactctcgaaactggtctgatgataaacggtgctgccttgtctctttacattttcatcagttaaagggtaacatatatagtattttatatagcacgcagtgaaatttttggtcaacgataggatgatgtttcaatccctatcatttacaaaatatacaaatactttcaaaatgattgcaacgtattggagatacaaagaccaaggtgattctttgctggtttttttcttctaagacagtaaagaaattatgaacactaagtctgaagccaaaaaaccgaagaaaatcatataatccttttcttttttcgtagaggtttacaagtttggaatatagaaacataagaatatgttaaatgactggcaaataataataatgatacaataaacaacaacacacaagaaaaggcacacatcttttgacactaaattaaaaaaagtgggtttaattaagcagatccaaactcagagagccacttctcgtgtttctcgatatcagaggaagacacactcggttgcactttcctaatggcctcttcgaaatcacacattgccactggatcatttgatatatcgtctttcgacatgttctttatctcatctctcgttttccccgctatcttacgccgcatcccgttcattgatgcgtccctgcacacgttagtcagatcgtctccactgtacccttccgttctccgggccacatcttcaatgttaacatcactcgccacctgaaaagtgacaatgttcattgctaaattgattgcgttggaccagtagagagatttgcgagtgttgtaacaatgtatccacaactaacctcaactgttctcagattgatattgataagagccttacgactttcaaaatctggaagtgggatatatatacgtttttccaacctcctcctgcaccaacgtgagctccagaatcagcaatttcattatattagagcaagtctaaagacggcattaactcaaagaatatttaaacctgagagcttcatctatgtcccacgggaagttggtagctgccaataccattactattttgcgactaccatcttcatttgtcgctgtattgctcactccatctacttgaactaggagttccgatttcacccttcttgatgattcatgctctccagaacccctgcatcacacctccaccaattacaaatacttttcatttcagtatcgaaatctcagtatcgtcaggaaaatttacccccgagaattgcagagagagtcgatctcatcaataaaaattgtgcttggagcatatgccctagccagatcaaacaggcatctgaccatgcgctcactctctccacgccattttgaagctaatgtagcagaagatacattgaagaaggtggtaccacactcagttgcaacagcttttgccaacagggttttacctgtcccaggaggaccaaacatgagaactcctttccatggtcttcgaataccctgaagggaaacaaaaacaatcaaattaagtatcctctatacctggaagatcaaatataaagtctacggaaatgatgaattgaaactgttattctgtatgattgctccatgtctaataatagtaatatagaatccaaatttcacagcgtatggagcagaatcaaagtacctgaaagtattcgggcatccataaaggaaggacaactgcctcctcaagcagccttttggcttcagacaaacctgcaacatcatcccaacggacaccaggagttgagtccaacacatccctttcaagcatagcagccaggtcctcatcaggtccctcatacaatcccctttttgacttcccatcttcagcatcaccattctgatatcaacgaggaagccgaaagttttattagttgttgaaaataggtggaaactaccgactcaacataaccacaggaaacatggccatgactctaaagtttctaaatacagatttcagaattagacattcataaacgtaacagaaatcatgatctttgatacatcagtcctactataacataacaacttcgaagtttcatgacatcctgtctatcaccaaagtaaagtaatggaaatggaaatgccatagtcaatattgattgatggaaaattttcaagtttaaccttctctattgtgcaataccaaaaggcaaaaacatataacttaccatagactcagccttgttagattttgaggcagctcccttctttccggcagtggaagagcgggcacctgcagttgacttactagtagccccacctctgccaccacgggaagctggaccggtccgtgtagtagggccacgagcccaagccccatcttgaggtgattttctagtaccagtttgaccagccctggcgggtcttcgactagtaacatcacgggtaggaggcctccacacatcaggatcatccataggaccaccaccggatgaagttggatactcatccaagggctgaaaaacaaaggatgatttggtattgataggtggagaagcagcgcgacgcccagtgggagcttctttaaatgctctcctctctgcatccaattgcttcacaacttccgtctcttccattatggcctttttaacgttcatccatttggtccgggccaaaggatcgtcaagggtgtttaaatgcctaaaacagtataccatagcttcagaaccactaacgcagcacataagagtgttctatctctgtctacacagacattgcacggtgaacattgcaaaattctagatttttctaagcccatttcaatacaatccaacacgaaactattaaagtagcttagggcttgaagaaattgccaaaaggggtgacaaaaaagctagattcaagactggagagataagaggagctacttacttgttgatctgagcaatggcgccatcgaagaagatgacagatgtgtcataggatccttctagtgcatattctctcgctaatttcaagtggtcttgtagacccgctaacgaattactacttcccaccatttcctcttttactaaaaaaatagcctattccaaaacaaaatcaagggttccgaggcaagagcttcgatctcggagaacccaaattctccttctttctccctctccggctccggatttcggagatgtgactcgtcggcgaagatggaagacaaagtagaagaagatggaagccacgtcgatggtagttatgatccaacctctctttctttattcgggttcgattcaaatattttagattcgggcccatctacggcccactttcaaaccaataaagcctaaaatcatcatcgattttaactttatttatcctctgggttcagaaattaaaatttcaaataaaaggccagattatcaatttctcacaagtcataacgtcaatcataagactcgaatttaaatttttgaatttagagaaagactcataacgaataaagctgatccagtttttgcttttgcattcattgctggattattcatttgaataagtaaagagtatatacatacaccaaaggggttaaggattcaaccattggtaacaacatcccaaatacaatgactttgtaaagaagaatcagctatattgattattgaataaacaaacactcttttatttctttttaaaacaactatatagcttcaaccaaacgcaaagtaaccatcttttgacccttctttaaacaacgtctcactccaccattccatggtgaagcagctcctctattcctttcctcagcctcgccgctgcagctctcatttcaacctcctgcaaccctccaaaggaaacccggagatacccggggctaccacttgcacaccccgggatcaccaccacaccatggcggtgagccagccaccgcaccaccttgaaatcatctctgtgtccctctggcagttttgcccacaggtatatcgctccttctcctcccttaacgttctccttccccagcggctcaagcgcctctttcacaatatccctgttcttcactagactctttacccgttccgttatccacccagaaccttcctctaatgcgtatacagccagtcgctgcgagattatggcagcacagattgggatgttgtcctgaattttcacaagctctgttgcaaacccatctaatctctctgagtaagctatctgcaggtccatcaaacctttttataagacaatcccagtgtttagtttggaatagaattgaatcgagcactcacatatccaagcctccaacccatcatgccataggttttagagaaagagaagacattaacaatgtggtctccctcaacgcaacaatgttttaaaccgtcatacatgaaatacctgcgattttcaaatccccgcttattactacattcaatttggacatcataggaattaaggaaatgagaaactcactcgtatgtgttatctacaatcagccagcaccctgcatctttgcatatttgagcaatcctcttaagcagcggttcagggacataggtgccacttgggttaccaggattcacaacagttacaactttcggagtcggtttagactcagacagtgtcctctctaaccagtctggaacaaaaatgattcactggtcacaactaaagctatgttaagtcatgaaaaacgtgatacagaatcaaggaggtaccagcgtcaggatagagagtgtctgactggccaggaccaacaattatgttggtgactcctgtcatctgaaaggccatgtaggagttgaagtagtatggctcaaacatgacaaccgaatcaccagcatcacataatgtaataacaaggttcacaaacgcctacattagatgcaaaaacagaaacagagtatgagagtagaagaaaacagaaggaagagcaatcaaaagagtaaacaaagacaggttatacctgattggcacctgcagtaaccatcacttgtgaattggttagcttgttttcttcacgcagcttcagaacaagacaaggaatcaaaaataaaacaagctcagtcacggaattggattcaagagcagcaaaagtggtcactttattggatacaagaaaggttgccagagctagctagaagaatggttcagtacggtgcgattacctttttgagaagagcctgtctcaactcgggaagaccttcatcggggccataagaactaatgataggatcccagacaagctccttgaccttctctaaggccttttgaggaggctgccaatgcaccactccctgaaaagcacatgagcaaaagaatcagcctgcagacaaaacaaaactccagacaaagtatagccaaagaaggtgaccactcacgaaagcccaagtcttttgtgaactaaactagattagattataaataaaacacacatttctagagagggcaaaacctgggcgagagacatggggttcgtcaattccgccatcaaactccgaatctgcacgcaaaaccccaacaatttctcactttaaagaaaaaaagacaagagaccaatcaaatcaaatcaaatgaaaatggaagtggagaagtacgaggtttgacctgagccatgacgggcatatcagtgcccaacgttctcctcgaaagcatcccaaacgaacccatttcaaatcaattcgatcgagacctgaacctgatggagaaattttccaattaggatcgaattgtttgattatatatacacactggctagtatgcaagaaattcagaattaattctcaacctaatgcaaaagggatcgttgacaaaaacctaaaacagagatgagcgttgcttaagcacgcctgttctttgtcctcttcttcttcttcacctacccttgttttttacttcatgtttttttatttttggtgtaatcataatctaatctatttaagagaaaataaataaaaagtagtttctttactttacgccaatttgaaaagaacaaaaaaagagtaacgcctttcctttgttacttagatccaaaaattattatcaaccagctttaaaaatccattactactctacagattctgatagaaaaagagagagagagaggtcaaaactttaccagaactaagagagagacgtttctcgtgtgtgttccttgcagtgtctgattcctcttcctctgccacatgttactgatcaaccagaggatttgctttgcctttgccctgagaaaaagaatcaaacgtcacgtttcaaacgtagaattatttttcttgattgcgtttatcatttccctaataaatcacataaaaggcccttcatgtttctatatatttggtaatcgaaccctttgtttttcttcagcccttttcatcgttcaattcatttttcatccgaatggcacaaacatatattccacgagacatttttgttgttgttacaaaagaagcattgttgttacaaaagaagcaaattcatggatcacattactcaaacatgccatgcaaattatttggagtttggtggttacatgtttagatagattgggtattgtggtaaactaaaggagtggagggaaagttgggagtgttcaaaaacttgaaaaaaatagaccaaccaaacatgacatgttgattatagatctgtttttaaaatttaattttcatctttatgcgtgttggtttgaatcgtagatctagtagctttttggtctttggataaaaccgtaaaacgttattattattaggtccacgaagacctctcgttacgtccttctcacactataacagctttaacgcattagtccaatacatatacaatagaacatactgtatatatcctaaatttgaaatccatgagctttgattatgtaacttcccatgtggtaagtgagactattggttatagctcctcactgtagcttttgaattactcgtgcgttgtatataaataattatcccaaggatacttttgtttgtttgtgatgctttcttcgattatatcacttaacatcaaagtttcatatgaaagttttgacttaatcagtagactttactgccctttcacgtactaccgaacaaaatagactcaactttaactttaaaagatttgtcattttcatttcaaatctgatagtttttcgaacttcttctttttgtttttgttaaaactcgtaattgaattgcttcaaacgcgaaacaacagcaaaaataaataattaagtttgaaaacaaagataattctgaataagaaaatatatcaaacaaaaaaatattaaaaaaataaaataacttctgctatattttgataaaacggctataggtaagatgtgaaataatgtataacatacaagattaccaaggtcttaaacataacaagacctgaaatggcagattccaccacttaattatttgttcatgtcctaagtatcttttctttttctaagtggatcctgcggatctaagcatcaaaagtaattattatcatattttctttttgttttaaattaagttttttttaattctaaactgattatgtcaagtacaatgagatctaatacagttttcataactcctagtattatttaaaaagagtgttgtatataacgtttaatcgcagaaaaaactctccaagttttatttcacgtagatttggtcaaagtaaccgatgagaaaattagacataagttttgttttacacgaaataaagaaagtgttagtatcacataatgcatgttatctttttactcaatagtatacaaagaccacgggagcgtcgtaagtatgattttaaaacggagcaaatcctatagaaatagaaacgggttctttaagtttctacaaaatgtttaaaaatttgaaaggatagtgtagaatttatggatggattcttacttaacatgcatgtggagtccaaataagcattaaggaatattaaaagacacatagaaacgtaaatataaatatcagaagagtgattctggggtaaacgtgcatttggtcttttttttttttttttttttactactagttagtttttctattcaaaagttaaaaactttaccattaaaaaaataaatggtggaatctttcttcaaatcttcaaaatttgaacagagttttttgtaatttaatcatttttatttacctttggatgaatagccacgctgttactgtctttaaaaaatgcgctgttactatctatgtaaataaattatgacacatttcttggaaaacgtaactattcctcctctctatcgttcttttactttaatacaaaaagtaaatataaaaaaaacattcgaacagagagaagaaaaacaaaatctgcatcattaattacatacaacaggttaatggagaaatggaaatgacacagaacccaaactagcaatgggtgaaaataaggtaaatgattagttaccaaaatctaaagaaaaatctatgttcaatcacgtaccaaattgaaaagattaaccacaaattacttatcaaaaaaaatcccaagcaaactaaactgtagtgttagctctttctttatccccttgttttatggtcaaacagtcaatgagttgcgttataagcacataaacaaacacttctttctctaataaaaataaagtttctatttttatatacagaaaagaaaagaatataaaacttatatctttaaaccattctatatcccgctcactctcagagacagtccctttgcataaaagcgaattgactataacccatttactctctcgatctgcccaagctcccatcttttctgttcgtagagctcatttccccaaattaataaagaaaaaaaaaaagactttttttcttcttcttcttcttgaagaaatttctggagcgtagtaagtttctatcttagtctctctatctccatcttctctgttttattttgcttgtgaaatgtgatgatattatttttatgccgaccctctgttcttttttttgaggcggttctcctggagggtttcttgaaactttatcttggttttgaagcttttttggttcatgggtcactcggatttttcttggattaaagaaaatgtgactttgattacttttttttttaacgaacggatcgataggtttttttgggagatcttgcagctttaaatcatgggtcttttcgttatcctcagaagaaatttgatctagtcgttccttttcttgttcctatttcttatggataaacatttttatataaaaacccatgaaagaaatttagaaactttactaattttttcttcaaatttaattatctccaaattctgcgcaagtcgctcccgtctttgctaaaattgctaagactttttctttcgagcgttgagggttttctgcattacagttttcaagtttttgtcaacaagtaaattgtaattcacaaagacttgttctttcaacttgaatctgacttgaaactttggaacttgattcgacgaacttaaacaacaagtacgtgttgcaattatttgtctagtcatgaatgatcagataaacaatcctcgtttagaataaacaatttctccaaacatcttatatgcattggactctgcatagataaatatatatctctctgttttgtttaatcttcatgccattgatcttcgatttctcttgacttcaaattcacagatcgagagttaatgtggtgctaagtcccaaacgttagaaaagggttggatcgtgtcaaagggtttcaatcatggggaaggagaatgctgtttctggaaactctataccaatccatggtcgccctgtaactcgtgctcttgcctctgctctgcgtgcttcttctaagctgataacatcttctgaagtggctgctacaacacagaaccagggacgggttcttagagcaaagagtaaaagaacagccttggatgagaagaaagccaatgcacctaagaagcgagctgttcttaaggatatcactaatgttacctgcgagaattcttacacaagttgcttcagtgttgcggttgttaactacacaatgcagcattttagaattgctaagtttatatgacaagaagtatgtttttgctgacaattgttgcttcttctttttacttaggtggagaatatcaagcagataaagaagggacgacagagttcttcttcttccaaggtggcatcttcttcggctacttcacaagttacagatgcaaaggtagaagttgtgtcaaattcagcaggagcaagcttgtctgtttttacagatacaagcttaggcacaaacgaaacatcctatagcattatcgcaaagccaagctccagatcgcctccaagaccctttgggacaggtgaattttataaatggtcatttactgaagcttgagtgggcaatgtataacatttctgatgcatctttattcttgcaaatggtttacagttgagagaagttgtggtggagcaagtagcccgaaattcgttgacattgattcagatgacaaagatcctctactctgtagcctttatgcacctgacatctactacaacctgcgtgttgctgaggtatttatcccttggattttgatatcttacgatgatgcatttgaggcatttgaatccttacgacttgtctacttatcagcttaaacgaagaccatttcctgattttatggagaaaacacaaagagatgtgactgagacaatgcggggaattcttgttgattggcttgtagaggttagttctctacttccagtttgtttgttgcttacttatgaagtctttttgtgtagcttctcacaactcaaaatttcaggtctcagaggaatacacacttgtacctgacactctttacctcacagtgtatctcatagactggtttctccatggaaactatgtggaaagacagagacttcaattgcttggcatcacttgtatgctcattgcttcgtaagttcctcatccacctaaaatcaaataatgctctggtctgaacacaacatctaaaagagttcttgcaggaagtatgaggaaatccatgcgccacgcattgaggagttctgcttcatcacggataacacttatacaagagatcaggtcctggaaatggagagccaagtactcaagcattttagctttcaaatttacacccccacttcaaaaacattcctcaggtaatcttaccagacagtgcaaatgctttatcatgtgttgttgctttttagtctttggtgattcagagtattcattcatttttgcaggagatttcttcgagcagctcaagtttctttcccggtaatgtgcttttcttttatcagatcagatatatctattgctcataaaacatgtagcagaaagattgaaactttgttggtaatttgtctgcagaatcaaagtctggaaatggagtttctggcgaattacctaacggaattgacgttaatggactaccctttcttgaagttccttccttcgatcatcgctgcttcggctgtttttcttgccaagtggacattaaaccaatcaagccacccttgggtctgtaattgaccaactatcttcttcattaagaaacacagcgaatcttgaatctcactcttgtttactttattttatgaacagaatccaactcttgagcattacacaacgtacaaagcctccgatctcaaagcatctgtccacgccttgcaagatttacagcttaacaccaaaggatgttccttaaactctatacgcatgaagtatagacaggacaaggtattaaaaaattattaatcttagtttggttttcttaaaccgaatgaagaaatctggtctgtttcggtttaacagtttttttttttttttttggcaatttacagttcaaatccgtggcggtattcagttctggagagctaccggacaagctattcatctcctaaccgatatgacacacgaatctgtagtaacatttttctgatggtccacattcatctgtctgtcaaataaaacagtgtcttcccacggtctctcatcattaccaagtaaccggattcggtgttagttcggtttagttgtagacaggtttggttctttcaaaccggacttgttcttgtcggtaacacgagttaattgtagtggaatgtacatttttcccccggtttattcaaggcaatatctggtctgcttcgaatattttatctttttattacagttgacagagagacaaagcattaattacacattatccaacggagaaattgtgactcacatagtatgtggcaagaattgctttttcgttttacgaaaaaccaataataaaaaattatcaagttggtcttcttcttcctcgttgctgatgtgtcgctctgcttgagagagtcagagagtcaagagagaaaaggggtcgagaatggcggtcgcaatatctgggagtagtttgatatcgtcgactcttcagcattataataatcggatttatatccgagattatccgattccgtgtcactcttctaatccaatttgcaattcttttaatttcaaaagacgttcgttctctccttcttcccccaaatttaacgaccatgtcgttaacccttcctcttcttatttatcctccaagctttctccaattcgaacccattcctctttcgctggtaaacgcctccaaatataatctcttttcttttcctcgcttccttctaatttttgaggtttgcttttcttttcttttgatgattgtttggctatttcgtaaattttatgcaaaattgctttagaatttcctcatgagattgttttattactctcctcgacgttctctggttgttttgttctcttgttgttgttgttgttaagggtttgattgtttccattgtgttggtttggctctgcaacttcaggttttcagattgtgaccttctttttttaattacgtgtgtagcgtgtggctgctcctggattcaagacaattcaatggttcatgattatgctacaacaactaatgggacgtccaagcgttgctcggcgttaccaacaacaaacacagtggatgtctcttcggtgtcagatctttttgaattcatatgctcgggtcctctcgtaaacaagattggtatcactcctcaaagagttggccagtctattgacaaatggttactctacggctcacaactttgtagactgtttcagcttaatgagcttaagcttacaattcctcagaaagctaggctataccactactacatacccgtttttatttggtgcgaagatcagattgctttgcataattccaagtttaaagatggagatgatgtacctcctttagtggtactaaatattgttttttttcttcccttatgataatctcaaatcactgatgggtggatcaatctgatacatgtgttttgacgatgcagattggatttagcgctcctcaaggatgtggcaagactacacttgtgtttgcacttgattatcttttcaagacaacaaaaaagtacattgctctgctgcatcttatatctcatgtaactatagtgattcttatactaacattgcaagaatatctcaggaagtcagcgacgatatccgtagacgatttttacttgactgcagaaggccaggtaagagatatattaagattatacttgtagtaacctctgttgtctagacgttctctcgtctccgtttcttagcttccatttgtttttgcaggctgaattgagaaaaaagaatccaggaaatgcacttctagaggtaaatgctcaacatttttattttctgtatcttttctttagtttgaatctatggtcatggttacttgtttgtattcagtatcgtggaaatgcaggaagtcatgatctgaaactttctgttgaaacactagaagccctgtcgaaactgaccaaagaaggtttgtttcatcaataaagttttattcttaggttactattttcttatttaccatctaagtttttggtcattaactgcaggcttaaagatgaaggtacctaggtacaataaggtgagtcacagcttgatataatcttctctgcttcatcactttgtatcataaatgtcgaacgaaaacagaggaacctgttcttaactcctcgatatatattcttatttggctgcagtctgcctatagtgggagaggtgacagagccgattcatcaacatggcctgaagttgaaggacctctatcggttattctctttgagggatggatgcttggttttaagcctcttccagctgacgttgttaaagcagttgacccacaggttatctcaactcccgtaaaaccattgagtagcaatacacaaccgatgtaacatcttctaatgaattaagtctgatcttctttctacagctggaggttgtgaataagaaccttgaagcgtattacgacgcatgggacaagtacatcgatgcttgggtcgtcatcaaaatccaggacccaagttatgtataccggtggcgtcttcaggtttgtttatcacataacaaaactaaacagtttttaatgcgtttcttctatacaaacacggttttgtttttggtatgaacaggcggaaatcgccatgaggcaggatggccaagctgggatgtcggatgaggaggtattgatacgttttgactaatcagttgtcttttcttgtggttaaagaaacaatcactgttttttcttaatgttaaaaatatctgtgttttttttaggtgaatgactttgtgtcgcggtatttgccggcgtataaggcctatcttccaactctttacgcggaagggccaagcggctcagacccagaccgtgtccttgcgatagatatcgatgaagaaaggaacccgatactcgcaaactaatgcgatgctgtctccattgcctttatagtatatcatcattgtatgtaaaagagagtaacattacgttcttcttccttctatttgacattctttttcctacactatactttcacataaatacatattcttttcttgaatattattttattattttaattgtggtcagttgtatttgtgtgagatttaatgaaacaagaaaattttgaggatcggatcatcaacatcatcgactcaggcaattaaacacattacagaaaaaaaaaaaaggaaatctttatgtgaccgttcatgtggaaaaaaaaaacaagcttataaatagttactctctctctcgcttcttctaattgctttccttatgagagaaataaaacctctctaatgatccaagtcgtgaagaagacgaaacttttgaccaatgacaaaaaaacaagcttctcagatctctgaaacgagaacaaaatcgcgctttgatcatcggcaatcacactacactgaagatgaactgtgatgatattgataggagacgacaagtcgaacgcagtgtcgacaatgaatgaagaagacgaccaatttcagacgagtttccaacaaagacgcaagcaacaatgggcttccaatgggcttttgatgaaaggaagaagaaagaagcttctcaaattttccaagtgggctcacggtgggcttccaatgggctttctttgctaccaaatccaacaaggtattactttcttcattcttttcttttgcttcttttttttttttgctaagaattgttttcttttctttataacttattttaagtaaaaccaaaactaattagtacaaaaccttcactaaaacattactattttaacacttatttttattttatttaaaaatgtttttaaaattatatttttatattactattaaaactataaggtttattttttacaagtgttgaatttttaaattttgtgtaaatatttggacacaacatccaaacccttaagaggtgtcataggttcaatatggtttacacactatttaaatttttaacattttttttcttttatttacaaatgtttttaaacttgtatttttatattactactaaaactataagggtttgttttttataagtgttaaatttttaaattttgtatatatatttggacacaacatgcaaacccctaaaaagtgtcctagatttaaaatggtttacacactatttaaacttttaacacttgtttttttttttaacaaatgtttttaaaattctatttttacattactactaaaactataagtttatttttggataaatgttaaaattttaaattttcaaatggcacttcgtttattgataatagatgtttccgccatgtaatcaataacaataagatatatacagagtgctagagaaaaatgttacaagaaagaaatccgcttttatattacgatctctaggataatttaatgtcaatctcaagtattcaattccatttttagttcttcgtttattgatattcctgcatgtaatcaataacagtaaggtctacgagtgctagagaaaaatgttacaagacctagcattcttacaaaaaaaaaaatccgcttttatattacgatctctaggatcatttaatgcacaaattcgaatgcataaaaatgaaacgtgtaatttttttaaaaaaaacatattaaaactttgagcatcccgtcttgtcgagtgtcgatgtcgtcatgcccggatcgtggtggtcggcactgatgcttaaaagtggtttgtaattattgaattaaaaaaaaaaaaagtaaaatcatttaaacaatagtagtacattacatacaaaatccacggccaaaaaaggtttgaaattacatatatagcatattgcaattcaaaaatgcaattgtatacatctctacagtatttaatgcatttgtgatcataatcttatatagcctttcgaagatccgatgcgtttacgttgtgggaagcagaatagagacctataatccaatagcatctccggttttcattaacctcatacgtttgcaagattccacaaacatcctacacaaattaaatatcatcaatcccaagaaaatttagtttccttcacagcagaataatacagtaattctagttttgatatgaatgtaagtaacaaaatagtacagaaattctagttttgaataaaaaaggaaaagtacgtaaaagcaacacaaagggtaattccgagaactcacatccacggcacatctccgactaacatcaagtcaccgtccttatcctcgtaagtagcaacaaactctcccttcctctccaactctgtcactctacctaccaccatccaaaaccccaagtgtaagtaaatttaccataatatccttcacttcgtcagtccatccaaacacatcaaaatctttattttttcctacttatctcgatcacttacatattgttattatcccctgaaacatgttttctagagcggtgaaaagctgtccatagcaatcgtacatcccaagatcaacctttctgagataggccgcaccatccaacgccactttcacgtatttccgcctcactgttttcctcgctgtcgctaccggcggccagcccaccaactggtcactaaaaccacaataaattaagaagatcaatcaaacatgcatatgacctatatgaacgataaatgaaattaatataatatatatatgccgtacttagtgaccatgcttgagatataattgttctcgtgtgcttccccgagttttaaatcaacggtctcgaggaatctacgtttgttcccgaacttttttggaccttccgatgcatttgtcggagtgccaggcaaagctagggtcagctcagttcctccaagatcaccggaatccggccaaaccctaacgtattcctccggtgacattaatatcttaatctatttatgaaagttagttaacaacaaaagtgcggaaagtgatgagacaatgtggcactaacttttggcttgagtgtgtgagactctcgaggtttccaactttgtatttatagtcgatctatacttgtcagctaaaaaactagtgaaccctacctataatgacacgttttcctgtaactggcggtttttatatctccacgaaagcaagtgaacagtttggtgattagcttctacttcgtgtggtgtgggctcatttatagttatagccacttagcatcttctaaactgtcattagtggatgtaattgcatgtgtacggatatcttttcagttttaatttctattagcctggtatcaaaagaagaagaagaagaagaaatcactgtcaactaaaaaagaagaaagaagaagaagaaatcagccctgatctttaagctcccacgtcacgactgatgggttcgattaaggagaaaaatatataatttgattatattatccactagcattcacaaaacgagaaaaatatatattctaaataccattatttactttctaaatagagttgaaaatatcattttaatcgcattcatgttacctttgcttataatcgttggaaaatataataaactttattcccatatatatttgtttgtgtttgtcaacttcagtccaataatttaacattagaccaaaaaaaaaaaacttcagtccaatatattcttcgggagagatcttcaatagtgttccttttgtctacactttgttgtcgctttactcctttaaattatcattccaactaactttttcttggtaaaaaagtttcaccattatatatgtacatcaactttcactgtcgtcggtcgaaaacaaatcatggtctaacaatatattcctaattatctatcatcgtacactacacactaattaggtacaatacttcttcattagtttaatctttcaccgaatatcagaagaaatcccaactaatatgcgtgtggatcttgtaaacaatgaaaagaatgttcccaccaaaaaaacaatgtgaacagaactaaatgttgaaacttctacttcaaaattgaaataaaatctaaaataaaatatataatgaacatcaatcattgtataaaagcgattaaaagtttcatgatttgggataaaaaaagttagagatagataactatcccttttttagtgaacaagtataaagtttttactgaaaagtttttcagtgtccggtattaatttcatattagtcatattatttacatgcaatatgaaatgagatgtcaaaaaagtttagacaaaggaaaagagcagaacattaattacagcagcgtagggtcacatgcgtaagtcacgtgactctgtttttcgttggggaacatagaatcataaatgattttttcgatggttcacgacactattcttagaccaataagggcaataagagttaaaccaggggctaataggtcctactggcgacacatagacgaatttaccggtttcgattacaaacccgtgaccggtaattccggtcagccattgttttctaagtttgttttctttcgttataatgcgcatggaatgaaacagtcgtataattcatttaactcgactcgtaacaaaatatgtgagataataataagaagtacataaatttggtagctagtatttaatgttaattgatactttttgtctcaaataatcgaaactgcttttaggctctagaaaactgatattgatgtcttggacatttacttgggtataataaattgcgataacataatagagcggtccgagacttagagaattacgaaaccagtaaattctatacagattgtttatccaattaagcccaaaccaatccaggtttcctacagtgggtcaagaatacatcatggcagatttgatacatcataatgccattatggtatcaagcccaaaataagcccagttattttttctttcttttgttgtcattccataaaaatctacataacggaatccagaatttgattaagatcttattccgttatgttccagataattagagtgtcatatctctataatgaacttcatattaaatttctttgtcttaacatgcattagaaaaaagggtttaaaactctattaagaactaaatatatcaataacatttacagtataattttaaaatttagaatgacaaaagaaacattatagaattttaagaaatgatttgggaatagacaaatcaataaacctcagactattatgagatttgtttttgtctggaaggaaattgcttaatcaggtaataaactcaacaaagcaccttctaaacaaggagtcatccacgaccgtccgatcagattagtacatagaaacccttaagatccaacggttaaagatttaagacagaaggacgaaatctgtaatcatgagtttagtaaaaaactaataaatcaatcagtcttctccctatttactgcaactctgcgaaagctgcaaaaataaaatcagccgattcctatttttttatttgtcttcctgtgaagaatgaaaaagaagaagagtacaacaagtactaagaagacgaagaaggtttcaacaatagcttattcgcagcttttccaattctggtaaaaaggcttcattaccattttatcgtctactcttcttcttcttcctgttttcgatcttctgtctttttcggtaatttccgaatttgtgtttcaagaccgtatcatcttatgctacgattgaatttgttggaattccagttttgggttcttcaccaagctcagaatttcaaactgtcagaattgtttgaaagagtcaaacttgaactgggattttttttgacttagggttcgtcagatgttggatttgttaatccttgcagagtcgtttaaggggtttacaaaatgctttatttataatcctaaaagctatctactttctgatttttttcccccagttcttggtttgaattctaaagctgtttcctgtgctataacaggtgagtgtttcgcactacattgctcttgctctactggagattgcggttgtgtgttacgagagctagagttgaatttgctttggtcaacacaatggggacttgtggttgctgacttttgtgattttcagttttctacttggatttagatggatgtttcttccattgtgcgaaatacaaccctaactgatcaagatcctttgttaatggaccacggtaaccgcgagcacatcgttgacattacaagcaatgacgaggaggactcttcatcaagatcttctctcgatgagcttactcctcaaggtaactcacatcaaggtgaagagacagtattatcatcatcaaatgctacacaacaacacccaactcatccatctcctcctcagcaaagaccaacttcttctaggagaggagataacgggaatggtcgccgtactaggagtccattgaattctggcctctggatctcagttgagttagttgtcactgtcgctcagattgttgcagccattgtagttatggttctggctaaagatgaacatcctgaagcgccattatttacttgggttattggatatacttgtggctgtctagccactctccctattctctattggcgttttcgcacttataatcgagctacagggcaagactcttcacaacgtgctacctcttctcaaggcaatagtgagtccacaccatatacagcagtctcagttgctcaagcagcagatgaagaaaatagcactggcgtgagtgcagcacctagaaacaatcaagttggggaaagcttaagaacaaggtaagtctaattactttgtttggcctcaattaatttgggttggttagttaacaattgttaatgactggcaggctcaacgggctagtggaccacttcaagatggcgattgattgtttctttgcggtgtggtttgttgtggggaatgtatggatatttggaggtcactcatctccttctgattctcctaaactgtacaggtacacgccttcgacttcatccgctattatgtcccaatgaggaactgaaattctaacactcatgtttttcttgcaggttatgcatagcgttccttactttcagttgcattggatatgcaatgccattcatactatgtgcaaccatatgttgttgtttgccttgcttaatctcggttctcggatttcgagagaacttctcacaaactagaggagccactgccgaggccatcaacgcattgcctgtctacaggttcaaatcaaaaagtagaaatgatttggagttttcagaagaaggtgaaggtggatttcttctcttggggtctcagaagaaacgtcttatatcaggcgaggatgccgtaagtcaatacccttagttccgccatgaattcatttgaattagttggttaatacaattgtgtacagaagttcagtgcaactgttaactattgtctgcatttcttggataaatattggttttgcagagctgttgcatctgcttgactagatatggagacgacgaacaagttagagagctgccatgctcacatgtcttccatgtagactgtgtagacaaatggcttaaaatcaatgcgacttgccctctctgcaaaaatgaggttggagaaagcagcagtgcttcctcatagacaaaagctgagttgatcgcaactgtttggaatttgggatccatagtctgtgacgtgtatagacttaagacttgtatagttgagatgttgtttattcattttgtctttccaaatcaataaatttcgaaataaagttgttatgtatatgagagaactatataagaaaaagatgtaacgtctcactcaaaggtaggctcgtcaaatcaaaattttccagagatgtcaagaagcttaaacattgtaatggagaaaataaataatgtggagaaaccgaaaaaagaaggagataaaagggtacaacatcagagaaatcctctttaaagtgtggagagaacaaaacgaaaaaaaacaagaaaaaaaaaaagacaagacccctctctttttttgtggcattgttcttcaaacttgaaacccagccttatatagaaaaacaattatacacatttggcatgttacaactccaaaacattttctgatccacacacctcggggaaagattcattaaatctcaagtttgatccgggtctgtaggaacagatcttccatcttctgtaaattatctcctgggttgatttgcttcttattgatagctaagagggttttcaggttgcaactgagaggctcttgaatgcttcgagttgtccgtcgctcaattcagtctgacccattggatggtttggcgtgtcaccgttctcattgctcttgcgggatgagttgtacactgaatcaggcatcaaagagcaatgcttgccttcaaagtgagttgaacagggaaaatactcggcgcagcgtgatttccatcctgcgattgtaccaataagacagcttaatcattttccagaaacttactaactgagaccaaccgaacacaataaatggaaaggcacacgcagagaagtcatattggtgaagagaactactacttaatggaaacagcacagtgaagatatttaatgcttactggaggcagcttgtgagtcgagaagaactgtgtctaggagcgtatgaacagctatacagtcttttagtttccattctcttgcttgtcctagagcttcatttctacatttagacaaccaaacgttaaacataccaaaaaacagagaacagagggagcaaggaaccatcaggtatgtgtttgagggagcattacgtttgcactactttattggttgagtcttcaattattttgattgcctcggttttcttgcttggatctaaaatatacagcatttctgcatatgcagctctgtgcaccaaagaatctgcggagttgcatgcaaacgttaccatttttcattagacactgtaatgtctctgtgagggtacatgtaataaatttgatacgcaccttcgtgtctaccaagaaactctttgtttgcttccattagtgatttattctgcaattgactagaatgcgaatggacaatttatatcacaactgatattcaaaagtaacagtaagattggataaaagtttgagtagccacctgattgatgggcgctcagcctctaggaccctccaacgaagtttctcagcttcagtcgttggagcacttatcgattctgtcatgagaaagaatttaacctgccaccaagttcaaacgtataagccagaaaatagaaaacacgtctagccacataatacttgaagggaaaaattattatcccttctctgctttacgtgattaaactcttccttaaaacatcacaagttacacagatttcataccaaggaacgatgtgaatcagggttctctgcacccaatttaagcaattgcttgacagcctgaagagaatgaaaaatgattggtaaagcccttagaatacttgacgaagcatattatagaaacatgatagagccagtctaagcttgaataggatctaaatcagttacctggaatgcaagcagaaacttctgttttctcatattgacctcaaaggaaagtaaatgagtctccaaagaattaggtgaatgtttctggagtagtctcaagtactttgaagcctctgccattggctcctcaacctgtacagatttggttctctagttagcctctattaaaactcataatacagttgtggtgacgaccacaatacatcttacaaatgaagtaaaccacaacctgaattaacttttgcccatgaggatctgggtctacaggtttcacatttcgtttgccagacttagaggcaccactggcagttgattcttcactcttactctcagcttcctgaaacaaaaagagcactcttaagccatcttagtgtcaattctctagtcaaatcaatgaacacacgcctactttcttagctcgggcttctgcctttttctgcttcttgattttcttcttctgagcaggagccaactttgacatttcatcttctccagcagttgacttgggagagtcatgcaatttcaggtagcacctgaacattcaggccgagaggcaaatgagctatagttaaatggaacctctcaagcatcgatacagtagatactgtagctatacagtataaacattttctagattacatttatgcaacaagagttcacctgatagctctgattgctgctttgtggaaatatgggaatgagtgcaatcggtcttggaacttaagcatatcaacatatgaacgcaaagtcattttccttaaacaatacgagtggaaatcaaattgatcttcagaaatgtcagcatagtgcttctccacagccaaaaacttcttcaaagcacgtccaagatcaccctgacggaaatagctatctccagatgcaagatcatacctttaacgaaataagatcaaaagacagccattagaaagatagctgaatggtcaattttccattagcaaaactactcagggttctatagagccataccacatgcactgcatgtcatgaagattgttgagctgatccccctctttggtaaataaaacagcagttttctcagccaagggcaccttcaccagaaaaaattacagaatggagaactggcgttgaggcttaacatcaaaagaaatcgacgaaaacaatataatacgaacaaaaccgagatgcaaacctgatctgcttgtaacatacgcttaacgcattcactgtttatataacgatctgctaggtccatgcctctagcttcatcggcaagtgcagcagcggcagtcaagtctcctgcatgcttcattattcggctctgtgttgagagaaacaagtacaagggttaagaagaaacaagaacatcctcacacaaacaagataacctgatccagggtgtgcacacaatatagaaattctgttaacacaatcgctataactaaaaaagttcaaacccagccatcctgtcaaaaaagttttcaaaatgtgtctccacacatagtgcaagcagcaatagtgacaccaaaaaaactgatggatcaaaagcttatacgaagatttttggccatgataaacaaggataccttgacggagtacagatcaatcactgttggcgtatgagcaatggcctcatcaattttacagagcgcaacatcatattgaccacgcctgtcataatgctgcattatgaaaaatatgtatcaaaataaaaatacacaaaacgtaaaactgttaaaaaatagagagaattaagacagcaatagcaaaagtgaacctgagccaagaaaaacaatgtccacaatagtgtagaagggggctcttttacatcactgcatcaattaagaattaaacaaaagaatcgactgattatcattaacgtagagaacatttcaatgttgttttgtaaaaagtaagaccttatataatagatgacaataattcagtgactacttcagtaatggattcagttgtataccttcctgggaaacttcctgtagtcccaatcgaatgtttcatctcaacaactagttgctccaatatatcaggctgggtaacaaaataagtattaaaacatattaaaaagtaaggtgttgcccagatcagtgaaattggagacagcaagctcaaggacaaagcagggaactaaccttgcgagggtgatcatacagagaagagagatcagaaaataatgaaggaacaccctgagacaagtatcaagaaatgtaagaacatattcaattagaccactgtctaaacaaagagattcaagggaatgaaaagatacctttgtcaaaagaggtttaatgtactttgctacagcctccttaaagttctcatcttgcagaaaatccaatggtatcctctgaaatggggaaatagaaaataacttaataccagttttagaattttacgtatcagcagccaaaaaaaacatcagacgggtaaaacatgggtagccactactagctccctatgaagtagaaggatactagaaaatgtattacacttcaggcactgatatgccttatctcaccttaacagcggatgaccgagtgtactgctcacttagagactggtacaaagcatttaacttttcaatctggtcggacgaatattgaccactttctgaatacaatccaaggcatttttggaggccctcatgatatctgaaaaagcaaggaatgcactttttatttgtttacaaaaaattgacagtaccaaaaatatatagaagcctttgagagtagcaaaggtatagaccgccaatgccaaagataatgaagcagggcaaacagatgtgacaattgagaaaaacgaaaaaatacacagataatttctttagagctactttgaagtgcaaggaaaaaacctgtaattgtcagggttcatggaaagtaaaaccctgtagagtttattggcttcttctagacgaccaacctttgacaagagagatacctcttgttctttgtaagacaacttatcaacctacaaacaagcaaacgaggaatgttaaatctactattatgtgtgcatcctattatccaaatacattcaaccatcagttttgtgaacttactattttcggctcttttttgtgcaactcctcaagagctttgtcaaaagaaccactctcctcaagcaaggaaacctgaaacgaaaaaaaaatccagatgagatttcctgcagctacagctatgaaaaatgtgctaatgccaactgtaggttgctcaaacagggaagtttcagggggaaagagtgaacagaacaccaccactccaggtggcttggagagactttccagggttcatatccaattatacttgagagagttatgcttttgtcacaaaagaatacaggtgtgattcacaaaatgtatgatacaagcagtaagccatattttgtatcaaccaacttgtacttttggtattttcgtcaataggagaaaaatgtgtgaaacccgtttaggcaagcatgatttttcagggaaaaaaacttagaaagacaacagtcaatatatgatagttgtaaagtttctggttgataccttgtatagaatcatttctgtgtgttcaattagctcgttctcaggaggatagtcatcctctaaggtgccttcatacgcttccaaaatttcaacagctttagaagcactggtttcaggagaaaatagaacaagttaagagatcaaggttgatatacatggctagcttttactagtaaagaaaagatgttcacagaaaattctactgtatgttcattggtatattatttcctaaaaatctgatgcaagattcgtaccaacataggcatccactatctactccttaaagtgttcaagactataattccaaatcatatgccattaaccagctagccaatagtccaaagaggaaaaactagcattccattcaaatgagtaaagtggtttaacatatttagatttatggggtcaaggacaataacatactttgcgtttaaatgctgagagactgcaaagccaatccagttcattcggtgattaggcttcaatgtcaaaagctgctgcctggtctccacaaaaccggataagtcccgcatttgtgcctaggaaaaagaaagtaaccaatatgattaactattgaaagcatcaaaagagattaaaattggaacaagctttacacaaagtaaagtgataaaaagtatgaaaaatcagctttgagaataactggcacacctaataaattcacctcaatctagtttttctcataattacctgcagaagtgagaggtctctgagtatttcaaggttatcaggatctattctaagagcatttcggtagcatttgattgcttctctatactctctgtctgaccggtacaaaagaccaagcacatgccagcaaacatggcttttgatatcattctgcatgaaaaaatttgaagtatataaatcctatgttaccctgaaaacaaaataccattttggaaactaaggaataaagttgtgattattgaagagcatattcaaaccttcactccaagtcgaacaagctcatatgcttcagttttgcggtccatacagtttagagtcagtcctttcatcgataaagtctctgaaaatcacaaacaataagagcgacaagttttaaaagaaagaaaagaataacgaaaagggttgacaaatcaaaaaaagcaagaactgcgtttaacacgaaacagaactggtctctactaacaaaactaaacaataccaagcattacccttgtactaaaaagttaatttatttgctctaataggaagaaagaaaataaaaattctaacagtgattgattcttaagactatagacaagacaacgaagcgcctagtagacctacaagtcatgagatctcggttgatgtatgtagtatagagttgtaagtatttagatagcagtaaaaagattagcactaaatcacaaaggaatagaaggagatattagataaaagacaaactgacctccatgatcaggaaacttttttaatatggcatcagctgccttgagtcccttcttgtactgcttagtctcatatgatttctgcattataagattactcagaataactatatatgatgtacttacttgcgaaaattacataaagaaaaaggtcaactattcaaagcaggttgaacaatataatggttaaacccaaaatctatgctgaaaccatatatatattgataaagcttggttttcaagttcttcaaagtaaactacgaatccctgagcgactaaaaaagcccagaagcaatcgaggtctaataatagccgatagtcaaaagtaactgaagctaagaacttggtacatcaaattaacacattaaggaaccacaactccgcacagtttacttcatatgtcaacgaatttttctattgacccaacacattgacgattaacttaatttagggtttaatagagcagataaaactcatcgtattccaatttctgctgaccaggaacatcacatcgcatgtttaagacaaagtaaaaactgagaaagaaagagagggaatcggaacatacgacgatgagcttgaagaggttggcctccttaggaggaagcgaagcccccattttattgcgctactgagagagctcgcgaagacgaagacggagaagaagaagaagaagatgttcttcgcgagttcgatagggtgagagagagatagaggtggcgtactatccgcttcaaccctactgcgaaacaaagaaaggcacaactctcacaagacaaaacccaataagggtataaataaattagggtcttgtcttcaatcaatcttcttcgatcctaaccatatcggtacatgtttccggtttcaattcgtttgtctgatattacaaaacggttattaaattggatagaaccaaaccggttcaaaactggagacatctgaacctaattgaccaaatcaaatttgtattaaccgatcaaattcatcgtcaatcgacactaaaaagtatcaaatcaaaccgacttattaattgcaaccgattacatctctcaatcgaatccaaaccagcataaataaattctaattagaaacattctttccgaaccaagcagaccggattatttcaaatttttatcagtaataacatcctactcaaaccgaacaaaccgagtataacaagaattcttggaattccttaagagatcatatgcaaaatgaaacaagtttgatctaaagacactctaaagaaacgttcctataagcaagttcgatctcttcttcagtcatctcaacggtcatatcactgtcatagccacaagcaacccgagaggtcgattcatcttcgcccggttttgctagctcagcttcgtagatctttttccacgactttgcttgtttgcaaacttcttcctttgatgctgttgaattttcctttttagaagacgattccatctttccaagctccttcactacacgagggacaaagctccatagctctgtaactgatccaatgtcctaaaattaagaacattcgagaataaattcaaccaatgatcttctcaaagaaactgatcaaagtttaacaaatccaaaaatgtacacaggcggcaactattattgttcagacttcagagatattaacctgcttctgttcaagagaatctatggcgtcttgtaagcaggttaagactccttccgcagctattcgcttgatttcgcctggttctggctgttacaatggctttagaataacggaaacatacaatcaagaaaacatgtcttttgaaagagcatattaattcccttactttttcctcctgactctcaagccatgagatggtttgacttaggtcatccctggcccatttcttcacctctgtaacaaaaaatggctctttcacaagattgcaagctgatctattctgtgaacatatggaaataaacagtcatagaccattgattggagcaaaatacggttcgttttggttaaccaaatcatcagatttaaacatgccttggatgaggtagatggtgttccccttgtttctgtttttttctctacttgcttctctggttttttagacaggtgttctctcttttctgaatacaatcaattaaggttcacagagtcaactaaacatcggagtgaagcagtgcaataagaaaagcttttctcttgtcataaacgtaaaaacaaggtgatttgatgaacctcaggatggttaaaacggagattctatctaaagcctttccaatataattctttttacctcgattagcatcttggggactactgcttttcctccatggttttccagcatgcataaggtattgctcgatatctaccaacttcttctgcgcataacactcagttatccactcctggagacagtgaaatcatataaaatatcagcaaaaaggagaaattcaaatccgcacacaatcccttataagaagagtcaaagaggtaacctttgagataattgttccaccatttgtttcaacttgacggaactttggagtgttaggaaaagcacaaatcaacaaggtagagccagcgttccagtcaggttgataggtggctcccattgtcaaggcttgtgacctcagtgtactcctctcaggattaacaaagcccgaaagtacaaaaacaacgccttcctgcatagtttaaccttcaactcaatcacaaaagcatataaactaacatgacagcttaagataattgagtctcaacaagaccatgaagacacacacaaaccataagtttagagaattcagtggtatttgaacttggctcggcgtgttctgacttgttggaaggggcatttctactgttgtgctcttcggttggtccttcatccttaggcttcttacaatgagacttactcggagtaatctcgggatccctagaactcatccaagaaggaagatttcgcttctgagacatcttgtcctttacagtggagagaatactaacacagctttcgtcctacaaagaaacactattatgaacctaagccactagttacttgaaactccaggaaaatattgctattgcatcgcatctagcacaacacaaagccagagagaaaacggtgcaaatctgcaaaaaatgtaaaacattccctaagaaagacaaatcttaatacaaacgaatggtataaccttttttcaatttcaacataaaaaaatcaatggacaatggttttaacataactcagtagcactgaatttgaattcgagttcagatcaaatcacactggaaaattggaattgaataccaaaaaaaaaaaaaaaaaaaaaaagaagaaagacattgcaattaacagaacatcgcgaacttcgccataaaaccctcgaaaactaaatctacccatgtaaatgagccaacacagaggagaagactataaacttgagaagaaagcgaggaacctttaagtgctagcgctccccccgtggcttctctttgatcgaaatcatcagagactattcaatttgtcaacatacagtacaaaatcagatcaaaatgacgggttttcaatttaacaaatgattcaactagcaaaggtggacgtgccggagtggttatcgggcatgactagaaatcatgtgggctttgcccgcgcaggttcgaatcctgccgttcacgcttttttttaccaattttttgctttgactctttcattcgcgtttttactcttctgcccttttttctttttttttggacatcaacttgtctgcccttttaggatttctaatgtttcatttttacggtggagggggtttatgaattaaaagaagtacaaaaccaaggtcaaattaccattactaaatcattcctcgtttcaatctttttttcctaagttagctcagtcaaatccttcgtatacctacaatgagctcgatgaattagacttaatgcactggagaagctaaagcttgcaaggggaggaaacatcctatttcttctgaaatatatcgtatgcttgtccatatcattgatgtcatgatgtgtcatgtctcatattctcgtaacatccgcaacacaaacccatcatatatgcttttatcttatctttctctcgttgtgttgttgtttttgctacaacacaattccaggactaagtttctgaatatcaatgagtctaaacatgtcaaaattaaactacgtcttcactttgtctttaacgtacctttctttgatgaaaaaatgaaaaaaaagttataaaaaaaataacgtacccttctttaaccgcaaactgtttttggacttttgaacccatttccgaaatttcagggcttcttttcttcaaagttacgtagtacgtactaataataagccatcgtcacgactcacgtggttactaaataagatatgcttataaaaggattcaatatattcaatggctttggcacgttctgtcctcgcttgacttaagccatgttaatttgaccgttgtgttgtcgttggtctgttcgacgctatcaatataaaaaaatgtgttttattagctaaattcagttgatttatcatactctgtgctttccctctcgctcactttatatatatcgaagagtattgaatcatcttgattttcttatttcattaccattcaacattaaatcatgttgtcaaaatttatttccaaaaaatgacatgaaacctcgagcaaacccttaaaaaaaaaaaggtagataagttgatgttagtatatgatgatgaggatgaatgaaaatagatattccgcgcacttataaaaaaagaaatacaattactggcagtagaagatacgaagtccacatcagctaccggataactatcataatggatatggaaaaggacgtaaaaataaataccaaaggaaacttcatgagcttatcctgtctgtatgtacgagagctgttttatttgatgtcgaccgcatgaatatccaaatgatctattgcatgtcttcgtaacaatttgatccctaccattaattaatatgcaaaataataatgcatatatgatgaagacgtcgagtgcctaatagaaagatgcggcgagtcaaactatcttttgagacatatatactgtttagctatatatcttttcaaatgaacattttcctatgtaattggccagcgttttctgcggtgccaaagctcatattctctcgatcatctaactgtaaaccttattacttagctctggcagatgttattatctttgccggtttgcttcgaggctttgtgcttctaatttaatcaagtgtcgacataattggaaaaaaaaacgagtaaaatgcaaataaataacgatcacatatataaagaagtaattaaactcttttggctagttatttcgtgtgttcttcgtttttttccaatttgcttggcgaattttcttgtgaagaaaatacttgttaagagatttgaataattgaacgcgaccaaagaagagtatgagaattgaaaatatcgacacgaacattgatgaagtgggtccaacactcccagtaccagtctattcgggctattcctatctacgaagaatcggattgcttccgtcgtttattgtttagatttatcaaagagccagccacccgacgaatcacgacgactcttcttcccccctttaaggatgttgacaccgtgtcgttttgtcaccttatagagttatagtcattcagacgccgtgccgttttatcagttagagttattttcttcatgttgaacctttttttgtcagcccgttttatcccacgttgaagtttcaattagcttattttaaaaaatattagatcggagtatcttttgtctaattaaccaaaactccaagttactacatttatatgcaaatacatgaatgggtcatagtaatcacaaaactattgttttaataaaccaaatatatgcgttaaagatgtttacagctttatacatatggcggacactagaactagtccaacctgcatggaacatgctactaattccctaaatattgtattattccgtattcaattttgtacagctacgaaaaatagagtattgtacataaatgtccatacgttacagattaaattagtaagcaaaaatgctttgattaacgagtatacgcttttgagtacggagacaacatttcgtttctttatgtcacacgcgttaagaagtttaataaagatcatatataattacgacaaatatctgtatatattgtagctatatttataaaaacatataactttggtcatcggtaatagtttaaagatgtcgagtatcaatacagatttaaatatggccgaccaaagatagacacacacatacagacaacaacaagccaaataagaatcaaataaatttttgtcaaaaaaaagggaaattctacaagtgaaattagagaaattatctagaaggattttagaggaaagactccaaggcattagtctttgagctggatttggatttcattttaataaaacataaattaatctttaaacgctattatgtgcttggattatgtaccacataatgcgaaggaaacatctttgtagttttgcgttcttcatataataatattttgccgtcgtgtatgtgtagtatacatatattcatcactttagtatacaagttgccacaaagttctgttgtttataataaaaccaaaaaaaaagaacaagttctgttgtttataataaaaccaaaaaaaaaaaaaacaagttctgttgtttggaattaggagatcgatttaaatttttacaaagcaaaagggtgtgtgtggtccgattaatattttagtatatgagaaaaagaaagggtgtgatctaaattatagattcagaaggtccattcaaaaagtacagtcttttatgtgtaggttttaagttttttcattattcttaaacgaacaaatgatagattaattttattctgttttttgttgtgcgcactagtaagtgtatactctatagcattagatagaaaacagagtaacatgtcaaaacaacatccaaaatctaaaatcagtattagtcgaaaggcctaattcgatattcggtagtatattttaccgtctatgtttagatatataatctgttgttgactggaattcgaatgctaaattactaaacctgaccagaaaaatatcaggagaaaatgaacttggatatgacatccatcaacttgtcccaattggtccaaagtctccatctttaaatacaagacacaaccattaaccgtttttgcccatactaactcaaattccgttatcttcattttatttgatttaaactataaaatatacaacacaaaaattatattaaaaaaagaaagaaacgatgaatgaatcaacaagttttctagaaacacttatcttcaaatatctataaagcggcacactctcctctttcccatcatcatcatcatcttcttcaaccttgtctcgatccaaaatttcatcttttaccaaaactattacaatatccctcactctacttgtaaagcttcaatcttcttcacttctcaacaaacagataaacaaaaagcttcaatctttgatactttctcgatggaacttatccccaatcttcccgacgacgttgctcgcgagtgtctccttcgctcctcctaccaacagttccctgtcatcgcctccgtttgcagagcctggaaccgtgaagtctctctctctcagtttttacatcagcgaaaagcttcacgccatagccaagagcttcttattctgtctcaggctcgtgtcgaccccgctggatccggaaagatcatcgctacgcctgaataccggatctctgttctcgaatccgggtcgggtctttggacggagcttcctccgattcctggtcaaaccaaaggacttcctctgttctgcagattggtttccgttggatccgatcttattgtcttgggtgggcttgacccgattacgtggcaggcccatgattcggtattcgtcttcagttttctcacttccaaatggcgcgtgggggcaaccatgccaggtgtacggaggtccttcttcggatgcgcttcggattcggatcggacggtgctggttgcgggtggacacaacgaagagaaatgtgcgcttacgtcagctatggtgtatgacgtgtcagaagacaagtggacgtttttgccggatatggcgcgggaacgagacgagtgcaaagcggtattccatgctggcagattccacgtcatcggtggatatgccactgaggaacaggggcagtttagtaaaacagccgaatcgttcgatgtgtctacgtgggagtggggtccacttacggaggacttcctcgacgacaccggcgataccgttagccctccgacctgcgtcgccggtggggatttgtacgcgtgctggggtggcgatgtgatgatgtttctaaatgacaagtggcaaaaggtgggccagatccctgctgatgtgtacaatgttacttacgtagcggtgaggcccgggatgctgattgtgatcggcaacgggaaggcgttggctggatacggtgaagccaccgtagggtatatatgtgatttaagtagctcacgatgggtaaaattggaaacacacggtggtcatgttcaagctggctgcttcttggaggtctaatggaaaacctattcatctttggagtttgaacctaaaccgcaacaaaccaatgggtagtctcgtgtgtcaatctacaaatcttttcatgaacaacaaaataaagaaatattgtatttattcagtgtcactttaccaaatatttatgttctctatacaaaacttcaaaaggaagatttgaacttttaggttctctatacaaaactgatctaattatataattgcaagcaaacaaactttcgaaacatgtgtcgacacaaaacttttaaagtttattaaaggagccttgattttggtatccaagaactttaatgggtttcatagactagtcctattaatttttttactcgaggcccaaatagaccagattttgaatgatgaacttttgatctttaaatgggcttttggatgggacttgagacaaatggatggctaggattagagcagaggtttgaaatatggattacacctgaggggcagagttcgaagatagactgacaacagactttaaagagagatgcagagacaccctctgttacaagtaacatctatttaatatcgatacaaaagaaaagtgcattatattttcagcaggagaattaaatcgtagccgttgaatctgcagaggaaataggcgccgcttcgttctgcgtcacagctttgtcattaaatccaacggctggcagctttatgacacacacaaacaattgaattggagcagtgttaaactgtacagagaatttagcttctttagtttctttcttaaccaaaaagtcaacacatttttgtatctattataagtcggcctatttagcctatcttttcattcatctccatacacacatcatcaactttattgtaaggaaaaatttaagatacgaagacgattacgctagcttgatcgttgtagacttgtcaaaaagtactactttccaaaagaaaattgagcattgtggttatattatcttttttcaagaaatttagaaactagatagcttgtgttttggatcccacgtattaatggttagataaaagatctaaaaagacattgatttatatgctcgtgaaatgatgtcttccttgactaatgtaagtaattgccgcgtatagaataagatttttttgtattccaaaaggaagtggagtacacgcgccgaaatagttgacccttgaagaaaaagtttaatgaaggatgaaaaaagtctaggttaaatggaaaacggatattaactagccctaacaaaaatagtaaaaagcaacagcaaatatcacgtgtccccaacttacgattaaatagcctaaaactcaaattatacgttctaaattaagactaagagtctcgatgattatcttcatgaatccggtgattagtgccgttaggagaacgaagaggaaacaggggcaaaagctccggtgccggctcggagccgcttctcggactcggaaggaagtagaaccctttttccgctatggctttttgctcttccttgtccggttgcgcgtggtgttcctcacgcgctgaatgtggactcacgcgcgcccagaatgggtctaggtgagagacgggagagacgaggaatcctcggtggaaatggctgaaagcgtcgttagggtttgtgatgttgttgaccttaagctccattttctttgatgattgacgccgttcgtggagtttgaacgctggctttttgggagttaatggaagcttctggtgtgcggctgagacggcggagaaggatgaggaggagatatcgggtggtgctccagtgagcttttggacgatgttacggaaattagaggggtctgcttgaacgaacatggtgtttggctcggtggcatagctcggcggctgctggtgactcatggtggttgagatgactaaagagaagaagagaagagagaagagaagcttgtttttgtttttgtctaaaagacattcgtctgcctactgcacatatatttaaagaagaccctattgtgtgtttgtgtgtttttattgacattttttgccaacatattaaatttagtaattaaccaaagtggctattattgtttgactttgcacgtctagaatctttagttgataagttgactaaaaaataaattatatgtttagttgctaataattcactaatatttgtgatttgaatacggattaaaactgtttctagatgattataatgtcaaagtcaacgcccaagctaaccatacattattagaagtgttgccaattcaatacctgggaacatcatatatagataattcgtgataatgaaacatttagtcggttcattgttgactccgcaagcaacttaattgatattttcaaagcattccactagtctataatatcccactatatatttttctgtacacaaacgttatatactttagacgtggttgacgaattgatatgtgatacaaaagaaaacctaatgttataacctttgtaggcaactgcgtaatgattgatccctggccgtgatcatatgatagtatgtaataagcgtaattaccacacgtccatgattttatgaattttcgaattttgaatttcccaaagaaataaatgctgtgacgagaagggcatcagaactttcccctacaaaatttatggaggttcaaattttgaaaagtaaaaaattaaatgacttcaaatccgtacattgttgagtaattataataatataagcgataaagtttttggtgttgtttgttagagattgtgattacttttaaaaaagtacttcttcttacgttacattttatattgttaatatgagagaatacatcatgcatccgatttaattagtggaggacaaagataaatagaaatgttcaacatataaaacaatctgaaaaagaaaagagaacaaaattaataggcttttagttttaggttgcgtgaaggaagtaggcaaaaagcgaagattttttccctcctttttcttcacacttcacgttttttctttgttccttagctttgcttccatttgactctatgaactttttttcttgtgtttccattgaaaccttctttattagtattccttttaggcttgagtaaaatacagaacaactctttcttcatttccatttgtccacttttcttcttagattctcgctgtttcagtgggaactgatagaaaaaattgctatgaaatttctgatgaaaaaagtatccaactaacacccttactaggaagttatctaattttaaattctgaaaacttaaaaatcataagaaaaaaagtcactttgaatcaaatgttgagcctggtcaaccaaactaagacaatgttgattgatcctgttgactcgaagaaaaggaaaatcaacaacgtaagagtcaaattttatggtcaagggaagtttcattaagagcccatctgctttaaacgaattaaggcccagagaggcccagttttggaggtgaagaaaaacgagggaacatgattcttttttaattttgaagcacaaatcggacggaattggagattcttttgaataagagtttcgttcgagcttagagatggagaagagcgcttggtctcagtgtagagaaatcgagaattcaaagtgtggtttcatgaagaaaaaccctaattctgtccgagatagagaggtggtttcagccttgttgatgcttgcatccgcttagtgagaagtgctttgtcctaaagaagctgaaagcaaatgaaatttgtaaaagctatcatcacagttccaccgagaaaagactgactttgtttattctgttaaatgattttcgattgtttgtgcctatttcgattgtttattaatgtgatagacaatgttttatcgaacttgtggttccatcatactatgagtgtaagttcatgcttcagttagataaatgagataacacaggtacttgctggtttcccgcaaagttaagtgtttgaagtagtcacgagagattcgaatacaagatgtctctcatgtcttattatgatgcaatcttacttccaacagaattaagcattgatgtataaatcattcaaagacggtttaatcaaacatatattagaccttaaaacattatgtgacttggaagacagagcccaactgtggtaaataaagaggacatctctgagatcaacttcttcaagttttagatagagaggtcagcgagatcaaatgttctttccaccgctttgcaccaagacgccactttcttcttcctgattccttcttccatagcgggtctgaaaactttggagttcttcgccttctctcccgactcgaatatgtctgcttccttccagaatcccacagctaatccagctgcataggctgctcctaatgctgttgtctctatgtccactggcctcaccaccggacttcccatcagatcagcctgcaacattttcaaggagataagagaatgagattaatgttcgaacaacacaatcatcagaatctgattcatacagagaagagaggagagcatcatcatacctgaatctgcatcagaaggttgttagctgtggcaccaccatcaactctgagcaagaactcccctttcccgttattaagggaacccttttcacctgcatctttgttcatggagtcaaggacgtctttcacctggaaacacatgctctccagcacagcccgagcaatgtgagacttgttggtgaacctcgtgattccaatgcacacaccacgtgcgtcttctctccaccaaggagcaaacaagccgttgaacgctggcacaaagtacactcctcctgtagaatctaccattgctgccaaatcttcgatctcagaggcgcttttgattatcccaaggctgtctctaagccactgaacagcagctcctgctatggcaatcgaaccctccaatgcatagtttgtctgtgcttgaggaccgagcttgtaggccaacgtggtcagaagaccatgacctgatttgattggcacttctccggtgttgagaagaatgaaagcacctgtgccataagtactcttcgcctcgccttttctgcaagcttgccccaacatcgcagcatgctgatcaccaagacatccagcaatcttgataccgggaataggccagcctttgcagatctctccaatcacttctgaattgctgacaatcttgggcaagatttcagccggtatgccaagtgtcttcaaagtgtcctggtcccagctcaaggttttgaggttcatgagcattgtccgtgaagcattggtgacatcagtgacatgaaggccgccattgataccgccagtcatgttccagatcaaccatgtgtcgatagtgccaaagatggcatcccctttcttgatagcgtctttgacatcatccacattctccatgagccaaagcagcttcatggcagagaagtatgtgcttattggcaagccgcaagactccacaaaatgggatcttcctcccgagagttctttctctagtctcctgtaattaaggatcaccaaagaaagctttcatcagaaaccaaatccctcagcaatcctgaagatgatagtagacaaaccatacaagaagaaaagaaagagatcaatgaaagttatgtacctgcagatggagctggtacgagcatccatccagacaatagccttgtggagaggaaggccagtggatttgctccaaacaacagtagtctctctctgatctgtaagcccaatggccttcaagccaccgtcgacgttgtgtccatcggcagtggctttgtcgagagcctttgcaatgcacactttcacactttccagtatctccattggatcgtgttccacccatcttcaaatacattttaaataaatcaataacaagagactagagatatatatatatatgcatccaaaatccactgaacaagaacacagattcgaaatcaaataggaagacaagacccaacggaaaaacgaacagatcgcttagacacacagacagaaaaacaaaaaacaaaactttggtccgatggagcttcaaagatacggaaatagtgtccaatcagacaagatccatccactataaaaagtctcactttactagtcataaccaatgaatacatgaatttaaacaagaaaaggtgattagttttacccagcttcgggatagaactgagtgaactcgacttgatgagaagcaacaggacgagcatcgtggtcgtaaatgatgaatctggtgctggtggttccttgatcgattgatcctataaatccattttcttttgccatttttctttttttttatctttttggtaaaggtgaagaacgatgctttgttgttatctcaaggaatataacgaagaagatggttgttgaggataaaactaaactacaaaatgagataatgggaacgattgaatatagaaagctgaatcagagtcagagattttgttggaaacttcaccgttctctatccatctacgcatttactccaccggattggatgatgatgtattaattaagctttttattggtggatggtcaagattatgagatcattcttacttaaattcagctgcatctcccacgtggctctctttcattggatattcttgtaaccgtttctatcgttgactttgacaaactcatatgtccctttctccgttcacagatctggttcttctattaagttgatttattttcctagtactacttgtctgaagctactatattttactataaacttataaacaaatgggattttaattcaattttacggctggccctcgtgaaaacgtatcttaaatacaaagatattatggatagaaatggggttatctacttcagaccaaaaaaacaaaaactgggttatctactactaatattgattactactgctcgtaaatttggtgaccagattttaccaattaatgtatatattatgaggcctgccctaagattatcatatgtaaattgtaatagcaacatatgttggatggatatgtatgaattaatattttgatcaactaacttgtctcggaacatcatcgtatattcaattataatcaccggctagctacataaattgatcaaatttacgccactttaattttcccagttatatatatggattgttaataaaatgattgtgcatattttgatctttttaagttatttgacttgttaagaggtacactatgatttacttgtaaccaataatactattgtttcatttgaaatatcttttatagctagtatggaagagaattttcttttatgtagtacaatatcattttgagctctttatgatgttatcgtcaataaatgttaagctgagtttacgaaatcgtcatttagtgaataattccaattttggtttcattcataaattaaacatcttctcctagtttagtttagtgtaaacatattataccggtgtttgtttgtttgaattcatactttttagttttgctatacataagtgtgtcgccaaaaaaaagtatttgttagtcaaaaataccaagaagaagcaatcctttgttttggaattaaccgaaataaataaatatcaaaacaatggataaacaaacccaaatgttcatgggttctcccacgcgctgatttcttttaaaataaagtatttaggctaaaaacagcgtttttggtgggtatatagactaggcattttcgacacacgcgctatacgctctactggtgcgcgtttgcattgtaacagtaatgtttctgataataactcgtgtcgtgtgggttcgttttatattttgttttgggcttttacggagtccaatatttagtccacaattattattcagttaatatcgttggtctggcccatatctacttaatttcatttacattttcccgaggcttcataattttattatattactcacccattttgaagcttcaagaaaattatactttcaaatctaattgggtaattaacttaatgtatcatcataatcaaaatcatgctaattccttcacccctatcttttctttattttttattttttattttctgaatgagttatgatgaaaacgtttctatttataatttataatttgaagagattatcaaagtttatttgtttccatgtctggactgtaaggaattatattttattttcttttcatatatttcaaaataaataatcaaatacttttaaatcttaacaagtttaaatgaaactagattttaacccgcggtataccgcgggatgatttattttttaaaagtaatatatattaaaacttgtaaattttatttttataaaatatttatatttttacagtttataattattattaagtatttatatatattaattgttattaaaaaataataaattaataatttaacccgtattgaaacagtggattaattatattttactttttattaatgttgattcaaaaacacgtccctccaaatccgtcttgccaaaaagccatttattttattaatattaattttatttatgatatgactctaaattataatctaaatattttagctaataacataggagtgcaccatatttatttaataggggaatgtactacatgacccgaatgcacttttacccaaatccaccaaaaaagtcttgcaaaactactatagacccgaatgtaccacatttttttgtgctaatttttatgtgattaagatttaattgatttcgtatataaaatattaaattgttttacgaacttatttgtttataatttggtaacagatagatattttaatattcaatatattttgcttcagtttaggaaatctttgatgacccgtctttaaatccaataaaccctataattaagagatgaatattgtcgttaaatgattttggtaatcttaatgatgtcattaaaagattttgtttttgattaaatttttctaatggcattgtcatgtaattaattacaaaaattaaggttacatttaaaatgtacttcccaaataatatagtaggacgatatgcacttttatccaaatccaccaaaaaagatcttgcaaatatactataaagataagaaacgatagtcggttttgataggtataagattagcaaatatattagttcgcttaaattagttaaagaatacaaattgaaaaggaatattacactttattcgaatatagtatcaaaacttatatagagatttgataattttttaattgttgaatacttttttttgtgctaattttatgtgattaagatttagttgattttgtatataaaatattaaattgttttacgaacttatttgtttataatttggtaacagatagatatttgaatattcagtatattttgcttcagtttaggaaatctttgatgacttgtctttagatccaataagccttgtaatctagatattaacctgcagtataccgcaggtaggcttatattttagttcaactaaaaacttttattgtaaagatgatttaaaaatatatgatattattttatttgattttaaatgtatagtaaactgtgagttgtatatgttttgttgatattatctatattatttagtgtttaagattatacacttgtagtttgattgttaatttaagagtttcacctgtagtataccatcttgtattaatatcgatctaaacccgtcaattctaggattttccagcttgtattaaaaattgaatcacatctaatatgttattaattattgtagtatataagattataaattttcaatataatatgtatgaaattgaatataaatatttcaaattatgacctgttactcagtagaaagttttcttaaatctatttttcacccgttataatattttttcatgtattgaacagtttatattcgtttttaaaaattcaaattatggcatatgcgaaaaaactctaattatttttctataatgatgatattatttttcggcaaaaatagaatcatataaacatgagaaatgaactataataattaataaaaaattaatatgataatttagatatcaaatctaatttgttgattttaattggttacttttttgggaattaataatgtatttcgtttttctaattaaagtaaattaattaaaatttagatatcaaatcttatatgttgattttgattggttattatttttggaaattaataatgtattttgttttttaattaaatttaataaattaaattagtatttgactttttaatccttaaagagataaattaatttactctttaaaattttatttctaatggcatacctatgtaattacttacaaaaattaaggttacatttaaaatgtacttcccaaataatatagtaggattattcgttcaaaaattgcttggaaataataaattactagattttaacccgcggtatagcgcgggacgatttattttttaaaagtaatatatattaaaatttgcaaattttatttttataaaatatttatattttactgtttataattgttattaagtaacgctataccacgaatccatgagacaattgttaaaaaactgaagttgtaacccctattaaaacagcatattaataatattttaaaattttaaaaatatttgccctgttctttttgttatcgctgcgtcagcggttggcgaccggaaattatagcttatttgcatgtaatctgtatggaaactaacataatcgttcttgtgaaaagagccgcagtgtctataaaaatggtcgccgttttttttagcgatgccgacgacaccggtatcccctgtaaaagtggccgcagcgacacccttattcttttttttctgtttcttttgctgttgttgacgtttaaatttcaatcgcagatccctgacgcagcgttaacgtgccgaacatggccattgattcaaatacatccaccatataacccattccaaaataaaacctgttcaataatctctttacccgtcccgtgatttttttttaaagtagtaatttttaaaatttaagaattattttttatatataaaagttttgcaaattgtatcattctctaatacatttatattttatagtttaattttatatatagtaacattatacataccacataacattttcggttttatataattttttctaaattaggatgatttgatatgtttaatattagtggtcttaaaaaataataaattaaagatttaacccgtattgaaacggtggattaattatattttactttttttattaatgttgattcaaaaacccgtcactccaaatccgtcttgccaaaaagccatttattttattaacattaattttattaatgatatgactctgaattataatctaaacattttagctaataacataggagtacaccatatttatttaataggggaatgtaccatatgacccgaatgcacttttacccaaatccaccaaaaaagtcttgcaaaaatactatagagataagaaacgatagtcggttttgataggtataagattagcaaatatattagttagcttaaattagttaaaaaatacaaattgaaaaggtatattacactttattcgaatatagtatcaaaacttatataatacagagatttgataaatttttaatcgttgaatacttttttgtgctaattttatgtgattaaaatttaattgattttgtatataaaatattaaattgttttacgaacttatttgtttataatttggtaacagatagatatttgagtattcagtatattttgcttcagtttaggaaatctttgatgacccgtctttagatccaataagccctataatctagatattaacttgcagtatatcgatggtaggtttatattttagttaaactaaaaacttttattgtaaagatgatttaaaaatatatgatattattttatttgattttaaatgtatagtaaattgtgagttgtatatgttttattgatattatctatattgtttaatgtttaagattatatatttgtagtttgattgttaatttaagagtttcacctgtagtataccatcttgtattaatatcgatctaaacttgtcaattctaagattttccagcttgtattaaaaattgaatcacatcatacacataaaaaaatctaatatgttattaattattatagtatataagattttaaattttcaatataatatgtatgaaattgaatataaatcttttaaattatgacccgttactcagtagaaagttttcttaaatctattttttactcgttataatattttttcatgtattgaacagtttatattcgtttttaaaattcaaattatggcatatgcaaaaaaactttaattatttttttataatgatgatattatttttcgcaaaaatcgaattatataaagatgagaagtgaactataataattaataaaaaattaatatgataatttagatatcaaatctaatttgttgattttaataggttacttttttggaaattaataatgtatttcgtttttctaattaaattaaattaattaaaatttagatatcaaatcttatatgttgattttcattggttattatttttgaaaattaataatgtattttgttttttaatttaatttaattaattaaattagtatttgactttttaatctttaaagagataaattaatttactttttaaaattttatttctaatagcatatctatgtaattacttataaaaattaaggttatatttaaaatgtacttcctaaatgatttgattagtcggctgcatgtgtctatacaagtccatggactcttaacgggcctattactagtttgtcaatctagttgtttattgggcctattaatgagttaccaagtaacattagtttccatctattgttaattttatcatttagctttgtttacgataattttgtttatgaaaagtcgtttttttatttttaaattactcatttttatttttctattatcgtatagatatgaacagaaatattaatacgcattttttaaaatatttttttctagtatatattcataaaattgaaattctgttaggcgttaattattgaatgagaaatttaaaatgaagaacaacagttagcaaaagtaatcattattttctacgtgtggtcttttcagattgccgtaaattaaccattttatcattattgtaattatcattaaatataataaatccaccattaataaaggccaagcgaaaaaaaagggtcagttattaaaattaaccaaggggcgtgactctttgattttgaatatatataccataaaaattgtcaaagagaagtcagatagcgagcgagaaaaccttcgtgctctttcttcgccgccaagttatatcgacggtgttttcgtatcgacgtcttctcctctctctctctctcgccgtcatcacctctttgaatgaacggcggacgcgggaaaaggcctaactcagtaagttatttcagtacccttatacaataaatatcatttgtttgtttctagacacctctagaatttgttggcttacttgtggtgacagagtcgtgagagtatactctgatttttgatggtttaggcagaggaggaaggaaccatggctgaaccctctgtaaagaagagcaagttgacggaatccgattggataagtggtttagcagatgatttgctacttcagatcctctcgaaagtccctacgagggaatccgttttcacaagccgtatgtcaaagcgatggagaaatctctggagacacgttcctgccttggacttggactccagtaaattccctcatgagtcggacttggaagatttctttgatagctttctgcagtttgatggtaatcttaagatagagagattcaagtggatttacaacgttgaagagcattgtgaccctgaatttgtgtctcggatcgatcatgtggtgaaacgtggacttaaagatctaactattctcagcaaggttaatattgaggatgactcagttcggatgcctgtctcgctctactcatgtgcgactctggtgaatttaactctctatagtgtagtcttcgatgctcctcgagcacaattggtttctttaccttgcctcaagactatgcatctcgaggcggtcaagtttgacggagagaccattcttgggactctcatatcaagctgctcttttctcgacgaattaaccataatcacgcatgatcatgatgaactcggagatgtatctgtgcgctctccgtcactaaggcgcttcaaacttgagtctatgcgtgaggattatgacgaatgtgaagatcctaatgttgaagttgatacccccggactggaatacatgagcatcactgattaccaatctgagagcttcataatacataatatatctccttgtgcaaaggtgaacatcgatgttgtctttgatgcggaggatgaagattctgttatccatgattttatcaccgccatatccactgtccgtgaattgacaatctctgctcgaactctagaggtacacatgattcatttgagtcaataccaattcattttatacaattttcttatggacagttgatatctttctaacagatgatccatgattacgttgaatcggaaacggaactagtacctcagttctcgaacctgttttgcttgcatgcttcgttctctgaatcttcttgggaaatgtttccgacatttcttggttgttgcccgaatctacattccctcttcttggtgcgcatcattttcctattatcctataatagcattttgaaaaccctaactaaagaacgaaattttcgtttggttgtatcatcaggaatttgactgcttgccagagaaggaggagattaatctgtcattggttcctcattgcttcgaatcatctctcgagtatgttcaattgaaggtaccaatcacagtgagtgagacatcaagcaagatggaactagctatatactttgtaaggaactgttctgttttgaagaaactgatgttaaatgaaagtttcggaaacgtcatcaacaaagtcagaaagattcctaaacggtctgaagggtgtaaaattgccatgccaaagccattgcacgagaatgtttctcatggatccagtttactacctttgatctgcgggttcattcccaaaatacttgatcagtaatcaagtggaagatatcttagattttttgtggacatggatcatgggtctgaccaaacatttgttttttttgtaagttgaatctataatttgatcgacttttgttatatctcatcgagatctctattgttattttcttacaaagttctttttttcgtttttcccaaatatgaacacaacaaacatgcataactttattgctactacgttctctacttaagttggaaatatctccgccacaatggtgatgcacagaggagaaccaagagtaatgacgtttatatcctttggcacttaaaatcgagttacaacaacgccggtgaccatttcctcagtatacatagagctagtgcaaaaatcaaatcaagcaagctttaaaacccttctctaactcctccctgttcaaattcttaccaatgaaaacgatcttattcactctctcctcctctcttccccataacctgtctggtgatccttgaaatatgtcatggactccttgaaacacgaatctctcctccatggtgtggaccgagaggagacctttcattctgtagatgtcttcactgcgttccatcagtaacgtcccgagccacatgtttgcctgatggattgtgacacaatttgaagattaacatacggtttcatcaaacagtcgttttatatgagacttttgtgtgcctctcaagctgcatattatctatattaccttctcaaggtctaagcttccttcgcaaactatactgactgaagaaacaccgggatcatgggtgtgatcatgagaatgatgatgatgatctgaggtttaagaatcagagactgattaggttgtgatgagagagaccagaaccaacaatccatgttcgtaaagctggagcatgcaatcaatataactaaatcaaggtttcctaataaacttaccatgtccatcgtggtgatgatggtcgtggtcatggttgtgatcatgatgatgatcatggtcgtgatcatggtgatctcccttatcatcttcattcacagagctttcgattctgataaagcaaagaacaccttaataactgtgtgaagctacaagacaccaaactgaatattatcataagttaaacaagaagcagacctctctagatcaaaacctccaattccaagaacataatctaagtcaacatttccgtactttgttcgcgtcatctgagccatgctgtttattgtctgtagataaccatagcaaatacgttaacattataaccaagaatggtctgagagactaacatataatcatctagtgaaataaatgaatacgaagaagatgtgagaccgacctttatgcgttgtaccaccgaacctaattccgcctcaccaacaagatcagtctgcaacaaagtacagtcacttttcagaaattggatatgccaacaaaaacaatacaaccgataacttctcaatatatttgagtaaaacatatggatccatcacttaggacgtgtcaaaaccatttgtgcaaatgaatttatttgtaaactataaactatttgagagaggaacgacctgaatcttatgatagaagagattcaaccactcaagatcacaaaaactatcacattctctttgagacaattgtgttcaaaactttggttaccttgttaactatgatacgatctgcataagctatttgttcaacagcctcattgacaacaccttcgggtttgacctcgtctagatgcaaacgagcatgcttagcatcaactagagtaacaacaccgtccagtttgacatcattgaaaatttcttcctcggcataaaaggtttggataatcggtgccgggtttgccaatcctaaaaagtgaaaataaacataagatagtcattactcattccccagattctctaagcatactaaatgaaaatgccccctttcccaacctgtagtctctatgactatatgatcgaactttcctttcttggtattgactaattctccaatcatcctgacaagatcacccctaacagtgcaacaaaggcagccattgttgagcatcacaatatcctcagctccaatagatttagaagcaacaagtgacccatcaatgtcaacttcaccaaactgagagaattcacatgaaacatgaattagaaagcaacaccattataactgaattcaggcgaggataataagctaacctcattctcaatcacggctattcgcttcccatgatctctggtcagtatatgattcagcaatgttgtctgtggaaaaacaaaacattgcagtataattagtccaacatttcttttacttagcagggctaattttaaaccctagaatagatatgaaatgatgagaaacactgactgaccttgccagagcccaaaaaaccggtgataatagtagccggaatccggttatctggcggaatcttagtggtgacatcagaatcttcagtctgcgtagctgaggcggagacagatgagaatctttgacggcggaccaccggggaatagaagaaagacggcgtcgttctgacggaaacggtggtagctctgggcctggagagaacagagacggcggcagaagaaaagcgatagttgaaggcggcagaggaacgaggagcggtgaaagagaggaaggtcgtagcaatctctagtgttgatagcgtcgccattttagttaaagaaagcaagcgagaggtcaatggcgattggcgagtttaaacctcgtcccactctgtagcttcttctagatacacacaccagataattttcactcgattttttttctctgtctcttctcaatattttctcaaaattactatttttgaagatatttatcattgtagatatataagtctgtgggccgtgggccgcataggccttagtaattcttccttcgtatctcaaaacgaatatccaaacctatctcgaagctgcacgtggcattcaatccttagttcgtgcttagattcggagtgcaaaattgcaaattcgtccttttgcaaaactgatatttctcaagaccaaaatatcagaggcaagcaacatcgaattaaccaattaagaagaacttgtaagctattaattcatttaccttgttagaatgctttcttccccccacacaaacaaaacaataataaatcggaaaagatctaaaacccccacaaaaaaaacagagtaagaaactgaagcagatcatctctgaggctggtcagaggcagaagctccaacggaaggtgtagccgtgacagcgctggctgagccattttcaggcggtggagctactccccatttaccttctgactcaagcggctcgaatatatggacccctccgtctgacagacccactgcaaacatgttggattcttgcggatgagccgctatcaccagtggatggacattcgagttgctgcacaaaacatcaacatgaagactcaagattcatgatccaacattgcactagtttatattcatttcattaactcacctgagagaagctggcaaatatgcagagggattgactctgcaacgcaatcgaaggtttgcagagctgaagacgcatattgtagcgtccatgaaacttgtgtatatcaattggctatcacatgagaatgtggcatgtgttattggagctgctgattcacgcacaggccactggaatcaaaataaagacatttctttcttctataagggttactcagatgcaaggagagagaatgaacatatataaagactaaaacctgtttcatgcattcaagcttggttgtttcgtatatagcgagctgagtttcatggaccacaaggaagtgtacttgatcttgatgaaactgaacacgcgtgtctgacaaagaagacgtggatcttccctgtggaatttgcagaaccttgcttttctgcttctcccatccatccgtgttccatacgcaaagctgcatacaaaaaccaaaagattcacactaagacttctaaggatttggattctttattacaaaacatgagatgaatcagcacctgagcgtctgctccagacgaaaccagaacgtttaatacattggagaaagcgaggccggttattctcttagaatgtcctttaagcttgctcttaacctcatcaacacgaacattgtaaatctgtattgtactgtcatccatcccgatcgcaatgatattgttatcttgagggtgaaaagcaagaaacgttgcggcaggaggaggcggcatgaaagtagccattgtctgcgcttagccaacaacacaattaaatgtaacagatgaagcattgtttgcatacattagacatagtgctgtctgtagctgggattttaccttaaacgtcatcatattaaacaaagagatctttcctcccgatgctgacatcacgtaggaatcatttttcgataaagcaaaacagggtacggcttcttctggattagtttcagccacatcgtttgtcattaagatcccgctcgctggttgccactgctgaggaggtaaagaagccgttgcctacacaaaatctcaaattgaatttcatcatgatttcaactcttttggcgatcttaaaggaagattttagaccataagtaccttcccagttgcattacggtcatttcgctgccacttccatagcagatgaatagcatttgatgccaatgccaaaattgcatttcccgaatttgtgaaaatcaatctcgatatctgctcaagttttgagtcattagaatcaagccatataagtacagttatgtcagtctatgtgttagtaccttggtgactctcatattctcagggagtctcaatgaacggcactgagagggttcgccgacttcagtaagcttccataccttagacttatcatttgattcttcggtaatcactggcttcacatccaccatattccgcgaatctccattctgttggaaaggtaagtgatcaacaacgatgattggacccagaccaagagatagagaaactgacggaaaaagtatcgattttcgtaccattccagggatggaaacgacagaggcaggtctctctaccatcggaatgctgttgattgcaggctgcaaatgtacatgaaaaataaagtgttgaagaaatttcaaattgggggttagtaatttgcttgttgaagatccagtgagcacaaaattcagtaccttggaggattcagaagataagttctcgactgtgtgcaatagccttagaccatctgagtttgccataaccttaatcatattgtcatttgcggaaacagccaagagagagccttccttgttaaatctgatccgtggacttgcctacaaaacatagagagccatgatggctgcaaatgaaaacattcggttcccagggagaatcgaggtatttgtttgcatacctggagacctccatcagcatcaatggcagtcaaaagctgtatggtgtccatatcccagaacttaatggagaagtcgtcacccgcagcgagataacggtttttagtagtatcaaactggacaacaccaagggaacgcttgtggaatccttgataagttctcttcacagctccttcgctttcattccactcaactatgaacgattccccatctttactcgtcccacaagaaaatagcctatccatgtgaatataataaaaaatagattttaaatttattatcacttcatgacgatacagaacagaaccacaacataaagatgatgagaatcatgttataacctagttccatcagcactgtaggccatcgttgtacaccagcgaccaggagcttcgtagtcaacccgagaacccatattatcatataaccatgcttttatttttccgtcaagagcagttgaaaagataaacttaagcagaagaagaaataaacaagtcaaaaccaaatagaaacgaatttcaacttgtacttagcaaaaatgaaaccgtataaatattgctactttacctgaatgttttccttgtagtgagggcagatagagtaaacaggagcttcatggccttcaaaagtataccgttttacacccgttgcagcatcccagaccttaattcacagaattgattagtctgtttttagagttccaacaaaaaaaaaaaaaaacaagagttaaggaaatgaaagaagaaaaaaaatactgaaccttgatggttttgtcatcaccacaagtagtaacacatagttgcttgttcggagtggaaaatgcaatgtcattgacaccgccaacatgagcatcaatctgaaataataaaaaatgattttcattacaggaaatgaaagaaatactcctaaaatgttgttgtaaactatatcacacctcaaggtgttgcctcatgtcttcaccaccgtgataagagtatagctgtacaatatgtctcgaataagcaactcctgcagttgaaaacgtgcgcatatgaatactcaaatcggttgaaagagcatttgtaatctcaagtcttaccgaatagggaaccgtccgggctccaaatcacacggttgacagaaacgacaggttctttcaccaaagcagcctataaagaccagaattgttggtcactgaagtttcaaatagatattagatattaatattctggttgattttcacaaaagaagacacctgcaagggcatcgaacatttactcaagtcccaaactttgaaagtcttctggactagacgttctcgagaaccgacttcccagagcccaatatcccctacattcgtaccaactggaacaaagaaaattgaagcaagaaacttctggttttacaaaatttctgatgatgtatgttacatgaaatatgcatacagaccaagaaacagacctagtagcagagtctgtttaataggatggaaatccatgctcatgggagatgagccttggctcaaagttcgtgcaactgtcttgggcaagtcatcaggtgctttgaaggtttgattatgaccatgagcctgccccgggaatgtcattggtaacatgttcacacctagactcacctacatatggggagaaagaagaaatacgtttaaagtctaaactagtactaccaattatgtaaaattggtattgataagaaaatatataatattaattaagatttttctcacctcgtcagagattcccataggtctggttcgctttgagacatggtctgagtcacctgatggatagtctacagcggaattagaaggaggagttctcgggtgtttcaaggctgctaagaaccaaaaaggagaacatgttacatagatcacaggtgaaacttaaaggttctgaaaaaaaggcgaggataaaatttaagactatagttccacacagcttttataaagaaacaccacatttgataagcaaataaccttggatggatggagcaccaagagcaatgggtcctccagacacagctggatgtgggacagaggaaggactagacatccaaccagcaagaggtgtcggaaccggagaaggtgttggttgaaaaggctaaagacataaaggtaagtcaagcacggcatgtaaaggtaactatagagctagaaccaaaagcagtagaaatggcacttatagaaaatacgaaaaatcaggtggaaattgacctaccccgtgtgcgcctagaggaggaaatccctcggcttttggtaatgatccaagaagcggattgttgacaggggatggtgctcgtgcatcatttggtaggcggcaggaatgatcgacaaagagagtcttaatatcaggattaggccttgggttcttacaaagctggtgttgccaatttaagctgcaggtttatgtagccacatagaaacaaggagttaaagtagctgacaagaagaaaatttgttgaagtgaacaagaaaggacaaagaatacctctgattaatcagagtcctgaggcgtgaagttctaagggtaggaaactgcaatttatcacggaataaaggattagcttcaatcaacttcttgagttccaccaacatgatagctctggcggactttgtgtccccatacttggataactgctcgttctccctgaagttttctaaggtcaagagctgagtgatttccttgaaaagctcctcattaaaagtggaaaacactttcaaatctttgactaaaatatcgacagccttgggacgatcatgcctagatagaagcagcagcaggtgtgattgattggcaatatgaaaacatttgattcttgttgttgttgagagacacaagttacctatccaaggcctcgagatacttctgcttcctaatctcgaagaaaatcttcatggagtatcgattatcatcaactttagtaaaaccagagagatacttctcaacctcatcccagttaccattgtgcacctcatcctcaaaatacttcatattgaagaaaaacccagattcttgttcaagcctaattaataatcaatcaagttaataataatgcctaataaaagacaaaaaggaaaagagagatcggacatacttatgaacagtctctttaaacttctcttcatctaaaaactgtaagatcaagaagacgagctctctgctcagagaagacatgattgattttgccactcagtccgataaagctatcaagtcagatgcagaaaaacccaccagatctgcatatcaatataatggcgacgatgataaccttacaaaaccatcaaatcatcccaatttactgggtttcagatattcctccatttaattattatttttaaaaaatgaaaatagacacagcctcttaattacacagtatataactagatctttacaactatcctccggaaaattctccaaaagtctctattccggcggatttaattagtgtttaattgggctacacaaaaattaggtcttcctagtattattattgtccaccgaattaaatataaagcttaaaatggccatctttttcacttccatgagacaaaaacaaaaatcaaaaacccagaaaagctacgatttagatattaaaccaaaaatgaaagacctagatacgttacttgccatgaagaagaagaagacgatcgatttcagaaacaaaggccagagcttcagtttctctctcctgatattgaaagaggccaaggatttgggttttttggactctcctctctcgaccagaaagtaagaaaaaaactaatggaaaaaaaaaaaacaagttttctctctctctctctctctctcttcaggcttatttatacgaacattaaaatcttgcagaaatggagactttaatttaaaaccaaaaaataaaaagtgattttaatatgcgaaggtgacggataacggagtctaataagacaatgcacctatcacacgataagggagctgattttgataagcacgttgacttatatataagtacagattaaagtttaaaccagcatatacgacttagccggctacaattctcgacgttatcggctcagaatctctagctgctagctgtactccaagtagacatgatcctctgtgtcacaacatgagtacaccctcggtgagtgccgtcgatcttgtacgatgaaccttaaaggatattcatccaacggtttgaaagcgaagtagctgcgtccccacatttccctcataacacgacaaagcttttccttctgaaatgcatctttaagttccattgcccttgaaaatgacaaatatttacctaaattgccatttttattcttgagatgcggtactcgttgaacaaaaatcacgtgattgagagataatggaagaggttatcagttaaattctcccgacatgataactcttaagccttctcgtgatttggagtcgttaataatttagtgagactcgtttaatttctaatcatttaactgttttggattgtttttgttaatcgcataatgtgatgtgagctatatatatattgactattgaggattataatcgaatttatttactcgatgactaataaaatgattttgtttgtttattcacagcgtaattggtattttcgttatatatattcgacggtttaattacaatgaaccaatatgttaattttataatgtgtctagtgttattttatattggtctttcagactttgacaagaaacatcgagtttgacgtcattaccgtaaagtattttggcaccaaatgaagatcaatattatttgttttaattgctcaagaatgatgatggttgcttttgctaaagttatgggtgcacaagaaaagtatataacttttgaaaagcacatttttattcttttaatttacacggtaacacgagtatctctacttttctagtaatgcttacacagattgatatcttgattatttggatataagttcatttgccgatttagcttgcttttttattcaaatactgattaacatggaatgcaagaaaaaggaaaaaaaaaccttcttcttgccatggcgagtgagaggactactaaaaagaatacagtaattccaaactgataaatatgagtttttacgtgtggaaaaaaaaaatttgagtattaccttagctctgcaagatatattaagaatacagcaaataaagaagaaatcaaataagcatattagatttgttttcacaaactgaaaaatcctcaaatacataaaaagaaaaacacataaaaatccaaactaataaatatgattaatgattcactgattttcgcctgaactaaattatggtcgtaagttttttgtaaaaaattgttaaaaaaacaaaaactgtcttatcgagacttataacaaatgatgaaaatctgaagaaataatatatatttttcaaataattatgtggtttgacatgtcaacgtctttattatcaatcagaagacagtaaggaacattaacaatgaaaagggaagttataaattaagatgtcaatatcagacaactactcgtcaatccattatgatacgtttcattatgagtcactaggtacatgtgcatgatgtaattatcacttattaaacagattataattttcaactaaaaattcgatttggtttctaaataatatttacaaacaatacaaatcatcaatgacaaaaaaattgtttgctacaacgtcaaactattttaaatgagtagattctcgatagatcctctacaatctacatactttactttgaaataactctccactctccagatcagaacacaaattgtaatagattaatagctcaaaaatagatgagtacttctctttagaaatataaaaatcagactaacacgttgaaaattatatagtactatgttttattttgtaaaccggtcattaaaagttgtggagaagtgaatggtggtcagtgttcactgcatcttcaatattttttatacattctccggccaaaaaacagtgcacgttggtcccatctggctggtctgttaaaaagtctaacgggataattaaattcttacgggagatattactaaatcattcaacgatgctatcaaatcactttcaataaaaaaaacaaagtcaaatataaaatatgttttcaattaatagagccacataccgattttttttttccaaagaaggcattgatttttctaataattgtatttattttaaatattggaatctacaaaacattattttaggtcagttggtcaatgcaattggttagaaaatctgtaaccaatgaaaggaaaatagtgtcaaattatactagtgagtatgttcataagttactaaagtccactaagtattaataaagcgcactatgtgaaactactacaattattattggctatttttgtttgtactacttgttttgtttaatcatggttagttttttaaattttaaaaccaaactttaagttgattaataaataaataaaaacgtagatgagaagggtgttggctaatggctattggttactttccacttatgtatgtcctctcttcttctcttaaaaagcttaattgctttgctattttgatactagtacagtctattcttcaatttatcagcttcttctcttctctcatatcgcggtaattaaaggcgatatactgattgctttctggggagaagttgtcggttgtcttttgccattataattataatgtgaatttttgtaagccataattatttgcactatttatttatttagcccaaataagcacgtatgtatatatagatagactaatttccacgtatccaagacattgccgctaactattttttgttgggaaaatttgatttttgttatatgacgacgacagcgacaccatcaaatttgtttatttatttcggttctcttgttatcccaacgccgcttggattgatatttgtctactatcaaacttcattatacttttgagcgaattaaccaaaagatttgtaatgacacctttttatttcaaaacgtacggataatattttgtcatagaccaaactatttttttcataaaaattagtctatgtactacatatcaaacttgttggtaattcgttggggttggtttctagtcgtcttcccatctcgttgggactaaaacaacattcttttagccactttcactattatataatggaacgaaatgacaagcccgttaaagacccaatagcccaatattgaatcaaaccgcagatcccctttcttcctccaaaattcaggtcacaaacccaaacttctcacccgtatctaaaaagttctcgtggtgtatagtcctaaactagtacacgacagaatcaaacctgtttgaagtatttagcacggatccaaacacgagagacatcccaaggaatctgattctccaatgtttgtctagacataagatgcgttgatggtaaagaagaaacgatacgcacatcagattcacagggttttacttctttttttggtaagattggatttttctctcacccccatttcttattccatgcttcttagatcgttaattgaatctgcatcccgcagtgatcattctttaatttacgaatttgtttttgttgtcttgttgtcgatttttgtcaattttattgtgtaatttaccaagtgtaaattgtgattgaatcgattgggagggcattgcgaggtaaatccatattgtgattttttgtttagtgtctaactagctgtatcgtactccgcataaatcacaggatttttttggtgagaatttggtaacaagaggaaattgttccattgatgacgaagctcctagtgttccattgagaatttttggtttccgattggattattaaagaatagaagaaaaatgttgaaatctggggtttgattttggtatttcaggagacacaagatctaggatttcctttatttagagacgagggattctatggctaacactgcctgctttatcattgtgggccggaatgatattcccatctatgaagctgaagttggatctgctgctaaagtacatttctttctccactttctctatttgtatgaatctgagtcattgaagtttatagtacatgttcctgcagttttgctccgttctggctccagctctttctttttgacttagtttcatggtcatagtatagctctctagatttaacccacgggagaggtgcaaagttcatttattaattgtcaccgttgtttatttggctagtgatatgaaaagggttgctatatccattgtttaaattatttttggtcgaggaacgtttcaacctgttttacataaccaagcaagcaggccttgttcttactagataattctaataatatagttctataagatcttctattgcttattgcatgactcattggtttctggtctatcacatagttatttatcctttcttactgacggaagttttcctgtttttgtcttgatcttttcatctagctggtagatatatgtttcaaccaattggtatgtggtctagtcgataagtgcacatcagtctcttacaccattctctctatttggcagagagaagatgctgcacagttgcaccaatttatattacatgcagcgttagatgttgtccaagacctagcatggactacaagtgccatgtaagtaaagtctcttgtgaaaatatattatcattttaaaggatccatctcattgtcatacaagtcttcaggttcttgaagtcagtggacaggtttaacgatctggttgtgtcagtatatgttaccgcaggccatatcctttttcgttagaccctttgagatttaagtgcaaataaaaatttgatgtaaaaagtgtcaggctggtatattggcttttgtgcataacagattcttatgcagttgtaaatatctgtttcttccttaatttatcaacacatacccgactgatgctccttcatgattcacggaatgaggacggcatcaagagcttctttcaagaggtgcatgagctttatataaaggtaaattttcttgatgaaatgaattcgcagttgtttgttctgtcctgattttgttgatggaaaccaaatgatttgttcatgcagattcttctgaatcccttgtatcttcctggttctcggataacgtcgtcacattttgacaccaaagtacgtgcacttgcaagaaagtacctgtagagaagacggagattctgtttgcatttggtgatcaaatttttcttgtacccatatcgcatagttcccaagtcaattgtttctgttttctttttgagtgcctggatttctgttatttctaacttgcaagcaacattttaataagaatgggattccttgtttagtatgagtaatgaatgatccattcaatccaaaataatttcatctttggttgttattataaagtctctcttttcctcagaatctattggaaaacaagcgtacatgtacgatgtatatctttctgaaacatgaccaaacgcctaacataagttaatgtgacacttttaattgctaatccgcaattaattaggtactttattgaagtttaaaaagacgattaatcaattaataaagaggccacatgtgaagtaaaagcaccaatcggaagatagaagtttcccaaaacttatcaaatctctgtgtatcgctcgccgacgaggcaggaaggacgaccaattgagacgttgacccttaatccgatttgaacaatctctctctctctctctctctctctctcttggtcgagattcataaaagtctcttctttcgtcttcttcgatctcggataatcacaaagtttatcttcttctttcttttttaaaaataaaatcagagagcagatcttgcgaatggatagcagttactctgtcatttccaaaacttcttacgttgagttacagaaaccgacggttaatgggaaacccagaaacaagttgcttccttctgatgaagaaagcttcgtcaatgattttgacgatgcccgtaatggtgttgggggtgaagatgctgatgatctcgatttcgatgtcgctgattacccactcgttcatggcaaatcatccaatcaaggatctgggatttacggtgctgttttcaatctcaccacttctattatcggcgccgggatcatggcattgcccgccaccatgaaagttctcggcttggttctagggtttgttttgattatcctcatggctcttttgtctgagattagtgttgagcttctggttagattttctgttctttacaagtccaaatcctacggcgaggttgttcaattcgctttggggaaaaccgctagggttttgtctgagatttgtatcattgtcaacaatggtggcgttctcgttgtttacttgattattatgggcgatgttatgtctggttctctccatcacattggggttttggatcaatggttagggaatgggttctgggatcaccgtaaagtgttgattttgattgttatggtcatcttcttggctcctctctgtgctttgaacaagattgattccttgagcgttacatcagctgcttctgttgctcttgctgttgtctttgtggttgtctgttttgttgtcgccaccatcaagcttatcgaaggaactatcgaccctccaaggttgtctcctgactttggttccaaacaagcaattttggaccttcttgtggtcattccgattatgtcaaacgcatacgtttgtcacttcaatgttcagccgatatacaacgagcttgaaggtcgatcacctcataagatgaaccgagttgggagaatcacaacagccatttgtgttgttgtctacgcttcaactgctgtatcgggttatctcctcttcggcaaggacaccgaatcagatatcttgaccaactttgatcaagatctcggtatccggttcagctctgcggtgaattacattgtcagaatcggctacattcttcatctagttctcgtcttccctgtgatccatttctccttgagagaaaccgtcaataccttactgtttgaaggctcgcctcctctatccgaaagcaaaaagagatctttgggactcactgtggtcttgctggctcttatttacattggctcaacgatgataccaaacatatggactgctttcaaattcacaggcgcaacatcagctgtttcacttggttttacattccctgctctgatcgcattgcggttagggaaacagagcaattcgttaagcttcgtggaaagatcagtgtcatggctgatgctaatcttggccgtagtggttagcattgttggaaccattggcaacatttacagcctcgagagcaaatcagattgatacttatagcagttttccaggatcttgtagatttatatagtcagagattctcagtccaataccgaaccggaaatcttcagcgactgctacatgcacctttaggatgtcgatcaatggcgtttgttcaggctaagcctaaagatttccggtttgtgaattatatgtatacagacacctgattcttatgattttattatatatacgcattttttttctgtttttcttaacagaaaatctcctccttttttttctggctgcgaatcattcttttatgtgttcatggatcgtttgtggactgatgttagtagatgaatttagtttgaaaaaccgagttggtctactcttaaccagaattaggtacctgaaataaccaatgaatatattaaggtggttgttagaatcattcggactggtactattgaaatgaaagcaaagtaacgaaacttaagttagactcaaaggttatcactaaagatctctaatacccaacttaaatacacctctgatccgtgtgcctttaaaaaatggtataattatatgttgatccaacgactttgcctcggatttgtctaagcaaaacttctaattcagttcttacatggtatactaaaaaatagatcattatcagtagatggcatacaatgtgggcaaaccgaaactagaagtggaagctagtgactggtaagtgcatatgaacaatatcttttaaattccacatgcgcatgacccgtgatcaccaatcgtgtcttccatttgatctatattattattatttttatatgaactataagcttctaagtatataaatattaatttatcgaatattctgattgtgatagatgaaaatttgtatgattgcatccactactactcgtgttgatgtctttgttatcacagcactcgataataatggctcgtatagtcctcctcttaagacctcaataataatttatcttcctgcttaatttaaaaaagccaaactgaggataatcattaaaaaaattgaatttgtgttcattgacttaaataataaaataacaatgaaagtaatgtatttatatacacgaattaatacaccaaatatattagttgactacagaagaagctggattttaagtttcagagtagtttttttttgttatcattagttgacctaactacaaagataatactaactatttagttaattaatctggtaacgaagagaaggcattgatttaacttaatacaaagaagtaacattgtttaattaatttgatcacgtagacagcggaagatgcctataatactataatatatctatatggccatcagaattatatttattttcttctaaatattttgatgtcacggtaatcttcattgcatgtgcatatgtgttctaagatcgagtattagccgctctcattatcttttttttttcaattaaattgaaaatatagttcaatccaaagcaaaatttgtgttgggtgcaagtttattactgtaatatattcggttttacccatatatatttgaatagtaaatggaacaaagatgatagagaatctctattagagatagtgtgatcccaaaaaaagaagcataatgtgctccatttcctacagcgtgattaatggacaaaccctcactcagtcatctccatgtgttgcatcctttttcatttttcttcaatgctaaaagatgtgtgaacttctctttatcattttcttcttctttttttttactttggtccactttagcccatccgttcacccaccttactaagcaagccccgaaacttttgaaaaagtcaaaaacaaccccaaaccgtctcactcctttcctttatatatactccaaacgactttaccttccaaaaccacacactctcaccaaacgttctacagattcgtaaatctcataaacattatggattggttctcatggctctcgagaacaaatctcgaagcttctctcatctacgagtacggtctctctttctcaaacaacgagctcgagtacgaagacattgcttacttcaaccacgaatttctccagagcatgggtatctcaatcgctaagcaccgcctcgagatcctgaagcttgctcggcgtgatcggaaaccttcaccgctcaccgctcgttcgattttcagagtcttgatcgccatcaagaagaccgggaaatgcttctccgagcatgttagggcctggatccgacgagaggaatcgtcccgggctctggtcgttgtgtcgagaagcacgagtagcagcgggaacgggagatggaaaagtgcgaggaagaagagattggtgatgccgagtaacggaaatggcgtcaaggaagagagactcctgttgacgaatggaactccttgtaggctcgatagcttctccaatccaaaggtttcttcaggttatgaagatgatgataatcattggggaaacaaagatgtagaagagaagattaagtgggattccatgtttcagaaccttaaacctacttgaaatcattaactagctagatgccgaggggatttgggatcttccaccacagatttgagttttggctaatatttttcgagtgtgtgattaggctaattagttttgttaattgacatttttgagattctgaatgattctctgtctccatttatctgcctttttatttattggctgtggaccactttttagatgaatattattaattatattcttaaagtttttaactgttaaattacttttaaattttagtaaaaaaataaataaatatatatatatatatattttgttttaaatatgagttgaagtggaaggaaattgctaaatcacaattaagggtcacataaatatttccttttttcttttatttcttttttctttcacaattaacggtcacacaaagatttcctttttttctgtaatgagtttaattaagatgaagaatcaactcattgcctgtgtcgatgatgttgatgatccgatcctcaaaactcataagtataccaaccacaacagtgtctactttcatgttagtatcatgattcatgagagttttaaaatggactacttcaaagtccaatgtacgttgggactggcggccgagagaaacagagagcattattgctggtttggaacaagaaaggtcgagactatctctaagaaaaccaaaagctagctatgatgaagaaagatgacatctcttctctcaaacagatttggttgctcaaatagtctcgttttccggtagctgatagtctagtacagcttgtggtccggctctttcattactttttattcaatctttcattatatgctgtaaggaaatccaaatttttcactgtaaagtctaagcccagggttgttttacttgtctgtgtcagttgtttccatttttatcggttataagttggatcagtgactgtaatacaactatcaaacaacaaccttacaacctcatcaagaagccgatacatataggttcttccaaccggtttttggccggttacagcggaataacacaagagttacaaatcttagaatacacccaaacaaaaatgccccacgatacagtaggagcctataataataatgaaaagtagatagcatctatgagtgtagttatattatatatattctttcatctaaacagcctctcgctctctggatatatcaatgacccgttgattgcggctgcaaccggaatgagccagacgcatatagagcttgataaaccgggcgaattctcactgtcaaaataatgctcagcagggttccaagcccacaaacaccggctagaaccaagaatgttactcggaagcaatctggaccaatgcaggtcatcttcccttgcttatcagcctccttgtcatagatgtatcctgcgagaatggccgagaaaatggtggcaccaagcgggtttcccagcagtatgaagttgaagttgattccaaaatgtctaagaccaaatagctcggagatggttgcgatagataagaactgaaaccccatgcatattccgattagagcagtcgcaacgtaaatggtgtggtcgatagccatggcgaagaggaggaatgtgaacaccataactagctgcgcggctcccatccatagtgttcttggaagcgttcttgacctgagagacaaataggagagtcgtatgaaacagctatttcccagagagaaacagcgagattattttagaccgagagagattctcacctcacaaagtgctcagaaatggcacctgaagcaagacggcctatgaagttgaagaaactgaaaagacacaggagtattgttgtgtccttaataccaaaagcaaatccgatctgtgccaagttgttcgagactgtaacacctgaacccatgccgaggaagtagacaaaccaaaggagccagaaatctgccttgacaaaaacttggccaaacttgaaatcctcacctctcctgggttttctcttcttcttcacggcaccttctgcttcagcaagaagtatttccatatccgactcatcatctccctcaaagataggcccaaggtttgaagctgaggtagaaggtgtcagcaacggttcttcatgagtaccttcctctttggctagattgtctgaagaccccagtggagagctcttggcatttgaacggaaaagtgtcatcttgatgggaaccgcaagaggcgacaacaaaagtaacaccatgatagccacaagaacatatttgagtatgctgggcagtataaacacctcactcaaaacagtcgtcacaacaagataagcagcaaacagtatactagtgacaagcagaaaagcgaaatacatgggctcagaagggtcttcaccagtagccggaatacaggggcggatgaaatacatcacagttaagcatataaccggaataccaaccgtaagaaacagaagcagatccatagctgaatggtgaagcaccatgctgaacaagacagtgaatgctgcaccactgatcccaatataacctttgagaagtccagccacagggcctcggctcataggaaaattcctcatattggtgacaagagatgctgtaccgaaccacgagttgctattggtagctaaagctagagctacaaaaagctgtcaacaacaacattacaaacaaatactaaacttttgagttcacacgaaacaatagagtttataaatctaatcgatgacacaaaccaacaagatctaaacttgattaagcattcgatgcaatctagggtttatgaaaacccccaaaataaaggattttacaaacttggtcgttgtatctcattttggcgtttaaggagtatgaagaaacaattcgaatcagaaatttaggaatggataaagttttgttaccagccaaaaaggcaagccaagaacgatttggctgacggagagccaaagaacgccgaagccgaggaaacaagaggaagctccgatgagaagcatcgaccatggaggaagcttgttactggcgtatccaggaagaagacccatgttttcacccaaatcacaagcaacgccaaggatcgtgacctgctgctggctaaaacccaaaaccgatttgagagcggaggagtaaagcgggaacgtcgaaccacttcccgccgagacctgaacccatgcggctgccgctaatcccacccacggtggtctgcttcccgatttttccgccagcttcgtcatctcttccgatctctcttctcctgtgggattttagaaaagtgctttgcttaaacagaggagatgaatcagactcactcactctcactttattgtttggtgtgtttctatttaaagcattaaacatcttcaaaatgacgtcatattttttaacatatttaaagcatacgttatagtagtttcatactattttttaaaaaaaaactcaagaggataaaaagcgtgattcgcaagaggtttagcattacttttgaaactaatcatattaaattcttgaagaattgcaagtgggtctcagttagattcttagtattattcacaactaatgacaaaaatcctacgttttttatttttgttcctattctattttattttttgtctgaaattcgacagttataagaagcactaaccaatcaaacactttccgttatttttttggcttaatttgaaaatttattttatggtacaaatatgtaagagaggaaattgttgtcttgttaagatttttgtgcttgaaacacgtgaggtcatttgactgtgacttcgtcccgcgtggaccgcccgatacatcactttggtattggcatagatcttaacgttcccatggcatatttaaaaaacattatagagtcaaaaaccgacaattacaggattatcgttgcataaaaataaattaaagagggggcctaactttttgtttgttttgttttgactgctacatatggaccttaactaaaatactcaaaaatcttacctactgaggacggaaaaaaaacaataatttgcaagttgaaacggcaggacacctggttctgcaccggcctcgaggcacaaatagcaatccgacacgtcagaatttcacaaatagcaattaggtatggtgcctagctagccccaactagtcgtcgcaattactaagtacatttagtttgggggtccaacggcgacgttcgttgacaaattcaatggctttgctttattgaaaaacctactcatgtcatgtatcttagaatgttcaacattttttctcacctcttattctcatagaatgaaattagtaaataattatacaagtagaatattatctaaaagaaaagtttataatttatatttttagaccaggaaaaaaacatcaatactattatagctatctagtgaagttaatagtctaaataagttgttgatttacagactatccactttctaaaagttaataaaccgagtaaaacaataaaagagcgtttgcacaaaaaaaacaacaaataaaaaaaaattgacgaattcctttgcacgtacgactttatttttaaaaccatatatcattaacgtttccaaaaaaaaaaaaaaaggggtgataatatgggccgagtccataatgggctggctccactaattaaaatctattcatctggatcatagactttttggtttgagatcggtgacgtctttccctgacgaaaatcaaccagaagatgagtgagaacatgactgcaccagagagcgacgcgagtcctgcgtagatccactgacttgtaatgctaagtccagggcagttcttggtggttatgtctctgaaggtgtctctaacgaatgtacagtccgcaatactagctaagaagggaccataatggtccaacgtgaacgccacgttgatcgcacccatcatctggtcgtacgaaccttgtgttaacctcccctgcgttgtgcagattccttctgcgttcacttggcaaatatagcctttataaacctaattacaaaaacatatacaaattgaattaacattaacatttgacatatgtatcacttatgagaaaatgtatgtacctgagaagcattggctaagaggacttcgtcgggagcacaaggccgcggtttgtgattttggtcgagtgggttacagagaagaggaacgagcggaccagactggttgtggtagaaaggggcattaggtgggaactgatcatggttactgacattgaccgtgtacgcattggtcatgtcaacggccgtcgcagtcatcgtcttcgttatatccaatgtctctccaatggttttaggatctaaacacggaagaagttgactcaatgctgagtctgccgctgggtcatgcacccattggtccatagccatacacgtgtccgcaaccacactgtttattaagtaacatcattagtttgataaaaacaaattgaatcttgaattagatcaagtgacgacgaaatatcatttacttgtggaatacaaggaaaacggcgctgaggaggatagtggctgtgacgagaatccaaccaagaattaccaatctgatataattgaaacactgattataaacatttgatttggatatgatatgataatataacaacgtagtctaagtgtaactcacaggtagacaagaactcgcaatccacagaacgaaaacactgtttcgaaagaagaagaaaaacagaaacaaaaataatgagattattctgtatcttcagatcaaaatagatatgttttgatttgtgacttacaaaggccgaggaatgcgactgcgagcattacaccagcgatcacatttaacacatatctcctgaggaaaacgcatttgagtcaaatactcaaacagagcttctatatatatttagcttgtgaggcaagaaacatatcaagcgaatacttattacttacacagggtttagtgctccggtgagataacggattgtctggttagcgacacggtcggggtaagtgatgttagacatcttgatcatgttgttgaaatgatcgatgttgcctctaaactcgggaggaaacaggttgtgtccatcgagctgaatgtctttagcagattgaatcgagtcccataagctcgttagcttagtcaaaactccagttgcttgtttcacaatgtacataaacgtcctctccacgctaccgtagaactcgttttgccccgtgtacagcattgcagacccaatcctgaagataaacgacatcgcgtcacaaattagtaatcttataagattatttgaagttcttaagtaatttaatgatgggttacacggcggctatggtgaagaggaggaggaagacgagagaaagagtgtagcagacgcgagagtagccgtagttgcggcggccacagccacaacagcaacaacagaggcatgagcagatgagaaagagtccgagcaatacgaaccacgcgattgctattactatgaatggaactgcagaaaatccaacggactgaaaaagacaaaacaataaccattacgattttcgaaattttgctacaaagaacatcacatttattttttttttattttaaaatcacgtttttctgtagtttaattttcgcccttaactaaatcaattgctacattatctaccccaaagcatcatactactactaattagtttactctggtttaattgtctaaacgtccacttaagtgtaatcgtttccaaaataaatacaattctatatctttgttgtggtcagataatgttttacccaaaaactgatttaatcgtctaaatgcctcaagaaaatataggtttgacggaaagaatttatttttgacatttagaatattgaaatcaattaaaaaagacagactcacggcgatgtaatgagagttggtaacgttccaaccatcgacataaatattgaaatggttgagagggtcaggtcgctgtgtcctctccgccgctaacaccaatctggtcccattccctccttccaaaatttgcctcctcactcctaaaatcattttcttaaatttttatcagaagccattttttaatcaaatttgtataattgtatccaaaagaaaaaaggggtttctctggtttaaaagaaacaaaacttttaccttgaaatgaggtagaggatggacgatgatgacaagaagacgaaactgcatgagaaaaagaaaccaaactcgacgtgatcagaagcccaacggtgatcaggaggagacgccggcgactatgatatgacggcgtttcgctattaaccattattctccctatttttcttgtctaattctctctctttttttgtttttttgggggaggtttggtttctaatttctgaaactctaaaaaagggtttatcaatcaaacgtatgaataagaatcttttacttcttcaggaaatcaaggacaaagaagatgaaacgaaactgttccctttatttagattttcaccatccattgttgttattctgttttgttttaagttttcacctcattttcttagtttttaaaatccttaattaattactcttttaactcttattggctgtgtgacctaaaacttaaattaatgaatcacatttttttctataaaaccgattatacaataaaattgaaatgaaattggtaaaaatactttatactcagggtcgactcggagattagaaaaagaaacggagaatggcattaattaccaccaatactgacatgagagctactctaattttgtaacggaaaattgcatttatgatcatctggtaccaacttttcctgcttttgctctgtcatggcattttctaaagaaaaatgttgtaactaagattttttttagaaaattgttacgtcatgtctgcataatctttacaaaagtaagctaagattaaaagtcgtattctttagttgaatttttttcaaattacaataataacgccatattctccaatggttttaagaatgtgatccatgatggatcatccatcgtttctgtagggtgttttattgagcttaacgatcttacaaaatagccacaaaatgcctgtggttgtcacagagtggaacaacaacaaaaaaaaattaagttagagagtgaattacaaatggtacgtatatgtagtagaacacatataggaggcgacaaaccatctttcaaaaccaaatcttcggaatttggcttaagacacacaactcaaccagatttctcaatgaacctcagtgttttctcctcggttttgagttgaaacaaagccactttatggcaaagatgatataccttggggagatttctccatccaaaaggacgcttctctattgcttcatgtctgttttgaacacataaccaaagagtttcttcatatctagttatctattctctacagacaagcgtttcgtccaaggacttttctaccaactcaggccttctccttggagatagccctctttcgatcatttcctcctcatattccctagccatatccaacattcctttctgaatcaacgcatcaatcacagcattatacgccgctgaatcaggagtatccccagactctttcattgtcttccacacatataataccggctgaagaaatccccatctctcaaacttcctcattagcatcacataagtatccatctttggcctcactccactccttatcatcctaccaaacagacttaggatctcactcggtttctccaaacgggaaaagagacacatgtaagtaatcgaatcgggttgacaacctctcttaggcatctcatcaagcatccgatacgcgtctctcatcctcccgtcttcacatagaagcttaatgattgtgttatgagtcgcaacattaggttcacaacctctttccctcatctcccgaaataccctgataccgaattcaacaccttgcgacgctccaatggctcgaatcacagtgttataagcaaccacatcgagtttcatccttctactcttcatttccttatacaacttcacagctttccacggtttcccgctcttgcacatgatatccatgtaaatggaatacgaaaaaagatccttagtaacaccttcagtatccatcttcttccaatactccttgcatttaccccaccatcccaatttcgaccacccacgaagaatcagattatgaatcttagtattactcacactaaaaccattaccaatgacattcttcccaaaacaaagctcttcagcttcaaccacatgtttatgctcgcaaagcgcatcgaccagattataaaatgatgtttcatctctcaaattgaaatcatccaatttatcatacgcatcaatagcctcctgaacaagatgagccgtcacataacgcttaaagactatacgaaacgtgacgtgattcggcacagattccgtgtttccgatcatgcggttaatcaaagcccaagaaatttcaaactcgaaatacttacccagaatatcgatcacccgattgaatgtctcggtggtatgtctgaatccggattctctctcgacccagttgaaaaactccaacgccttttgccaatcgttgctgtaacatgtgagagcttcgcatactgttttctgatcgtaactggactgatcttcttcttcctgagatcgaaacttcgcatcatcgacatttgaaataggttttactgacagaagccgaacggagtaaggggaagcaatccgaactcgattgagtcgccgcaacaagagcattctcttgtttcccctctccgctccctgtacacacgaaattagggttcatcatctaacgggcgaattttgacccgaatacccattttaaaatctgacccgaataccatttatgggcccaaagcccgctggacttgtgttaatatttggaacatttgggccgatctatcttctacgaatctttcttaggcccatcataattgagccatccagaggtgaaaataaataatcgaacggttaatattggtttgattataaacacaaaagttctttccaggtctccttgtagtctttgttgtagtaaatggcgggagtcatccacgtcagcagtacccagattccggttgcgtttatgtccgcaaccaaacagagctttaggagagcttctgtgatcagatgtgccgccaacactccaaagaaacggtacaccatcgcggttcttcccggcgatggcgtcggtaacgaagtgatcccagtcgctgttgacgttctttgtttagctgggtctcttgaaggttccttctttctcatcctgttgcctaatttaatttgattttcccaactgaaatcgtgtttttggatatcagggatagattttagcttcgaggagttgcctataggaggtgttgctttagatcttgtcggagttccactgcctaaggaaacattgatcagggcaaagcaatcagacgctcttcttctcggagctgttggatggtatggtattattaccataactttcgttcatctcaagtttggattcatctaaagtttggatttttgaattgaaggccgaaatgggataacaatcccaagcatttgaagccgataacggccttgttgcagcttcgtgcggctcttcaagtatttgatgagccctccttcttctgtgaggtgctgctaataaatggatatatatatatatatatatatatatatatatatgttgtatgtggtaatgtaaggtgtccatttacaaaattaaaaactttggggtcaattctgaaaataaaacaatgtgcaaaaaaggacccataaatgcaaagaagtaaagtctgagtgtactagtagtatccatttgacttgcggtttcaaaatccgaaaaagaccaatcaatcctttctccctgaaatggcggcggctctgcagacgaatatccggacggtcaaggttccggctacgttcagagctgtaagtaaacagtcattggcaccctttagagtaagatgtgctgttgcttcccctggtaaaaaacgatacaccatcactctccttcccggagacggcatcggtccggaggttgtctccattgccaaaaatgtgcttcagcaagctggatctttggaaggttctctctctctctcttgttccctttcttatttaatttagttgctgtttcatttcaattggggactactgttttctgcttggaattgaaagatgtgagcattagaaattggcgagattttgaatgggatttacaatcgtgggttgggctcaaaggccacggagattgcctaatacattgcgtctgtgctctgtatcaggagtggaatttaacttccgtgagatgcccattggaggagctgctttggatttggtcggagtgcccttgccggaggagactatctcagctgcaaaagaatcagatgcagtgcttcttggagccattggagggtctgtcttctctcttttcccactaatcttgttggctcttaattattgttttgggaaatacagtttctcatttagtcattttctcatgttggtataataataacttaaggtacaaatgggataacaatgaaaaacatctgaggcctgagaaggggttacttcagattcgtgcagctctcaaagtctttgcaaatctgagacctgctacagtcctcccacaggtgaccatcctcagagatttcttggttgcctgaactttgtttcttgtgtgaaactctaattttgttgtttttatacagttagtggatgcttccaccttaaagagagaggtagcagaaggtgttgatctaatggttgtaagggagcttacaggaggtcagttttattacttattaaaaattgatcgtaattcttgtctttctcgtgtgacaatatcttataaaatgtcatgtctcatggtaacaggtatttactttggagagccaaggggcataaagaccaatgaaaatggcgaggaagttgggtttaatactgaggtttatgctgctcacgaggtactctattgaaaatctcagatgcagatttccgtggactgattgttaagtactagggtcaaatctaataaagcattttgtatgttcgtcagattgatagaattgctcgtgttgccttcgagactgctcggaaacggcgtggcaagctgtgttctgttgacaaagctaatgttttggaagtgcggttgataattatgttttctttgacttgttttcctctctcttgtttcctgtggaacgaacataacactgaatttttttatatgcaggcctcaatcttatggaggaaacgagtaacagcattagcctctgaatatcctgatgttgagctgtcacatatgtatgttgacaatgccgcgatgcagcttgttcgtgacccaaaacaggtacgtgtactttgtatttgccaaactagtcagctttgatgtgcgacaggtgtaaatccttgcaattatttgattgtttgataaatgcagtttgacaccatcgtcacaaacaacatttttggtgatatattatccgatgaagcttcaatgatcacaggaagcataggaatgctgccatctgctagtctcagtgattcggtatgatataaaataatatgatcttttagtatgcaagcagtatgatctagtctgaacataaacccgccatgtgtaatacagggacctggactctttgaacctatacatggttctgcacctgatattgctggacaggttctaactctatccttcaaacaaacacggtttttgttccctgatatcaaaactagtttaatgccaaaatcaaagagcacaacttgttgattctttgaattttcaggataaggcaaacccattggcaaccattctaagcgctgcaatgcttctgaaatacggacttggagaagaaaaggcagccaagagaattgaagacgcagtgttggttgctctgaacaacggattcagaactggagacatatactccgcgggaacagtatgtttcttgaaccactcttataacatgtttccttttccttaaaaacgtcccgagttagtgtttgagaaacgtttaaacaagcaggcaacaacaaacagtagtaatatttttttgtctttttgtatggggtatgatcagaaactggtgggctgcaaggagatgggagaggaggttctgaagtcagtggactcccaagttccagcttctgtttaatatttgtagaaactttgaagagttcatttccaacaacaaatgttgtaccttgtactcaaagagtctcggttttattagcgatttttataatgtgagattattagagggacttatttgatcgaactgaaacgttgatgtttttttctgagaaataaatatccttgtggagataatgacgtgtcagagtatcactcaaaaagccaaaaattagagagacaaaaaagattcaatctcccccgtagtccttatccggcgccgagtgtggtcaaacgtcgcaagagttttcgctctttccggtgagatctttttcctctgatttctgtttcatggcaagcctacttttagagctgagtttaatcgatgaatcaaggatgtgaatttttgttatttcttgattattcattattatgttcaagaaatctaaatctctgcttgggaactaattcacaatttagacatctctgatgagtttttcctctgttttttatttctatcttatcaattttgtttctggaaattttcatggctttttgaatgttcattgggattgcgtatcttggtggtggtaagtaaaaagtcaaacgccttcgtttttctgcataatctctgagttccatcaaagctctgttttgtgttttcaaggtggacttttcacttgacatgttaggctttgatccttttttgttcacacagatagacaaatggatgaattgccagaccatttggtttgggacattctcagtaagcttcatactaccgatgacagaaactcgctttcactctcatgcaaacgtttcttctcgctggacaacgagcaaagatactctctgcggattggttgcggtttagttcctgcatccgatgcattgctttctctctgcaggaggtttccaaatctttccaaagtggagattatatactcaggctggatgtcaaaacttggcaaacaagttgacgatcaaggccttcttgtcctgaccacaaactgtcattctctcactgatctcactctgagcttctgcaccttcatcaccgatgttggcataggccatttgtcgtcgtgtccagagctttcttcgttgaagttaaatttcgctcccaggatcactggttgtggtgtgttgtcacttgctgtaggatgcaagaaactcaggagacttcatctcattcgatgcctaaacgttgcaagtgtagagtggttggagtatttcggaaagcttgagactttagaagaactctgtatcaagaactgcagagccattggggaaggtgatttgatcaagctgaggaatagctggcgaaagctgacaagtctgcagtttgaggtagatgccaattacaggtacatgaaggtttacgaccagttagatgtggaacggtggcccaaacagttggttccctgtgacagtctggtggagctcagcctcggtaactgcatcatagctcctggtagagggctcgcttgtgtgctgagaaattgcaagaacctggagaagcttcatctggacatgtgtaccggtgtcagcgactcagacatcatagcattggttcagaaagctagtcacctaagaagcatctcgctccgtgtcccgtccgattttactctgcctctcttaaacaacatcacgttaagattaaccgatgaaagcctcagcgccatagctcaacactgctcaaagctcgaatctttcaagatatctttctcagacggtgaattcccttccctcttctctttcacactccaggggataatcactctgatccagaaatgcccagtacgcgagctttctcttgaccatgtgtgtgtattcaacgacatggggatggaggctctatgttcagctcagaaacttgagatcttagagcttgtccattgccaagaagtgagcgatgaggggttgattctggtgagccagtttccttctctcaatgtgttgaagttatcaaaatgtctgggagtgacagacgatggaatgagaccacttgttggatctcacaagttggagttgcttgttgttgaagattgtcctcaggtttcaagaagaggtgttcatggtgctgcaacgtctgtctcgtttaagcaagatttgtcatggatgtattgagatcgtatgatttgcttcctatgtacaattttactcatgtgtaagtaagtgtaaatgttcgatctttgggacagaaaaattactaatgcctcagtgatgatcaagtttaaaatgacgtcatagcagttgtatataaacagtcatggatgatgtaatgttgttactctttaatttaatggtgcgttttataaatatagcgtcataataattaattgactgatgtctttctaatccatgagctaatcttatcaagtcgtcattctaaagatttttaaatattgatattgccacgtcaaaacgcaagtagtagtacttgtttgatcagttagagttcaactgggctgacatttttagatcttgtgtcggtaatatataactttcaccatctttcttaataccaaacgtattttgttctatagaaatttctgtcaaatgttatgattgtctgtctactaaaaccacatatttacgtttgaaacctttaattttaaatcctttattttagcagataaacatactcctttaatagtagcttttatatgattcctttaatatttggtaattagttgaagaagtgtgtaccctaagcgaaattgtaatcagacaaactgtgtgtctattgacgccagcataagtccatgaagagatcacgcgcgcgccttacgtaatcaaaacggatgtcaattcgaccaagtcaaatcgtttggagtctacagaacacgatttgccgtttgatttaatgggcctatgtctttgtcaaggcccaacttataccgtattatgcaagttgtcagatacacgagaaaatttgttactgtatggatttatgtaaactcatgacatttgcgacagcaataatcgtggctttgcataagatgaaaatattctcagatgcatagtattattaggatcaaagttctataattatttccttgttcttccatgaccatgtcacttattttattcaaaggttgataataccaatcagatgtctgcaaaataaagggaagattataaaacttttaaatcaagatttaagagtgtttgtctacctctctctattgaaaacaaaaggtacaaactttgtctttgcactgtgaagcacagatgtgcataataaatgtgaaagattttactgtctcatcgaaattgacagcagtatcttttaattattccactaaacaaaaatacttttaccataatatttttaattaggaaagaaaactttcaaatgaaatcatctttatttacccccaattataaataaatggtaacgaaccaatcatttttttgcatagaagctttctcacctttataaaatagaaaatggaaaacagctacaccgttgatggtcaccgtcttcaatattccgttccgttaagctccatgcatgaaaccagtcaaaactccgaaacttacggattatccaaagagtcgccgttggtctgcatgcccttgttcgaaaccaacactacttcattcgatatctcttctcttttctcgtttaacccaaaaccagaacccgaaaacacgcatcgtgtcatggacgattccatcgccgccgtcgtgggcgaaaacgttcttttcggtgataaaaacaaagtctctgatcacttgaccaaagaaggtggtgtgaagcgggggcggaagatgccgcagaagaccggaggattcatgggagtgagaaaacggccgtgggggagatggtcggcggagataagagacaggatagggcggtgcagacactggttaggaacgttcgacacggcggaagaggcagcgcgtgcgtatgacgcggcggcgaggaggcttagagggaccaaagccaagaccaatttcgtgattcctccgctttttcccaaggaaatagctcaggctcaggaggataataggatgaggcagaagcagaagaagaagaagaagaaaaaagtgagtgtgaggaagtgtgttaaagtcacatcggttgcacagttgttcgatgatgccaattttataaattcttctagtattaaaggaaatgtgattagttctattgataatcttgaaaaaatgggtctagagcttgatttgagtttagggttgttgtctaggaagtgataaagcactcgtagttaagtagttgtagttatttcattagcaatattgtattattttcttgcttttgttgaattaattttatctgtagtacttttgtttttgtctgttggagataaaccgtaataagtagtgatatttgtttattatccgttttgttttactttagaaacatgactatatatacgtctatatacattggtgtaatattaatggaactgaccaaagttccagtgtctaaataaaatatgaattgttgggtcatatagaggtagttattaacctaggatatagaagctgactgcataaatcatgggttcagtaactttttgatgaatagtaaactatatagctcttgtttctgcagaagaactggttattagctacgcttagctgaaactgaaggctacaaaagctgagtaagtgaacttctttgcaaatactgtacagatttccacagtcatcatgtatacttgtgtgtgtcggtgtctaatcccaacagtaaagttattcactgattcggcccaaaactgagaatcccatggaccatgactacaaaatattgactataaaactcgtcttgttattttacttaccttacatggataaattagggtttagggttctctgtctgttgatatatatatgctttgattttatcctcaagcatggtgaatttgattcaaaaaaacttagggttcgggtattaagatttcaattgaatataatcctttttatcagaatttagggtctccaatagagccgttaaaggtcccgtctggcgtaaggtaattggatttctgattgcggtttcaagactttttttgtttgtttcgtcttctctctcactgcatgtgtttagtctgcggcggctatagacaatttgtcaagtataattgcgtccaatagtgtcttaaaagtgttttttcccgattacaataaattataactatgaaatggtcggtcggtttacgtgttttcttgactgttagtttcgacatcagatactcatgaaagagtcgttaattggttcaaaaaatggtgttcttccaccaccttctaactttttaaatttaacataagatagaataattgtgaaaggcatgcattcactggttgattaattataagtgtgtctaatattagtcttaaatcttaatttgactaatctaagagtatttggctatatacataaactttaggaaaggagataaatttttatattggatgatattccaagattgtgtcaagctttgaaccgcttaattggacttatacaaactcggttggtggttgatgaaaactttttacagatcatataatccaatcattattcgaaaagaagaaaataacaaaacggaaaacaaacaactaaacggcatgaccgtcccacagcccaataacgttgaataaaatcactcaaccaaaaaaaaatatatatataaaatcgtaaaatttgattaagcaactattcagctatatgagacaaaacgtgtagaactgtggaaggttcaataacgtgacgtcctaagatgacgtcgttttagtgaagtcatctacttaagagtttcatgttataaaagcctaattcatcttttgtttttcaacgtcggcggatgattacgctttatgaattagaattttttttaaaaaaaaattagaactaaatttatcgtgaaaaggttgatacataataaaaaaacattgggtgccatcaacaaattgttgatttctgatattaaacgacgaagaaatacatcactgataaaacttccttttacaaaaaaacaacacgtaaatcaaaattacaaaacatgaacatgaaaagaaatgaagaatgaatcattcattctccaccataagatcgaagaacatgaaaagcttttaagatttattaatgttcaatcctggaaagggttctaatccaaagcagcaacgttctccaagtacatcagggaaaacatcatacgcctcatcttccatcaaatgctcgttaatatagttcaaaatatggtcgtctgtgtctttatcctccatggtaatttcttgggaatcaattgataaaggttgaggcataaccgattcaggaataacatagtcgaatttgatcatttttgaaccgtatgtaccaccattattaactgcataagctggagcttcacatgcatgttgtccgacataggtgtttctgtacactggaggattgtcttggatcttctgtacccgcttggtagcgtcgcagttttggtctttcgcataggcacatcggtagtaccacctgtaaattttactctacaattagtcatcgctcaatacacactctagaaaatagctctgtatttgtgaaaagagagcagtagctatgtctttctaatctacttaattaactaacctttggtgcggagaggttttgatggtcttttgtccatatttcctccagatgaagccatcaatgtgggccggtgtcggagaatcttccataccttgtattccacacatctttctgcaatgttgtatcagagcaatgttcactaggatacttgcatcgaaagtggtagaagaaatagagtaacatagaccaaaacaggtgtgtgttttctacttgatttagagtttttaataatttacttctttgatgatctttgagacacatgacgtggtatgttctgagaagacagagcaaacgagaaagaatcaagaatggagttgatgagtggctctgttgaaactgagcctgtttcatggtttttgaggagcgtcttgagattgttagcgcatccttggccaaggaggagtgctgagacagccttcgcatcaatctcaagagacatattttctgtttaggataattcaggttaatctgttattagtttatatagagatcagcaaaggtttctacttctagagacataaaacattgttttctttttaaaaaaagaaagtggaaagtgtagccttatcgaataaactatccacaaaatgtgtaaagtgtaaacgcaataaaagtaacttggcgccatcaatgttgacatttggtaattcacaaacgtgtgacgagacgacgtagttggaaggtcttgtgcgattgttagcctttaaacaatcaataacattaacaagttaagggacacttcaaagtagccagacagcttgaggtcaagtctaactaaggaaggcaccttcctctcacctaatccaacagactaattatatttaatacacatcttggtctgttggacatgaatcccatggaatatctctaggtagttattaacctggatatagaagctgggtgcataaatcattggatcatgctttttgatgaatagtgaaccataggacttgtttctacagaagaacttaggaacttggtattatatagtgtagctgaaactgaaagctacaagatttgaataagtaagttctacatatacactaacacagtcatacatacatgtgtgtgtgcgtcaatgtgtgatcccataagttccgctttgtagcattacaattttggtcttccgtagaagccgcaacgattgtaacacctcgcaattcatgattatcaataatttcagctaataaccatgtattaggcaagtgtccgccacaaaaacagagaagaacaataactctgttcgttaacgttagccataaaacagaccgtaacaaatagcgaagcagagcatgtgctctgtttttttgctttgtactcattactaaccttataggaaatcttctcttgctacacctgtttattttcatcaatgctaatactatattacataccaaaaccctacccctgcaacagtaaagaactcctaatggcattattaacacagacatagtgagaaatcatcctaagaccctcaaaaatcaatcatctgtaattaattaacagaactaaacgccaaaattctcgacattagttcaggatcgcctaaggccctaattatcattttttaaattagacccctaagattcttggttgcgaccaatgcatacactgccgataaattggattcacgtctttccaatgctggttcgttggatactctaccaatatttctatcaccgttatcatctatgtgctctgattcctcacgcagctcataaccagcatgctataacgcaagacggaaacaatcgcgatagagacgtcatcgaaccaaccatggaaattatacaagtatttagattgaacaattagttcatcaagttttgtgtcaaattttatttcttttcaattgtgcagagcatctttaccggtacacttgaggctaatttaagacaagatcgaatataaaacattagctcttcttcaacaccacatcatttctcttccaagaacttcaatcaagcgcagtcaaattttgagacatgatctcaaccgcacgttcgatttcctcctctgatataaccaacggaggaacaatcctgacgacatttcctttccccgctgtcaagatcagaagacccgaatctcggcaagcatcaaccagtgagcttgccggcacatcgagctccactcctatgataagcccttcgcctctcacttccttcacgtgcgagtttcctccaagttttttcaccaacaggtctctaaagtatcgacctttatttgagacactggacaagaaagagggtttcgatactttatccataactgcaatggctgcactgcacacaagagggctgcctgcaaatgtacttccatgatctccgtagtttatggtctctgcaaccttttcagtcaccagcaccgctccaataggtaaaccaccagctaaaggctttgcaaccgtcattatgtcaggagtcacaccgaaggcttcataagcccacatgagacccgttcgacccaaaccacattgaacctgggacaatgaacccagttgaggcaagaccaatcaaaaaacagaaacaaagaaagaaaataaaattttggatggacggtagagtatattacctcatcgaagacgagaagagatccagcggcatcacaagcagagcgcagagattgcagaaactcttttgtagcagagtaaatcccgccttctccttgaattggttccacaaaaactgcagctattttacctgagcggataaggtctgtggctgcttgaatgttaccatattctaagaaggttacaccaggcatgatgggttcgaaaggagttctgtattgttctttgcttgtcaaggcaagagctcctaaggttcttccatggaagctgtttgtaaaggcgatgaaacctgtcgcgacttctttgtcttctggatgggtgaatctctggaattttcttgaaaacttaatggctgcttcattggcttccgttcccgagttacaaaagaatacacggtctgcaaaagaactcgccaccaagcgttttgcgagctctatctgcagagaagttcaaacatttcagattttaacaacccatatgaagtagatatgagcataaaggttccttttttcgaggaattgggcattgaggagcatatgtacactaagagtttacaatgaggtcagatacttctcataaaaatttctatagggaaggcgtagaaacaatccaatttgatgaaatttcaaagtgcaagtacttgtcatagaataatctcgctattataagtagaagactaatccaacattccctagcatgtttccataggccatagctcaatcacacagaggataaaaacaacaaaagttttaagctttcgtcagccatcaacagaatcagtaatgcaaaaatacagtaacgaataaatacctgagggatcgtgtaataaacattgctgacatgggcaagaacaccagcttgctcagtgacagctcgaagccaatcaggatctccatgaccaagagcattcacagcgattccagatgcacaatccagatactcttttccttcagggtcgaacaatttacaacctttcccactcgagagaaccactggagctcgcgcgtaggtacccacaataactttggcttcctcttcaatcaccttctggctcacactcgcttttaccgacaccgcttggtcccctgcgttagtcaatacgctcgcaatccggccgttgaatccgatccgggttctgatgatcggccgctccaatcgacggcgtaagaggccaatctccgacgacggcgcgcgtggcagggtgatttggctaagagacgccattttcgtgtgtcgggacaataaagagtcgttaagacaaaatagctgagattaattctatttctagggttttaaggccagtgataattttactactactggtttagctgagcttaataaagaatctgattagtatcttactttttccgtaattacgtgtttttagtattaatggtttgaaatttctaaattatttataacgatgaaaaagaatgcaagactgcagatattttttagtccatcaatcataatacaaaatatagtaaaatgtttggaacgtgttacactgattataaatgtcgatgtaatacatcttaccagagataataagaaagaacaaacaaaaaaaaaaaggtgtacatctattatctaagtagataattacatctcatcctaataaaatgggagaaagataagaatcatttaggagattggcagaacaaaaatcttactaccagctaaactagaagatattgttaacacacttaaccatagtctcgaaccacttcaccttcaggcgaatcttcttcagcttccaccgggatatgggtgaaggatatataggattaatctacgttcttcatattcatatagttacagttcaaaaaacatgtttgtggacggaggaggtatagtggtatagtgttgtgtaatgggaaaaacaaaagaatgatatgcttgtggctcgcccgttcagcagacaacttcagggctcgggtcgttatctagaggcatgtttaggtcagggagcaagaaggaagaaccttgttcgaaagtgagtttgcacgataaggcagattgtgattcagcctgcatacacatgaaaatgatatacttgaataattaacatgtttatcttccgtatatatgattgaatgagtacatgtatagaaagatagagagagagagagagagagagcgatgggctcaccttcatcttctttagagcagtgtttcttgctctttgttgctcgagcaaatcgcgcatatttgccaattcctgattcaagaataagattaaccaaatctaagattagaacttggacttgatatatagagacataaagaaagaggctaaaatggaggttatacatttttcaggccgttactttccttcaagagcatgatctcttcctctttaagctcagccaaagtctgtcaacaatcatatatattaattagagaaatataggtttgaatcggctaaaatgtaaaaccatatcagtccaaatgtagaaaatataagattgctaggcgtatcttagacaatatgcctcaacagatttaaacaaaccagtaggtagtagcctggtcagagttgctctatgtctggtctaaaactagtaatattatcttttaacagtatcagtaactaatagaaacactgtctttcgtattttttaccttcttctttcttgatctcttgaaaagggttgttgttgttgttgttgttattgcactcgtttgagaaatctggacatcaaaacaaaaacaatcagattatggcttaagacacacaacaccaccagataaagccagctcaacaatcaataatcacaccaaactaataccgtaaaaacaatttgtttttgtattgtatatcatttctataaagaaaccacacacctaccattcgagagagactttagaggcacgataagttggaaacaaaagaatcacttcatcagcatattaacaaataacaactagaacttggaaatctaaaagaaaattccaaatcatgtaaatttcagcagtatcttcttggtcaactactcaaaaagaaaaaacagaagggcaaataaataaatatatagaaaaacatagaaacacgtgagtggagcgtgacttgggagacttttaaatataaagcgtgtgtgtttggtcgtcacattcacacgtcatgcttttccttgtcctccaaccccaaactagtgtcacgtattctccacaccaccacttgtccttattatctatcatctttctatttttattttattctacccaaaaattccatttcctttagtttgacgactttactttggttttcaaattataacccaccgatcaaagtcaacttcaaatcagacaacaatcttaactaaactttgtaaaaaaaaaagtaaaacaggctaactcaacaagactgtcaccaagaaaatctgacggacgaatcacaggacctaatccgttgcaacaactgaggactttgaccactactactagagaacgagtacatactacttattgtccactgcgccacatctgataactgctctccccactaaaccctaccacacacgtacctaatccactcatactctaatcttaaattcaattccacgaaaacgcctcccaaattataaataacgccagcgataatctctggcattgactaatataccctctatcgtgagaagcagctaacctggtgacaagggttaatttagtcattagcttggtaatgataatgaatgtgtttattttttctctttagcattgaagtctacaacgctgatttgacccagaagacctctcccctctcccttgatgtgagggctttgtggtctttccgcaaagcagcatagagagagagagagaaagatgactgagatgcacaaaagtgggaaaacgtgactcttttgttgccaaaagaaaagagcaaaaagcagagatcaccgaatttatcacctgtttgtttgaaactcaaaaacaatctaacaagtgtttccaagaagacaacaaaagaaatcgagaaagatagattgagtttcttggaaaagaaaagactaaaaacatcattgcctaaattggagttgtgtccacgctgggggtatttcggtcaacgaaaagtcggtgtacctacatgatcagcttaagaacacgatcgtggatcctaaaatgaccaaaatacccacaagctaccaactgaaatgtcaagggcgtactcggtagtagatcagcccaaaccacaacaaagacgcttaaaattacgtttttaaaaactaaaatcatgacagtgcaaaacgccgcatcacgagggctatagcagaaaacaagacctacgagatatgaccgtcgcggagtttcaaatcggataaacaaaaaaatgagtgaaatgatcggacaaaccttagatctaaatggctcagagggttttacggcggcgctagactcctcgaggccttccatggtggtagcaccggcgccgcttccaccgctgccgcctccgccgctaagagacgtggcaccgctccaggaaagcggtgtggtggggcttgctcgcgtctggtctcctttcttcgatctccgttgacgcacgctccatttcagcttgagaggggacgcgtcgactctattcttcggttcggagtggcggagccgaagaagcgcctccgccaccatggaatcgtcagacatggccactcgaatccagttttcgccggacatagtcgcaactcaaagagagagaggagagatgggagagatggtggcgaaaaagtagagaggaagatatctctgtggcatagttaatgggtggatttgtatatatatattgagttttattgcacagttagatatattggaattaacttatttttcttctcttgataagtgtaggaccctctttaagacatacgtggcatagatcattttgtggcttgtgttggaatagtagcagtaggagaatgaaggtgatacacgcgcgacaatcgactgatgatgagtgtaccacctccgtccatattcaaactttgggaattccactatttagatgctacggtatcatgagttggaaaaataaaaaatgtcatgctagactaatcaactacattacattagatttatacatggcctatgttatattttagagactacatattagtattttcatgttaatttgtgattggatacaaatacgatcaggtatctttttgatgtttgttgcctcgcattcgtgaccattcaatttcttggtcacgtcaactccttacttgtgatcttcgagtatggtaattaataattataagactcatactagaataatacagttcaaaattaaataacgaaactaacaaagaattcctttcagacaagaaaaaacaaacaaccaaacttagatcatattcatatcaaatagaatatcaaagctttttataatagaataatgatgggatataaattgcatagttaaaatgggatggtatgggttgaaacacaaatagaaccatacaaaaatagggttttgaataagtttttgtagacacgtatcagttgctagttgtactttgttagaacaccaaattgtaaacaacacatgtcgtgacataaacgtgttcgtgcaatacacattcttatgttaatcgtatcagtcgaatacatacgtctctctctcgaaaagtagttatcggttccgattgtacgaaagcagtcagcaaactaccattttcgtttcgtcaacacggtaacatattattcattaatatgaaggcgatgttaacatttataaaataaaatgctactttccttatttcttaaccaaaaaatcttaatcagtcgtatgatattgttgttatctaatttaatcgtagctacaaagattttaaagtgcctcataagaacctagcgaatcaaacctcatgagctcactaacgtaacatttactcatctcaagtctcagtagtgatgatgatgatggtcagatggttttaaatttgactttcacttttaccgaaagcacataaaaccgtcccttctggtttactttatcgcgtgatcaattccggtttactagagaaccggactgagaccattttcatttggttccatctatgatcaacatgtacccaccataaaccctaaaagctcccggagccgccaagatcagtttccatggcgcttcatctcgccagaccaaaacanaggttacattcgaatccatctctcattcaccttttct

SEQ ID NO: 1261 - DNA, 89811 bp, Arabidopsis thaliana
aagcttactgttgacaagagcatggttgaggtttttgtcaaagacttggacaaggatcagcttcttgtgaatgcagcaagagcctctagagttgaaaaccaagatgctattgatgcttgcattgtaggaatgcttggagatcccagagaagcaagagaaggcatcactgaagttcatttctttccttttaaccctgtggataagcgcactgctatcacttacatcgatgctaatggaaactggcaccgtgtcagcaaaggcgcgccagagcaagtaatacaaaattcatttccttcttctctcaagagttttcaaattctttcccactgattattctctgtaattcttagatcattgagctctgtaaccttcgggaggatgcaagcaagagagctcatgacatcattgacaagtttgctgacagaggacttcgttctcttgctgttggcagacaggtataatatttagtgccagtcccaaaactttgggattcatttgtgtttctttctcttttatcaatgctctttttcctattttttgaatttcagactgtctctgagaaagacaagaacagccctggagaaccatggcagtttcttggtctgttacctctctttgaccctccaagacatgacagtgcagagacaatcaggcgtgcccttgatcttggtgttaatgtcaagatgatcactggtgaccaacttgccattggtaaggaaactggtcgtaggcttgggatgggcacaaacatgtatccatcttctgctctacttggacaagataaggatgaatctatagctagccttcctgttgatgaactcatagagaaggcagatggtttcgccggcgtcttccctggtaaaaacaatcaaatcttctaccttcacaagtggttcaactccataaatttaactctgtttcatctgtctgattagaacacaagtatgagattgtgaagaggcttcaagagatgaagcatatttgtggcatgactggtgatggagtgaacgatgccccagctctcaagagagctgacattggaatagctgttgctgatgcgactgatgcagcaagaagtgcatctgacattgtactaaccgagccagggcttagtgtcatagttagtgctgtcctaacgagcagagccatcttccagagaatgaagaactacacaatctatgcagtttcaatcacaatccgtatagtgatgggatttatgcttcttgcactcatatggaagtttgacttctcaccattcatggtcttgatcgttgctatcctgaatgatggtactatcatgacgatatcaaaggacagagtaaagccttctccacttcctgattcatggaaactcaaagagatatttgccaccggcgttgttcttggcacttacctagcagtcatgactgtagttttcttctgggctgcagagagcactgacttcttctctgtaagagagttctatcttacttttatgaccagctcgagtaagtgtatgtgttgatcttcagttttctcttggtgcaggcaaagtttggggtgagatctatcagtggaaatccgcatgagctaacagcagctgtttacctacaagttagtatcgtgagccaagcgcttatctttgtaacaaggtcgcgaagctggtcatatgttgaacgtcctggcttctggttgatctctgcctttttcatggctcagctggtaagttaaagattcagtactcttacataagaagcttcagtatatactgacactgttgttgttttcattccaagattgctactttgattgcggtatacgcaaactggaattttgcaagaatcagaggtattgggtggggatgggcaggagttatctggctctatagtatagtcttctacatcccattggatatcctcaagttcatcatcagatattcactgagtggaagagcatgggataatgtcattgagaacaaggtttgcttctcaggccaatactgatgagaacaagaacacagtagtataatcctttttcctaacctttgttcctctgttcagaccgctttcacgtcaaagaaagactacggaaagggagagagagaagcacaatgggcacaagcgcaacgtacacttcacggattgcagccagctcaaacctcagatatgttcaatgacaagagcacttacagagagctttcagagatagctgatcaagccaagagacgagctgaagttgcaaggcaacgctcaagtaactgattattccataccattaggttcctcagaaaatgggcttacaaacatttcttgtcttgtaaatttcaggttaagggaacgtcacaccttgaaaggtcacgtggaatcagtagtgaagcagaagggactagacattgaggctatccagcaacactataccctgtgatttcagaaacaagtgtttctcagtttagttttagaaccccacaagagtattgaataaataaccacttccataattagagaatgctgcaaaaagaaaattgtttcttttgttagcagtggatgtggcttcttctttttttatatttttgagatattcttgttttttccttttttacaagagtaataagatcttacaattacttagaattcttgagtaagtttcttctagtctctgtccgcgcaagagagaatgcaacaaaaccaaaaaaaaaaagaatgctcaaatcttagttgcaaatgagaaaaatcagtgtttcaaatctcactgaactgaattccctccttcagtctaaccagacaaagtctccaaagctttctctaacttggatgacttgagctcttctattccataaacataaagataaagataaaggctccttactaaggagaaatataatggcacaaagtttgaaagaaaagttctgatacagatcaaaactgttacaacccatagagctataatgaattaaaagataggtataatatggttcaagcttccctcgttagaactaactatagatggctttactaaactctccagctacttcatatcgactaaatgatgatttactgatgcggctttgtcttcacatgctcaagataccaaagcgctccttctgctgcatgctcagcagcagctttctttttgcgtctgggatccccaaaacactccaaaacagttttccctgaagaatctctaatctcaaccataactttgtatgtaaatctgaaccaaaaaaccaagttgatgcaaaaaagattgcgactcaaaaaataaaagcaagtgcaggttagaagatgtttacttacaatctcaaatggcaaggtccatcaacattgcagcattcataaacaggaggtctccaacgcttggaagcacacatttcgtgtaacaccgatttagctgagcctctcctagtcttagattcatcatctggaacacaaatttcagaacaaaatgaccaaaattctatcttctataccaaaaattgcaatctctgttggtttccgaacaagtttacatcataattagcaaaagaggtgaagaaaaaatgaatgaacctttagatatgggtttggtggtggtggtgtgttcttcatctggtttaggagcaagcttcttctctagtgaaatgcttcttgtgctgttaggatcaatttgaatgttagagaaggaagaaatggcattgtcttcttcttcaaacttgaagtcagtcttctcttggaatctctgcattcccacattatgatgatcttgcgccattggtttctaacaattgacagaagcaaagttgagatatttattactattaacccatgatatagccaaatcacagaagaagaatcatctacaaatagaaaacgcagagattgttctctgtttcaaacccagatgatcaatttttttgttagcgagaaagaagagaatatggttggagtgaatgaatatttaccatagagggaatagaagaagggtcgagaggaggaatatctttgagactgatgatgatcgatcttgacggttttttggttatccgcttcgtttcctgatcctccatctttcatattactactccttgtctaattcccagatatctttctttgggaatcgagaaattgaaaattttatcgatcatcgacaaaacggataaggttcattaattaattcatttccccacaacaacaaactctgttataaaaagtcaacgtttttatttatttatatgttaaagcttttaaacctttaacttttactaaccaaactctactaacttgtctctcggttccatttaagcaaaacttccgaattttttgtagcagtgattaaacatacaacaataaattctccggaagaaccaacataagagacaaattcataaacgcattgatctgttacaagaaaaaaaaaaagaaaggggaaatgtttttttataaaatccgcaatgatccaccgagttctactggtagaagagggatgagtgagtgcaagacatcggttataagtggtctgtaacttggctccggctgtacacacaacaccgccaccgcagctacctgtccaaagaaaatataacacaaagttcaaagaggaatctttttccttctatatttggctaatgtgtttttcgtaaaatctgtgtgagattttgttgaagcttttttacctgatatagatgcttcaaatccatggttcctttgattgcaggatccaatatgtttggtagattagctctatcactcagcttaggtactgcctgatgatcaacaaagatcacaagtcagaggatttcctgctaaacgaagccactatctcgtgaaagttttattatgtacccaagtaacgatggattctggttcagaagacggtttctccactgatttcttcccgaggagaagttcgagcaggatcactccaaatgagtagacatcattcttgtctgtaactttccctgaaagatgattacagaatggtcgaaatttgagcatctcgtttggcatatatgtcaagatcgaaccccgaaaaaagattaactccttaccatcaagaagatcctcagaagccttgtgtatcaggtttttattctgcgtggtcaaaaccgtggcaaacccaaaatcggatatctaaagagaagcaaatgtggcaacagatccttaagactcatattgtatggagaatacaataagtctaagaagaattttctacattatatcattttctcttttacctttgcattgaaatcggagtccagaaggatgctagatgatttcaaatctctgtgaactacaggaggatggcaatgctcgtgaagatactctaatcctctttatgaaaaaagaatactttgtaagcatacaaatatatgttcttggagatcacatggaactactaaatgtttgaaagtattatcaatgaatggactttacctcgctatatcaaccgctatcttcatcctgagctgccaagttaaacctgaaccttgactaggcccttagagcattcaaaagcacaacaaaatcaaaatcagatgacaaaagatggaacaaacatggatcatatccccttaccatgtaactgactctccaaagatccattctgcatcaactcatacacaatacaactcgtttgccgatatacgcaaaaccccaataaggaaactatgttctgatgcctgatcttagccaaccaatctacttcagtctgcattagaaaatcaacaagagaaagcaaaaaaccgagttatggtttatcgaatgagatggtgcgattctgtataatcatcttaggggtcaaacctcaaactgtttttcaatgtctgtctccccaccgccatcaagtttcttcacagtgactgaggatttttcatcgagacaagctctgtaaaggcatccacgaccacctcggctcaacacattactatcactaaacttgtttgttgcagattccagcaattgatattcatacacagggatggttcctttcctcacagaatcaatcttgtgtacagtcggtttcgtggttacactcttcaccgaatcttcagataaccaaagcaccaaaataagccataacaaaaccaaggaaattacaaaaatataaagagatagaattgaataccggatttgcgtttgataccggtgaagctgttcttcatattcctgtacctccatagcaagagatacacaaggaacatgactgtgacacagagcagagatgatgagactataagagcaattagaatcttcttgttcaagtcctggcgaagcaccactttaacaatgggaggtcctgagcaaagttaaatttaaataagggataaaattcaatttatttgcttaattatcggaaagttttcagttttaattgggaaacagtatcaattcaactaaattcaattcctttatgaaagtatgagcaaacacatttcgacaatttcaagaactagtaagacccaatcaccaaatattgatatttttgttcttaggggcaacatggagaaaatttggaaaggggaaactaataagtacctggggattgagctcccattcgtggagaagcctgagaaatggggatttcgggggaagcaccagaaacgtagacaacggaagattcttgtgatttagtagcagtggagaagaagaagaaaccaagaagaacccaaatgggtagcaaatgacgaaggagacacatatttaattttgttgtctggtatcaacaaatatgcagagaaaagacaaaaagagagagagagagagataaagagtacgaagctgcttcgtgttctatctaattcttttatggagatggtgaaaaatgctagagattatctttgtctggaggagatgtagacaagagacactgttggagttgggaaacagagagagagaaggacaaaggttttaggtgtttggtcttcatgtggcagttatgaaaaggtggacaaaaaggctaataaagcagcaaagagtgcctaatcccagacgtggtgataagacgtggagttgtggagagagtgaggaggaggatgtgtagttagcaaaacagtttcttcccattagccaatctttaaaattttgattttctctctaccattacaacaatttaacatcccaatgttagagatgatgctgatactactagttgacaaatagaattaaaccttttatacgtaaagctaacagatttttatctattaattaaagccttgttcctttttctttaacgtatagttatactatatctttattaaattagaaaaatcaagaatacaaagaaagtacataaagcaatcaaagtacaatccaattacataaatggtgtttttaatgttccttcatattcataagtttagtcttttaatttccaagaaaaaaaaaatacatcttgtcgtaaaagaaattattatttttaatcagattaataaaatggtgtgatatatggaaagaatatggattgagaatggattgtgtaatctctcgatagagttgtttgcatcgaggcacagtaatccaaatgattcgattgggtcactccccaaattcaattcatgcggatttagtgaacaaaacgacaagtcatggtttaatagagtgcatccaagaattttattctttttattttaaaaaaatacagacgacaaaggtccaaaagtttgagcattattcatgtgaactctctatgtctgtcctcttcaaactttaattaccgacacaagtggtcactgactagtcacaactgtacagttgaataacaactagacttattgagggccttacaagaataatgagccttttatatcttattgggtcaatacaagcccagttttgaaattttgaaatgaatcagtcgttaggcccaatatctgttggaaaaacaaatatagttattgggccattaaggaataaaaagccacaacaagcccagtttcgaaattttaaaattggataaggttaaaagccagctgccagcgaaattgaaggatgatatatagttagttacatactgtgtttgttgttagtttgatttgagctaatcttcatcaaatccatcatccatggatttacctgaagaatgttgggaattaatctgcaaagctatcgatgaagacgattatcgattcctggaatctgtttcactcgtatcaaccttgttcctctcaatcaccaatcgcgttcgctctactttcgtcgtcaccgatcgagctgttcctttactcaatcgtcatctccttcgattccgcaacttgaagcgaatcaggttctctgatttcactcaggatctcaattcgattcttctccaggtttctcgttccggtttggatttcgaatcggtagatgtctcgcaaacgcgctatttcccagattttgagatgaagaatgtcaaggaattgaaatgttatggagttggaggttttagtgatagcgatctggtttccatcggagtgaattttccgttgctagagaagctggacattagctatcctaattcaagtccgagtcgagtctctgattctggtgttatcgagctttcctcgaatctcaaaggtttgttgaagattaacatttctggtaatagtttcatcacagataaatctttgattgctctctcgcagaattgtcttctcttgagagagataatcttccgtgactgtgatttcatttcgtcggattgcatcaaattcgttcttcgcaattcccgtaacttggagtctcttgcgatcaacggaatcggattgagaccgagggagtctttgttaaccgatgcgttcttgtttgctcgttgtttgactgagcttgatctttcggattcgtttttgtctgatgacttgctctgtttgattgctagtgctaagttacctctaaagaagcttcttctctccgattgccacggttttacttttgatgggatcttgtatctgctggacaagtaccaatcactagttcacttgaacctcaaaggagcaaatttcctctctgatgagatggttatgaaattagggatgttctttcggcgtttaacctttttgaatctgagtttctgttccaagttaactggtctagcattctttagtattattgaaagatgtgtttccctgaggtgcatgataatggtagggacgaactttggagtggaagaatataccaaggatacgaaggatttcaagtcaggggtcaagtttttgtacttatctagaaaccacaatttgctcgatgagtgtctcgaaaagatatcacggcattgcccttttatagaaagtcttgacgtagctcagtgtcctggcatcacgagagatgggattcttgaagtttggaggaattgtggcaagctaagatctttggacatcagcagatgtacgggcataaagagtcttggtgtagtagactttgagcttccaaagttggagtctttgcgagcatgtggaacttggatcgacgatgaagccttagatatgatcagcaaaaagtgtcgagggttgttgcatcttgatctgcaaggatgcttgaatgtgagttcaagaggggtgaaggaagttgtgcagagctgcatacgtttaagagagattaacctcaagtattgtgaagctgataagaaaatgtacacttggatggtttttgcaaatccatctcttaggaaaatcgtaccgccatgtgggttttctccaactaaagcactcaagaacttctttctgcgtcatggatgtgtagtctcccaggattcttctgagttgctttctatagcataccgtgccaatggaagagatgatgacacattgactagactgattatttgagccatttgtgaagaaaaaaggtatcagcataatagtttgaatggagaaacaggggttaacctttctttgagtttatatttgtcactctcgttgtaataaaattgtcaagccaaaggcaagcttgcgttgatttttttttcaaatgttcagccatcttcttattcaatgatagaagtaaccagcactactacattgcaaatcaaagcaaagagtagtaacaaaaagtgaagacaaaaaacatgaaaacaagtcaccaaggcaaatagcaatcactccctcttcattttttgggtcttatacctcaagtagcgaatcatatcctcaggatcagagactgttaaaaaggcttggcggtgagctacatcagccatcagatggtccatggaagcacggtataaaggcaaccacttcttcactctaggtagaccatttaaaacatccattgcatgcgtcacactgcatatgtaatcaggatgattctttagtgcattttgtagagagctaccaaaagcagtaaaagttttccttgctatacttgcagctctgcttttcttttcgtccaatggtggtttcttctctactagttgtttcttcttgggtcttccaggtctcctccttttttcttcctttggctgctctgttattaaaacctcgctttgtatttcatcctagaactatgcacaaagtatcagacttttccagttttaccacatttcttaatggtaacaaaacatgccaacatagtctatggaagatctcgttttagactaatcgctttgacaaagtagaatgcttgacgagttaagaaggagtaaacttacaggtttctctctccgatatcgattaatagcaaaccggtcaaaaacattgcctgaatccctcgcccggtcgacgagaggtttcttagtaaagaagttcgacggtaattgagagggtaggcttgatgaggatgttgagaaaatacggatcagaaatgggttcaagtcgaacctttgttttggtctgagtagatgaaacgccatgagtgactgttcttacttcttaggagaggaagtcgaagaagatgtaataaataaactctcaagtgtcgtttcaaattcaattgctttatcccggttatatgtttaccgggttgaagtaacggttcactctctctactctaataaaccatcgctgactttagaaatttgaatcccaatattaaccgggttgaagtaacggttcactccctctactctaataaaccatcgctgactttcgaaatttgaatcctaatttggtaaaaggccaaaagtaaagccattgataaaagacgactaacgattccgtgcacctctttcctccgaatcacctcagtttctgttccgtaggtgttcacttttcatgtttaacatgcaccaaccctaaaggttaaaaaggataaagtggcagtaaaagatagatgcattgagaaagataagttggagaagtaagtttattatcacattcaaagtaataaagacaatgtcaacgaaagtatcccacagctttattctcttttcgcctaaacagcctgcaatcataatctctagtagaacaactttcctccccaagatgattgataagagagacccacattatctcttttgccataatgaaaaagaacaaaaagagagtactgagatcacaattctatgatgtcccttgcacaaaaatttcaaaacttgtaatccgggttgtcacgaaggccgagttttgacagtgaaaggcagtaagaatcccagtccgttcttctcatatacttcaacagcttcttccgtctctgcaccattgctataagtcctttccgcgaatgcttgtcctaaggttataaagatgcaaggtcaggttacagtagaaacccggagctggtagcttcagattaaaaaaaaagattgaaagtttacctttttatgtagaaccgaggatagatgcttgatcttagtggtcagttgcgccactacaagaaaaagccatagagatcactaaatcagtacttgtgacattttgttcccaaaaataacaaaggcagtgacctctaattagctggcttaatttagcctcaggaaatgtaatatcgtcttcaatagctaaaagccaacacttataagaacagataccttgaacacgtgcagaaccacaatccgattctgacatcttgaactcttctctgacctttgcaagctcgattttcatcttctccgcagatgacatgttatccggatggaaatactgcatttgatcaacaaaatcgatgtcaaaaaaatcttaaaatggctacaagctaaaatgattcagtaagtaagaaggaaaagacttacagtttcaactagttgatcttttggaggctcgagcatatactttggggtaccacttaaaactccccaaatattcgtattctgaactgcaaacaaatttatcttccaattaaataacaacaagcgagaacaaatcaaaaccaagaaagcagcaagcataaaaaccaactctttacggtcgcaaattgatcataccagagtgtttgagattgtaaccaaacaagtcatcatatatataaacacacacacgaagaaagagtagttatgagagggcctcggaacctacagggatctgatttctgagccttggtgaacttatgaaactcagacctcaagttgttgacgaaggagggatgcactatactcgttttctggaattgttcctcttccatggccctgagcttaacaagcctctgattgagctcctgtaatgagaaccaaccttcttctttctttccctcaggcctatacaatcttagtttctctcccagttctattggatcatagctcttgataaactctgatttcatctcctcctctgtcacatcttcttcttctaactccttcccaaccactgaatgtggcaatccttctgctgctcctccgattacatttgaacggatattatcattgatgttcgtcttcataatgttctgaatcccagataaattggcccatttgctctcagtggttgcttgttgtggtctcatctgccttaagttcgcctttatgtttgttaatggcacaccttcgattctacgagtccctccagattttgataacacattctgcttgaaaagatcctgcatatccctcggcggcggagctgttgctctacttcggaactcgttcagattcctcctgatatcctggttaccggaaagcgaattctgaggtttggcatcgaatctgacgaactgtctcttcccgtcctgagactgagtctgtttgagactgcttctgataccactgaagtaggaagagattttataatccgacgatgattgagagggctgttcattagattcgttcccgtcttgaggtgatgatgaggaggaggaggaggaggttgagaaaaggtgaatgagagatggattcgaatgtaacctttgttttggtctggcgagatgaagcgccatggaaactgatcttggcggctccgggagcttttagggtttttggtgggtacatgttgatcatagatggaaccaaatgaaaatggtctcagtccggttctctagtaaaccggaattgatcacgcgataaagtaaaccagaagggacggttttatgtgctttcggtaaaagtgaaagtcaaatttaaaaccatctgaccatcatcatcatcactactgagacttgagatgagtaaatgttacgttagtgagctcatgaggtttgattcgctaggttcttatgaggcactttaaaatctttgtagctacgattaaattagataacaacaatatcatacgactgattaagattttttggttaagaaataaggaaagtagcattttattttataaatgttaacatcgccttcatattaatgaataatatgttaccgtgttgacgaaacgaaaatggtagtttgctgactgctttcgtacaatcggaaccgataactacttttcgagagagagacgtatgtattcgactgatacgattaacataagaatgtgtattgcacgaacacgtttatgtcacgacatgtgttgtttacaatttggtgttctaacaaagtacaactagcaactgatacgtgtctacaaaaacttattcaaaaccctatttttgtatggttctatttgtgtttcaacccataccatcccattttaactatgcaatttatatcccatcattattctattataaaaagctttgatattctatttgatatgaatatgatctaagtttggttgtttgttttttcttgtctgaaaggaattctttgttagtttcgttatttaattttgaactgtattattctagtatgagtcttataattattaattaccatactcgaagatcacaagtaaggagttgacgtgaccaagaaattgaatggtcacgaatgcgaggcaacaaacatcaaaaagatacctgatcgtatttgtatccaatcacaaattaacatgaaaatactaatatgtagtctctaaaatataacataggccatgtataaatctaatgtaatgtagttgattagtctagcatgacattttttatttttccaactcatgataccgtagcatctaaatagtggaattcccaaagtttgaatatggacggaggtggtacactcatcatcagtcgattgtcgcgcgtgtatcaccttcattctcctactgctactattccaacacaagccacaaaatgatctatgccacgtatgtcttaaagagggtcctacacttatcaagagaagaaaaataagttaattccaatatatctaactgtgcaataaaactcaatatatatatacaaatccacccattaactatgccacagagatatcttcctctctactttttcgccaccatctctcccatctctcctctctctctttgagttgcgactatgtccggcgaaaactggattcgagtggccatgtctgacgattccatggtggcggaggcgcttcttcggctccgccactccgaaccgaagaatagagtcgacgcgtcccctctcaagctgaaatggagcgtgcgtcaacggagatcgaagaaaggagaccagacgcgagcaagccccaccacaccgctttcctggagcggtgccacgtctcttagcggcggaggcggcagcggtggaagcggcgccggtgctaccaccatggaaggcctcgaggagtctagcgccgccgtaaaaccctctgagccatttagatctaaggtttgtccgatcatttcactcatttttttgtttatccgatttgaaactccgcgacggtcatatctcgtaggtcttgttttctgctatagccctcgtgatgcggcgttttgcactgtcatgattttagtttttaaaaacgtaattttaagcgtctttgttgtggtttgggctgatctactaccgagtacgcccttgacatttcagttggtagcttgtgggtattttggtcattttaggatccacgatcgtgttcttaagctgatcatgtaggtacaccgacttttcgttgaccgaaatacccccagcgtggacacaactccaatttaggcaatgatgtttttagtcttttcttttccaagaaactcaatctatctttctcgatttcttttgttgtcttcttggaaacacttgttagattgtttttgagtttcaaacaaacaggtgataaattcggtgatctctgctttttgctcttttcttttggcaacaaaagagtcacgttttcccacttttgtgcatctcagtcatctttctctctctctctctatgctgctttgcggaaagaccacaaagccctcacatcaagggagaggggagaggtcttctgggtcaaatcagcgttgtagacttcaatgctaaagagaaaaaataaacacattcattatcattaccaagctaatgactaaattaacccttgtcaccaggttagctgcttctcacgatagagggtatattagtcaatgccagagattatcgctggcgttatttataatttgggaggcgttttcgtggaattgaatttaagattagagtatgagtggattaggtacgtgtgtggtagggtttagtggggagagcagttatcagatgtggcgcagtggacaataagtagtatgtactcgttctctagtagtagtggtcaaagtcctcagttgttgcaacggattaggtcctgtgattcgtccgtcagattttcttggtgacagtcttgttgagttagcctgttttacttttttttttacaaagtttagttaagattgttgtctgatttgaagttgactttgatcggtgggttataatttgaaaaccaaagtaaagtcgtcaaactaaaggaaatggaatttttgggtagaataaaataaaaatagaaagatgatagataataaggacaagtggtggtgtggagaatacgtgacactagtttggggttggaggacaaggaaaagcatgacgtgtgaatgtgacgaccaaacacacacgctttatatttaaaagtctcccaagtcacgctccactcacgtgtttctatgtttttctatatatttatttatttgcccttctgttttttctttttgagtagttgaccaagaagatactgctgaaatttacatgatttggaattttcttttagatttccaagttctagttgttatttgttaatatgctgatgaagtgattcttttgtttccaacttatcgtgcctctaaagtctctctcgaatggtaggtgtgtggtttctttatagaaatgatatacaatacaaaaacaaattgtttttacggtattagtttggtgtgattattgattgttgagctggctttatctggtggtgttgtgtgtcttaagccataatctgattgtttttgttttgatgtccagatttctcaaacgagtgcaataacaacaacaacaacaacaacccttttcaagagatcaagaaagaagaaggtaaaaaatacgaaagacagtgtttctattagttactgatactgttaaaagataatattactagttttagaccagacatagagcaactctgaccaggctactacctactggtttgtttaaatctgttgaggcatattgtctaagatacgcctagcaatcttatattttctacatttggactgatatggttttacattttagccgattcaaacctatatttctctaattaatatatatgattgttgacagactttggctgagcttaaagaggaagagatcatgctcttgaaggaaagtaacggcctgaaaaatgtataacctccattttagcctctttctttatgtctctatatatcaagtccaagttctaatcttagatttggttaatcttattcttgaatcaggaattggcaaatatgcgcgatttgctcgagcaacaaagagcaagaaacactgctctaaagaagatgaaggtgagcccatcgctctctctctctctctctctctatctttctatacatgtactcattcaatcatatatacggaagataaacatgttaattattcaagtatatcattttcatgtgtatgcaggctgaatcacaatctgccttatcgtgcaaactcactttcgaacaaggttcttccttcttgctccctgacctaaacatgcctctagataacgacccgagccctgaagttgtctgctgaacgggcgagccacaagcatatcattcttttgtttttcccattacacaacactataccactatacctcctccgtccacaaacatgttttttgaactgtaactatatgaatatgaagaacgtagattaatcctatatatccttcacccatatcccggtggaagctgaagaagattcgcctgaaggtgaagtggttcgagactatggttaagtgtgttaacaatatcttctagtttagctggtagtaagatttttgttctgccaatctcctaaatgattcttatctttctcccattttattaggatgagatgtaattatctacttagataatagatgtacacctttttttttttgtttgttctttcttattatctctggtaagatgtattacatcgacatttataatcagtgtaacacgttccaaacattttactatattttgtattatgattgatggactaaaaaatatctgcagtcttgcattctttttcatcgttataaataatttagaaatttcaaaccattaatactaaaaacacgtaattacggaaaaagtaagatactaatcagattctttattaagctcagctaaaccagtagtagtaaaattatcactggccttaaaaccctagaaatagaattaatctcagctattttgtcttaacgactctttattgtcccgacacacgaaaatggcgtctcttagccaaatcaccctgccacgcgcgccgtcgtcggagattggcctcttacgccgtcgattggagcggccgatcatcagaacccggatcggattcaacggccggattgcgagcgtattgactaacgcaggggaccaagcggtgtcggtaaaagcgagtgtgagccagaaggtgattgaagaggaagccaaagttattgtgggtacctacgcgcgagctccagtggttctctcgagtgggaaaggttgtaaattgttcgaccctgaaggaaaagagtatctggattgtgcatctggaatcgctgtgaatgctcttggtcatggagatcctgattggcttcgagctgtcactgagcaagctggtgttcttgcccatgtcagcaatgtttattacacgatccctcaggtatttattcgttactgtatttttgcattactgattctgttgatggctgacgaaagcttaaaacttttgttgtttttatcctctgtgtgattgagctatggcctatggaaacatgctagggaatgttggattagtcttctacttataatagcgagattattctatgacaagtacttgcactttgaaatttcatcaaattggattgtttctacgccttccctatagaaatttttatgagaagtatctgacctcattgtaaactcttagtgtacatatgctcctcaatgcccaattcctcgaaaaaaggaacctttatgctcatatctacttcatatgggttgttaaaatctgaaatgtttgaacttctctgcagatagagctcgcaaaacgcttggtggcgagttcttttgcagaccgtgtattcttttgtaactcgggaacggaagccaatgaagcagccattaagttttcaagaaaattccagagattcacccatccagaagacaaagaagtcgcgacaggtttcatcgcctttacaaacagcttccatggaagaaccttaggagctcttgccttgacaagcaaagaacaatacagaactcctttcgaacccatcatgcctggtgtaaccttcttagaatatggtaacattcaagcagccacagaccttatccgctcaggtaaaatagctgcagtttttgtggaaccaattcaaggagaaggcgggatttactctgctacaaaagagtttctgcaatctctgcgctctgcttgtgatgccgctggatctcttctcgtcttcgatgaggtaatatactctaccgtccatccaaaattttattttctttctttgtttctgttttttgattggtcttgcctcaactgggttcattgtcccaggttcaatgtggtttgggtcgaacgggtctcatgtgggcttatgaagccttcggtgtgactcctgacataatgacggttgcaaagcctttagctggtggtttacctattggagcggtgctggtgactgaaaaggttgcagagaccataaactacggagatcatggaagtacatttgcaggcagccctcttgtgtgcagtgcagccattgcagttatggataaagtatcgaaaccctctttcttgtccagtgtctcaaataaaggtcgatactttagagacctgttggtgaaaaaacttggaggaaactcgcacgtgaaggaagtgagaggcgaagggcttatcataggagtggagctcgatgtgccggcaagctcactggttgatgcttgccgagattcgggtcttctgatcttgacagcggggaaaggaaatgtcgtcaggattgttcctccgttggttatatcagaggaggaaatcgaacgtgcggttgagatcatgtctcaaaatttgactgcgcttgattgaagttcttggaagagaaatgatgtggtgttgaagaagagctaatgttttatattcgatcttgtcttaaattagcctcaagtgtaccggtaaagatgctctgcacaattgaaaagaaataaaatttgacacaaaacttgatgaactaattgttcaatctaaatacttgtataatttccatggttggttcgatgacgtctctatcgcgattgtttccgtcttgcgttatagcatgctggttatgagctgcgtgaggaatcagagcacatagatgataacggtgatagaaatattggtagagtatccaacgaaccagcattggaaagacgtgaatccaatttatcggcagtgtatgcattggtcgcaaccaagaatcttaggggtctaatttaaaaaatgataattagggccttaggcgatcctgaactaatgtcgagaattttggcgtttagttctgttaattaattacagatgattgatttttgagggtcttaggatgatttctcactatgtctgtgttaataatgccattaggagttctttactgttgcaggggtagggttttggtatgtaatatagtattagcattgatgaaaataaacaggtgtagcaagagaagatttcctataaggttagtaatgagtacaaagcaaaaaaacagagcacatgctctgcttcgctatttgttacggtctgttttatggctaacgttaacgaacagagttattgttcttctctgtttttgtggcggacacttgcctaatacatggttattagctgaaattattgataatcatgaattgcgaggtgttacaatcgttgcggcttctacggaagaccaaaattgtaatgctacaaagcggaacttatgggatcacacattgacgcacacacacatgtatgtatgactgtgttagtgtatatgtagaacttacttattcaaatcttgtagctttcagtttcagctacactatataataccaagttcctaagttcttctgtagaaacaagtcctatggttcactattcatcaaaaagcatgatccaatgatttatgcacccagcttctatatccaggttaataactacctagagatattccatgggattcatgtccaacagaccaagatgtgtattaaatataattagtctgttggattaggtgagaggaaggtgccttccttagttagacttgacctcaagctgtctggctactttgaagtgtcccttaacttgttaatgttattgattgtttaaaggctaacaatcgcacaagaccttccaactacgtcgtctcgtcacacgtttgtgaattaccaaatgtcaacattgatggcgccaagttacttttattgcgtttacactttacacattttgtggatagtttattcgataaggctacactttccactttctttttttaaaaagaaaacaatgttttatgtctctagaagtagaaacctttgctgatctctatataaactaataacagattaacctgaattatcctaaacagaaaatatgtctcttgagattgatgcgaaggctgtctcagcactcctccttggccaaggatgcgctaacaatctcaagacgctcctcaaaaaccatgaaacaggctcagtttcaacagagccactcatcaactccattcttgattctttctcgtttgctctgtcttctcagaacataccacgtcatgtgtctcaaagatcatcaaagaagtaaattattaaaaactctaaatcaagtagaaaacacacacctgttttggtctatgttactctatttcttctaccactttcgatgcaagtatcctagtgaacattgctctgatacaacattgcagaaagatgtgtggaatacaaggtatggaagattctccgacaccggcccacattgatggcttcatctggaggaaatatggacaaaagaccatcaaaacctctccgcaccaaaggttagttaattaagtagattagaaagacatagctactgctctcttttcacaaatacagagctattttctagagtgtgtattgagcgatgactaattgtagagtaaaatttacaggtggtactaccgatgtgcctatgcgaaagaccaaaactgcgacgctaccaagcgggtacagaagatccaagacaatcctccagtgtacagaaacacctatgtcggacaacatgcatgtgaagctccagcttatgcagttaataatggtggtacatacggttcaaaaatgatcaaattcgactatgttattcctgaatcggttatgcctcaacctttatcaattgattcccaagaaattaccatggaggataaagacacagacgaccatattttgaactatattaacgagcatttgatggaagatgaggcgtatgatgttttccctgatgtacttggagaacgttgctgctttggattagaaccctttccaggattgaacattaataaatcttaaaagcttttcatgttcttcgatcttatggtggagaatgaatgattcattcttcatttcttttcatgttcatgttttgtaattttgatttacgtgttgtttttttgtaaaaggaagttttatcagtgatgtatttcttcgtcgtttaatatcagaaatcaacaatttgttgatggcacccaatgtttttttattatgtatcaaccttttcacgataaatttagttctaatttttttttaaaaaaaattctaattcataaagcgtaatcatccgccgacgttgaaaaacaaaagatgaattaggcttttataacatgaaactcttaagtagatgacttcactaaaacgacgtcatcttaggacgtcacgttattgaaccttccacagttctacacgttttgtctcatatagctgaatagttgcttaatcaaattttacgattttatatatatatttttttttggttgagtgattttattcaacgttattgggctgtgggacggtcatgccgtttagttgtttgttttccgttttgttattttcttcttttcgaataatgattggattatatgatctgtaaaaagttttcatcaaccaccaaccgagtttgtataagtccaattaagcggttcaaagcttgacacaatcttggaatatcatccaatataaaaatttatctcctttcctaaagtttatgtatatagccaaatactcttagattagtcaaattaagatttaagactaatattagacacacttataattaatcaaccagtgaatgcatgcctttcacaattattctatcttatgttaaatttaaaaagttagaaggtggtggaagaacaccattttttgaaccaattaacgactctttcatgagtatctgatgtcgaaactaacagtcaagaaaacacgtaaaccgaccgaccatttcatagttataatttattgtaatcgggaaaaaacacttttaagacactattggacgcaattatacttgacaaattgtctatagccgccgcagactaaacacatgcagtgagagagaagacgaaacaaacaaaaaaagtcttgaaaccgcaatcagaaatccaattaccttacgccagacgggacctttaacggctctattggagaccctaaattctgataaaaaggattatattcaattgaaatcttaatacccgaaccctaagtttttttgaatcaaattcaccatgcttgaggataaaatcaaagcatatatatatcaacagacagagaaccctaaaccctaatttatccatgtaaggtaagtaaaataacaagacgagttttatagtcaatattttgtagtcatggtccatgggattctcagttttgggccgaatcagtgaataactttactgttgggattagacaccgacacacacaagtatacatgatgactgtggaaatctgtacagtatttgcaaagaagttcacttactcagcttttgtagccttcagtttcagctaagcgtagctaataaccagttcttctgcagaaacaagagctatatagtttactattcatcaaaaagttactgaacccatgatttatgcagtcagcttctatatcctaggttaataactacctctatatgacccaacaattcatattttatttagacactggaactttggtcagttccattaatattacaccaatgtatatagacgtatatatagtcatgtttctaaagtaaaacaaaacggataataaacaaatatcactacttattacggtttatctccaacagacaaaaacaaaagtactacagataaaattaattcaacaaaagcaagaaaataatacaatattgctaatgaaataactacaactacttaactacgagtgctttatcacttcctagacaacaaccctaaactcaaatcaagctctagacccattttttcaagattatcaatagaactaatcacatttcctttaatactagaagaatttataaaattggcatcatcgaacaactgtgcaaccgatgtgactttaacacacttcctcacactcacttttttcttcttcttcttcttctgcttctgcctcatcctattatcctcctgagcctgagctatttccttgggaaaaagcggaggaatcacgaaattggtcttggctttggtccctctaagcctcctcgccgccgcgtcatacgcacgcgctgcctcttccgccgtgtcgaacgttcctaaccagtgtctgcaccgccctatcctgtctcttatctccgccgaccatctcccccacggccgttttctcactcccatgaatcctccggtcttctgcggcatcttccgcccccgcttcacaccaccttctttggtcaagtgatcagagactttgtttttatcaccgaaaagaacgttttcgcccacgacggcggcgatggaatcgtccatgacacgatgcgtgttttcgggttctggttttgggttaaacgagaaaagagaagagatatcgaatgaagtagtgttggtttcgaacaagggcatgcagaccaacggcgactctttggataatccgtaagtttcggagttttgactggtttcatgcatggagcttaacggaacggaatattgaagacggtgaccatcaacggtgtagctgttttccattttctattttataaaggtgagaaagcttctatgcaaaaaaatgattggttcgttaccatttatttataattgggggtaaataaagatgatttcatttgaaagttttctttcctaattaaaaatattatggtaaaagtatttttgtttagtggaataattaaaagatactgctgtcaatttcgatgagacagtaaaatctttcacatttattatgcacatctgtgcttcacagtgcaaagacaaagtttgtaccttttgttttcaatagagagaggtagacaaacactcttaaatcttgatttaaaagttttataatcttccctttattttgcagacatctgattggtattatcaacctttgaataaaataagtgacatggtcatggaagaacaaggaaataattatagaactttgatcctaataatactatgcatctgagaatattttcatcttatgcaaagccacgattattgctgtcgcaaatgtcatgagtttacataaatccatacagtaacaaattttctcgtgtatctgacaacttgcataatacggtataagttgggccttgacaaagacataggcccattaaatcaaacggcaaatcgtgttctgtagactccaaacgatttgacttggtcgaattgacatccgttttgattacgtaaggcgcgcgcgtgatctcttcatggacttatgctggcgtcaatagacacacagtttgtctgattacaatttcgcttagggtacacacttcttcaactaattaccaaatattaaaggaatcatataaaagctactattaaaggagtatgtttatctgctaaaataaaggatttaaaattaaaggtttcaaacgtaaatatgtggttttagtagacagacaatcataacatttgacagaaatttctatagaacaaaatacgtttggtattaagaaagatggtgaaagttatatattaccgacacaagatctaaaaatgtcagcccagttgaactctaactgatcaaacaagtactactacttgcgttttgacgtggcaatatcaatatttaaaaatctttagaatgacgacttgataagattagctcatggattagaaagacatcagtcaattaattattatgacgctatatttataaaacgcaccattaaattaaagagtaacaacattacatcatccatgactgtttatatacaactgctatgacgtcattttaaacttgatcatcactgaggcattagtaatttttctgtcccaaagatcgaacatttacacttacttacacatgagtaaaattgtacataggaagcaaatcatacgatctcaatacatccatgacaaatcttgcttaaacgagacagacgttgcagcaccatgaacacctcttcttgaaacctgaggacaatcttcaacaacaagcaactccaacttgtgagatccaacaagtggtctcattccatcgtctgtcactcccagacattttgataacttcaacacattgagagaaggaaactggctcaccagaatcaacccctcatcgctcacttcttggcaatggacaagctctaagatctcaagtttctgagctgaacatagagcctccatccccatgtcgttgaatacacacacatggtcaagagaaagctcgcgtactgggcatttctggatcagagtgattatcccctggagtgtgaaagagaagagggaagggaattcaccgtctgagaaagatatcttgaaagattcgagctttgagcagtgttgagctatggcgctgaggctttcatcggttaatcttaacgtgatgttgtttaagagaggcagagtaaaatcggacgggacacggagcgagatgcttcttaggtgactagctttctgaaccaatgctatgatgtctgagtcgctgacaccggtacacatgtccagatgaagcttctccaggttcttgcaatttctcagcacacaagcgagccctctaccaggagctatgatgcagttaccgaggctgagctccaccagactgtcacagggaaccaactgtttgggccaccgttccacatctaactggtcgtaaaccttcatgtacctgtaattggcatctacctcaaactgcagacttgtcagctttcgccagctattcctcagcttgatcaaatcaccttccccaatggctctgcagttcttgatacagagttcttctaaagtctcaagctttccgaaatactccaaccactctacacttgcaacgtttaggcatcgaatgagatgaagtctcctgagtttcttgcatcctacagcaagtgacaacacaccacaaccagtgatcctgggagcgaaatttaacttcaacgaagaaagctctggacacgacgacaaatggcctatgccaacatcggtgatgaaggtgcagaagctcagagtgagatcagtgagagaatgacagtttgtggtcaggacaagaaggccttgatcgtcaacttgtttgccaagttttgacatccagcctgagtatataatctccactttggaaagatttggaaacctcctgcagagagaaagcaatgcatcggatgcaggaactaaaccgcaaccaatccgcagagagtatctttgctcgttgtccagcgagaagaaacgtttgcatgagagtgaaagcgagtttctgtcatcggtagtatgaagcttactgagaatgtcccaaaccaaatggtctggcaattcatccatttgtctatctgtgtgaacaaaaaaggatcaaagcctaacatgtcaagtgaaaagtccaccttgaaaacacaaaacagagctttgatggaactcagagattatgcagaaaaacgaaggcgtttgactttttacttaccaccaccaagatacgcaatcccaatgaacattcaaaaagccatgaaaatttccagaaacaaaattgataagatagaaataaaaaacagaggaaaaactcatcagagatgtctaaattgtgaattagttcccaagcagagatttagatttcttgaacataataatgaataatcaagaaataacaaaaattcacatccttgattcatcgattaaactcagctctaaaagtaggcttgccatgaaacagaaatcagaggaaaaagatctcaccggaaagagcgaaaactcttgcgacgtttgaccacactcggcgccggataaggactacgggggagattgaatcttttttgtctctctaatttttggctttttgagtgatactctgacacgtcattatctccacaaggatatttatttctcagaaaaaaacatcaacgtttcagttcgatcaaataagtccctctaataatctcacattataaaaatcgctaataaaaccgagactctttgagtacaaggtacaacatttgttgttggaaatgaactcttcaaagtttctacaaatattaaacagaagctggaacttgggagtccactgacttcagaacctcctctcccatctccttgcagcccaccagtttctgatcataccccatacaaaaagacaaaaaaatattactactgtttgttgttgcctgcttgtttaaacgtttctcaaacactaactcgggacgtttttaaggaaaaggaaacatgttataagagtggttcaagaaacatactgttcccgcggagtatatgtctccagttctgaatccgttgttcagagcaaccaacactgcgtcttcaattctcttggctgccttttcttctccaagtccgtatttcagaagcattgcagcgcttagaatggttgccaatgggtttgccttatcctgaaaattcaaagaatcaacaagttgtgctctttgattttggcattaaactagttttgatatcagggaacaaaaaccgtgtttgtttgaaggatagagttagaacctgtccagcaatatcaggtgcagaaccatgtataggttcaaagagtccaggtccctgtattacacatggcgggtttatgttcagactagatcatactgcttgcatactaaaagatcatattattttatatcataccgaatcactgagactagcagatggcagcattcctatgcttcctgtgatcattgaagcttcatcggataatatatcaccaaaaatgttgtttgtgacgatggtgtcaaactgcatttatcaaacaatcaaataattgcaaggatttacacctgtcgcacatcaaagctgactagtttggcaaatacaaagtacacgtacctgttttgggtcacgaacaagctgcatcgcggcattgtcaacatacatatgtgacagctcaacatcaggatattcagaggctaatgctgttactcgtttcctccataagattgaggcctgcatataaaaaaattcagtgttatgttcgttccacaggaaacaagagagaggaaaacaagtcaaagaaaacataattatcaaccgcacttccaaaacattagctttgtcaacagaacacagcttgccacgccgtttccgagcagtctcgaaggcaacacgagcaattctatcaatctgacgaacatacaaaatgctttattagatttgaccctagtacttaacaatcagtccacggaaatctgcatctgagattttcaatagagtacctcgtgagcagcataaacctcagtattaaacccaacttcctcgccattttcattggtctttatgccccttggctctccaaagtaaatacctgttaccatgagacatgacattttataagatattgtcacacgagaaagacaagaattacgatcaatttttaataagtaataaaactgacctcctgtaagctcccttacaaccattagatcaacaccttctgctacctctctctttaaggtggaagcatccactaactgtataaaaacaacaaaattagagtttcacacaagaaacaaagttcaggcaaccaagaaatctctgaggatggtcacctgtgggaggactgtagcaggtctcagatttgcaaagactttgagagctgcacgaatctgaagtaaccccttctcaggcctcagatgtttttcattgttatcccatttgtaccttaagttattattataccaacatgagaaaatgactaaatgagaaactgtatttcccaaaacaataattaagagccaacaagattagtgggaaaagagagaagacagaccctccaatggctccaagaagcactgcatctgattcttttgcagctgagatagtctcctccggcaagggcactccgaccaaatccaaagcagctcctccaatgggcatctcacggaagttaaattccactcctgatacagagcacagacgcaatgtattaggcaatctccgtggcctttgagcccaacccacgattgtaaatcccattcaaaatctcgccaatttctaatgctcacatctttcaattccaagcagaaaacagtagtccccaattgaaatgaaacagcaactaaattaaataagaaagggaacaagagagagagagagaaccttccaaagatccagcttgctgaagcacatttttggcaatggagacaacctccggaccgatgccgtctccgggaaggagagtgatggtgtatcgttttttaccaggggaagcaacagcacatcttactctaaagggtgccaatgactgtttacttacagctctgaacgtagccggaaccttgaccgtccggatattcgtctgcagagccgccgccatttcagggagaaaggattgattggtctttttcggattttgaaaccgcaagtcaaatggatactactagtacactcagactttacttctttgcatttatgggtccttttttgcacattgttttattttcagaattgaccccaaagtttttaattttgtaaatggacaccttacattaccacatacaacatatatatatatatatatatatatatatatatatccatttattagcagcacctcacagaagaaggagggctcatcaaatacttgaagagccgcacgaagctgcaacaaggccgttatcggcttcaaatgcttgggattgttatcccatttcggccttcaattcaaaaatccaaactttagatgaatccaaacttgagatgaacgaaagttatggtaataataccataccatccaacagctccgagaagaagagcgtctgattgctttgccctgatcaatgtttccttaggcagtggaactccgacaagatctaaagcaacacctcctataggcaactcctcgaagctaaaatctatccctgatatccaaaaacacgatttcagttgggaaaatcaaattaaattaggcaacaggatgagaaagaaggaaccttcaagagacccagctaaacaaagaacgtcaacagcgactgggatcacttcgttaccgacgccatcgccgggaagaaccgcgatggtgtaccgtttctttggagtgttggcggcacatctgatcacagaagctctcctaaagctctgtttggttgcggacataaacgcaaccggaatctgggtactgctgacgtggatgactcccgccatttactacaacaaagactacaaggagacctggaaagaacttttgtgtttataatcaaaccaatattaaccgttcgattatttattttcacctctggatggctcaattatgatgggcctaagaaagattcgtagaagatagatcggcccaaatgttccaaatattaacacaagtccagcgggctttgggcccataaatggtattcgggtcagattttaaaatgggtattcgggtcaaaattcgcccgttagatgatgaaccctaatttcgtgtgtacagggagcggagaggggaaacaagagaatgctcttgttgcggcgactcaatcgagttcggattgcttccccttactccgttcggcttctgtcagtaaaacctatttcaaatgtcgatgatgcgaagtttcgatctcaggaagaagaagatcagtccagttacgatcagaaaacagtatgcgaagctctcacatgttacagcaacgattggcaaaaggcgttggagtttttcaactgggtcgagagagaatccggattcagacataccaccgagacattcaatcgggtgatcgatattctgggtaagtatttcgagtttgaaatttcttgggctttgattaaccgcatgatcggaaacacggaatctgtgccgaatcacgtcacgtttcgtatagtctttaagcgttatgtgacggctcatcttgttcaggaggctattgatgcgtatgataaattggatgatttcaatttgagagatgaaacatcattttataatctggtcgatgcgctttgcgagcataaacatgtggttgaagctgaagagctttgttttgggaagaatgtcattggtaatggttttagtgtgagtaatactaagattcataatctgattcttcgtgggtggtcgaaattgggatggtggggtaaatgcaaggagtattggaagaagatggatactgaaggtgttactaaggatcttttttcgtattccatttacatggatatcatgtgcaagagcgggaaaccgtggaaagctgtgaagttgtataaggaaatgaagagtagaaggatgaaactcgatgtggttgcttataacactgtgattcgagccattggagcgtcgcaaggtgttgaattcggtatcagggtatttcgggagatgagggaaagaggttgtgaacctaatgttgcgactcataacacaatcattaagcttctatgtgaagacgggaggatgagagacgcgtatcggatgcttgatgagatgcctaagagaggttgtcaacccgattcgattacttacatgtgtctcttttcccgtttggagaaaccgagtgagatcctaagtctgtttggtaggatgataaggagtggagtgaggccaaagatggatacttatgtgatgctaatgaggaagtttgagagatggggatttcttcagccggtattatatgtgtggaagacaatgaaagagtctggggatactcctgattcagcggcgtataatgctgtgattgatgcgttgattcagaaaggaatgttggatatggctagggaatatgaggaggaaatgatcgaaagagggctatctccaaggagaaggcctgagttggtagaaaagtccttggacgaaacgcttgtctgtagagaatagataactagatatgaagaaactctttggttatgtgttcaaaacagacatgaagcaatagagaagcgtccttttggatggagaaatctccccaaggtatatcatctttgccataaagtggctttgtttcaactcaaaaccgaggagaaaacactgaggttcattgagaaatctggttgagttgtgtgtcttaagccaaattccgaagatttggttttgaaagatggtttgtcgcctcctatatgtgttctactacatatacgtaccatttgtaattcactctctaacttaatttttttttgttgttgttccactctgtgacaaccacaggcattttgtggctattttgtaagatcgttaagctcaataaaacaccctacagaaacgatggatgatccatcatggatcacattcttaaaaccattggagaatatggcgttattattgtaatttgaaaaaaattcaactaaagaatacgacttttaatcttagcttacttttgtaaagattatgcagacatgacgtaacaattttctaaaaaaaatcttagttacaacatttttctttagaaaatgccatgacagagcaaaagcaggaaaagttggtaccagatgatcataaatgcaattttccgttacaaaattagagtagctctcatgtcagtattggtggtaattaatgccattctccgtttctttttctaatctccgagtcgaccctgagtataaagtatttttaccaatttcatttcaattttattgtataatcggttttatagaaaaaaatgtgattcattaatttaagttttaggtcacacagccaataagagttaaaagagtaattaattaaggattttaaaaactaagaaaatgaggtgaaaacttaaaacaaaacagaataacaacaatggatggtgaaaatctaaataaagggaacagtttcgtttcatcttctttgtccttgatttcctgaagaagtaaaagattcttattcatacgtttgattgataaacccttttttagagtttcagaaattagaaaccaaacctcccccaaaaaaacaaaaaaagagagagaattagacaagaaaaatagggagaataatggttaatagcgaaacgccgtcatatcatagtcgccggcgtctcctcctgatcaccgttgggcttctgatcacgtcgagtttggtttctttttctcatgcagtttcgtcttcttgtcatcatcgtccatcctctacctcatttcaaggtaaaagttttgtttcttttaaaccagagaaaccccttttttcttttggatacaattatacaaatttgattaaaaaatggcttctgataaaaatttaagaaaatgattttaggagtgaggaggcaaattttggaaggagggaatgggaccagattggtgttagcggcggagaggacacagcgacctgaccctctcaaccatttcaatatttatgtcgatggttggaacgttaccaactctcattacatcgccgtgagtctgtcttttttaattgatttcaatattctaaatgtcaaaaataaattctttccgtcaaacctatattttcttgaggcatttagacgattaaatcagtttttgggtaaaacattatctgaccacaacaaagatatagaattgtatttattttggaaacgattacacttaagtggacgtttagacaattaaaccagagtaaactaattagtagtagtatgatgctttggggtagataatgtagcaattgatttagttaagggcgaaaattaaactacagaaaaacgtgattttaaaataaaaaaaaaataaatgtgatgttctttgtagcaaaatttcgaaaatcgtaatggttattgttttgtctttttcagtccgttggattttctgcagttccattcatagtaatagcaatcgcgtggttcgtattgctcggactctttctcatctgctcatgcctctgttgttgctgttgtggctgtggccgccgcaactacggctactctcgcgtctgctacactctttctctcgtcttcctcctcctcttcaccatagccgccgtgtaacccatcattaaattacttaagaacttcaaataatcttataagattactaatttgtgacgcgatgtcgtttatcttcaggattgggtctgcaatgctgtacacggggcaaaacgagttctacggtagcgtggagaggacgtttatgtacattgtgaaacaagcaactggagttttgactaagctaacgagcttatgggactcgattcaatctgctaaagacattcagctcgatggacacaacctgtttcctcccgagtttagaggcaacatcgatcatttcaacaacatgatcaagatgtctaacatcacttaccccgaccgtgtcgctaaccagacaatccgttatctcaccggagcactaaaccctgtgtaagtaataagtattcgcttgatatgtttcttgcctcacaagctaaatatatatagaagctctgtttgagtatttgactcaaatgcgttttcctcaggagatatgtgttaaatgtgatcgctggtgtaatgctcgcagtcgcattcctcggcctttgtaagtcacaaatcaaaacatatctattttgatctgaagatacagaataatctcattatttttgtttctgtttttcttcttctttcgaaacagtgttttcgttctgtggattgcgagttcttgtctacctgtgagttacacttagactacgttgttatattatcatatcatatccaaatcaaatgtttataatcagtgtttcaattatatcagattggtaattcttggttggattctcgtcacagccactatcctcctcagcgccgttttccttgtattccacaagtaaatgatatttcgtcgtcacttgatctaattcaagattcaatttgtttttatcaaactaatgatgttacttaataaacagtgtggttgcggacacgtgtatggctatggaccaatgggtgcatgacccagcggcagactcagcattgagtcaacttcttccgtgtttagatcctaaaaccattggagagacattggatataacgaagacgatgactgcgacggccgttgacatgaccaatgcgtacacggtcaatgtcagtaaccatgatcagttcccacctaatgcccctttctaccacaaccagtctggtccgctcgttcctcttctctgtaacccactcgaccaaaatcacaaaccgcggccttgtgctcccgacgaagtcctcttagccaatgcttctcaggtacatacattttctcataagtgatacatatgtcaaatgttaatgttaattcaatttgtatatgtttttgtaattaggtttataaaggctatatttgccaagtgaacgcagaaggaatctgcacaacgcaggggaggttaacacaaggttcgtacgaccagatgatgggtgcgatcaacgtggcgttcacgttggaccattatggtcccttcttagctagtattgcggactgtacattcgttagagacaccttcagagacataaccaccaagaactgccctggacttagcattacaagtcagtggatctacgcaggactcgcgtcgctctctggtgcagtcatgttctcactcatcttctggttgattttcgtcagggaaagacgtcaccgatctcaaaccaaaaagtctatgatccagatgaatagattttaattagtggagccagcccattatggactcggcccatattatcacccctttttttttttttttggaaacgttaatgatatatggttttaaaaataaagtcgtacgtgcaaaggaattcgtcaatttttttttatttgttgttttttttgtgcaaacgctcttttattgttttactcggtttattaacttttagaaagtggatagtctgtaaatcaacaacttatttagactattaacttcactagatagctataatagtattgatgtttttttcctggtctaaaaatataaattataaacttttcttttagataatattctacttgtataattatttactaatttcattctatgagaataagaggtgagaaaaaatgttgaacattctaagatacatgacatgagtaggtttttcaataaagcaaagccattgaatttgtcaacgaacgtcgccgttggacccccaaactaaatgtacttagtaattgcgacgactagttggggctagctaggcaccatacctaattgctatttgtgaaattctgacgtgtcggattgctatttgtgcctcgaggccggtgcagaaccaggtgtcctgccgtttcaacttgcaaattattgttttttttccgtcctcagtaggtaagatttttgagtattttagttaaggtccatatgtagcagtcaaaacaaaacaaacaaaaagttaggccccctctttaatttatttttatgcaacgataatcctgtaattgtcggtttttgactctataatgttttttaaatatgccatgggaacgttaagatctatgccaataccaaagtgatgtatcgggcggtccacgcgggacgaagtcacagtcaaatgacctcacgtgtttcaagcacaaaaatcttaacaagacaacaatttcctctcttacatatttgtaccataaaataaattttcaaattaagccaaaaaaataacggaaagtgtttgattggttagtgcttcttataactgtcgaatttcagacaaaaaataaaatagaataggaacaaaaataaaaaacgtaggatttttgtcattagttgtgaataatactaagaatctaactgagacccacttgcaattcttcaagaatttaatatgattagtttcaaaagtaatgctaaacctcttgcgaatcacgctttttatcctcttgagtttttttttaaaaaatagtatgaaactactataacgtatgctttaaatatgttaaaaaatatgacgtcattttgaagatgtttaatgctttaaatagaaacacaccaaacaataaagtgagagtgagtgagtctgattcatctcctctgtttaagcaaagcacttttctaaaatcccacaggagaagagagatcggaagagatgacgaagctggcggaaaaatcgggaagcagaccaccgtgggtgggattagcggcagccgcatgggttcaggtctcggcgggaagtggttcgacgttcccgctttactcctccgctctcaaatcggttttgggttttagccagcagcaggtcacgatccttggcgttgcttgtgatttgggtgaaaacatgggtcttcttcctggatacgccagtaacaagcttcctccatggtcgatgcttctcatcggagcttcctcttgtttcctcggcttcggcgttctttggctctccgtcagccaaatcgttcttggcttgcctttttggctggtaacaaaactttatccattcctaaatttctgattcgaattgtttcttcatactccttaaacgccaaaatgagatacaacgaccaagtttgtaaaatcctttattttgggggttttcataaaccctagattgcatcgaatgcttaatcaagtttagatcttgttggtttgtgtcatcgattagatttataaactctattgtttcgtgtgaactcaaaagtttagtatttgtttgtaatgttgttgttgacagctttttgtagctctagctttagctaccaatagcaactcgtggttcggtacagcatctcttgtcaccaatatgaggaattttcctatgagccgaggccctgtggctggacttctcaaaggttatattgggatcagtggtgcagcattcactgtcttgttcagcatggtgcttcaccattcagctatggatctgcttctgtttcttacggttggtattccggttatatgcttaactgtgatgtatttcatccgcccctgtattccggctactggtgaagacccttctgagcccatgtatttcgcttttctgcttgtcactagtatactgtttgctgcttatcttgttgtgacgactgttttgagtgaggtgtttatactgcccagcatactcaaatatgttcttgtggctatcatggtgttacttttgttgtcgcctcttgcggttcccatcaagatgacacttttccgttcaaatgccaagagctctccactggggtcttcagacaatctagccaaagaggaaggtactcatgaagaaccgttgctgacaccttctacctcagcttcaaaccttgggcctatctttgagggagatgatgagtcggatatggaaatacttcttgctgaagcagaaggtgccgtgaagaagaagagaaaacccaggagaggtgaggatttcaagtttggccaagtttttgtcaaggcagatttctggctcctttggtttgtctacttcctcggcatgggttcaggtgttacagtctcgaacaacttggcacagatcggatttgcttttggtattaaggacacaacaatactcctgtgtcttttcagtttcttcaacttcataggccgtcttgcttcaggtgccatttctgagcactttgtgaggtgagaatctctctcggtctaaaataatctcgctgtttctctctgggaaatagctgtttcatacgactctcctatttgtctctcaggtcaagaacgcttccaagaacactatggatgggagccgcgcagctagttatggtgttcacattcctcctcttcgccatggctatcgaccacaccatttacgttgcgactgctctaatcggaatatgcatggggtttcagttcttatctatcgcaaccatctccgagctatttggtcttagacattttggaatcaacttcaacttcatactgctgggaaacccgcttggtgccaccattttctcggccattctcgcaggatacatctatgacaaggaggctgataagcaagggaagatgacctgcattggtccagattgcttccgagtaacattcttggttctagccggtgtttgtgggcttggaaccctgctgagcattattttgacagtgagaattcgcccggtttatcaagctctatatgcgtctggctcattccggttgcagccgcaatcaacgggtcattgatatatccagagagcgagaggctgtttagatgaaagaatatatataatataactacactcatagatgctatctacttttcattattattataggctcctactgtatcgtggggcatttttgtttgggtgtattctaagatttgtaactcttgtgttattccgctgtaaccggccaaaaaccggttggaagaacctatatgtatcggcttcttgatgaggttgtaaggttgttgtttgatagttgtattacagtcactgatccaacttataaccgataaaaatggaaacaactgacacagacaagtaaaacaaccctgggcttagactttacagtgaaaaatttggatttccttacagcatataatgaaagattgaataaaaagtaatgaaagagccggaccacaagctgtactagactatcagctaccggaaaacgagactatttgagcaaccaaatctgtttgagagaagagatgtcatctttcttcatcatagctagcttttggttttcttagagatagtctcgacctttcttgttccaaaccagcaataatgctctctgtttctctcggccgccagtcccaacgtacattggactttgaagtagtccattttaaaactctcatgaatcatgatactaacatgaaagtagacactgttgtggttggtatacttatgagttttgaggatcggatcatcaacatcatcgacacaggcaatgagttgattcttcatcttaattaaactcattacagaaaaaaaggaaatctttgtgtgaccgttaattgtgaaagaaaaaagaaataaaagaaaaaaggaaatatttatgtgacccttaattgtgatttagcaatttccttccacttcaactcatatttaaaacaaaatatatatatatatatatttatttatttttttactaaaatttaaaagtaatttaacagttaaaaactttaagaatataattaataatattcatctaaaaagtggtccacagccaataaataaaaaggcagataaatggagacagagaatcattcagaatctcaaaaatgtcaattaacaaaactaattagcctaatcacacactcgaaaaatattagccaaaactcaaatctgtggtggaagatcccaaatcccctcggcatctagctagttaatgatttcaagtaggtttaaggttctgaaacatggaatcccacttaatcttctcttctacatctttgtttccccaatgattatcatcatcttcataacctgaagaaacctttggattggagaagctatcgagcctacaaggagttccattcgtcaacaggagtctctcttccttgacgccatttccgttactcggcatcaccaatctcttcttcctcgcacttttccatctcccgttcccgctgctactcgtgcttctcgacacaacgaccagagcccgggacgattcctctcgtcggatccaggccctaacatgctcggagaagcatttcccggtcttcttgatggcgatcaagactctgaaaatcgaacgagcggtgagcggtgaaggtttccgatcacgccgagcaagcttcaggatctcgaggcggtgcttagcgattgagatacccatgctctggagaaattcgtggttgaagtaagcaatgtcttcgtactcgagctcgttgtttgagaaagagagaccgtactcgtagatgagagaagcttcgagatttgttctcgagagccatgagaaccaatccataatgtttatgagatttacgaatctgtagaacgtttggtgagagtgtgtggttttggaaggtaaagtcgtttggagtatatataaaggaaaggagtgagacggtttggggttgtttttgactttttcaaaagtttcggggcttgcttagtaaggtgggtgaacggatgggctaaagtggaccaaagtaaaaaaaaagaagaagaaaatgataaagagaagttcacacatcttttagcattgaagaaaaatgaaaaaggatgcaacacatggagatgactgagtgagggtttgtccattaatcacgctgtaggaaatggagcacattatgcttctttttttgggatcacactatctctaatagagattctctatcatctttgttccatttactattcaaatatatatgggtaaaaccgaatatattacagtaataaacttgcacccaacacaaattttgctttggattgaactatattttcaatttaattgaaaaaaaaaagataatgagagcggctaatactcgatcttagaacacatatgcacatgcaatgaagattaccgtgacatcaaaatatttagaagaaaataaatataattctgatggccatatagatatattatagtattataggcatcttccgctgtctacgtgatcaaattaattaaacaatgttacttctttgtattaagttaaatcaatgccttctcttcgttaccagattaattaactaaatagttagtattatctttgtagttaggtcaactaatgataacaaaaaaaaactactctgaaacttaaaatccagcttcttctgtagtcaactaatatatttggtgtattaattcgtgtatataaatacattactttcattgttattttattatttaagtcaatgaacacaaattcaatttttttaatgattatcctcagtttggcttttttaaattaagcaggaagataaattattattgaggtcttaagaggaggactatacgagccattattatcgagtgctgtgataacaaagacatcaacacgagtagtagtggatgcaatcatacaaattttcatctatcacaatcagaatattcgataaattaatatttatatacttagaagcttatagttcatataaaaataataataatatagatcaaatggaagacacgattggtgatcacgggtcatgcgcatgtggaatttaaaagatattgttcatatgcacttaccagtcactagcttccacttctagtttcggtttgcccacattgtatgccatctactgataatgatctattttttagtataccatgtaagaactgaattagaagttttgcttagacaaatccgaggcaaagtcgttggatcaacatataattataccattttttaaaggcacacggatcagaggtgtatttaagttgggtattagagatctttagtgataacctttgagtctaacttaagtttcgttactttgctttcatttcaatagtaccagtccgaatgattctaacaaccaccttaatatattcattggttatttcaggtacctaattctggttaagagtagaccaactcggtttttcaaactaaattcatctactaacatcagtccacaaacgatccatgaacacataaaagaatgattcgcagccagaaaaaaaaggaggagattttctgttaagaaaaacagaaaaaaaatgcgtatatataataaaatcataagaatcaggtgtctgtatacatataattcacaaaccggaaatctttaggcttagcctgaacaaacgccattgatcgacatcctaaaggtgcatgtagcagtcgctgaagatttccggttcggtattggactgagaatctctgactatataaatctacaagatcctggaaaactgctataagtatcaatctgatttgctctcgaggctgtaaatgttgccaatggttccaacaatgctaaccactacggccaagattagcatcagccatgacactgatctttccacgaagcttaacgaattgctctgtttccctaaccgcaatgcgatcagagcagggaatgtaaaaccaagtgaaacagctgatgttgcgcctgtgaatttgaaagcagtccatatgtttggtatcatcgttgagccaatgtaaataagagccagcaagaccacagtgagtcccaaagatctctttttgctttcggatagaggaggcgagccttcaaacagtaaggtattgacggtttctctcaaggagaaatggatcacagggaagacgagaactagatgaagaatgtagccgattctgacaatgtaattcaccgcagagctgaaccggataccgagatcttgatcaaagttggtcaagatatctgattcggtgtccttgccgaagaggagataacccgatacagcagttgaagcgtagacaacaacacaaatggctgttgtgattctcccaactcggttcatcttatgaggtgatcgaccttcaagctcgttgtatatcggctgaacattgaagtgacaaacgtatgcgtttgacataatcggaatgaccacaagaaggtccaaaattgcttgtttggaaccaaagtcaggagacaaccttggagggtcgatagttccttcgataagcttgatggtggcgacaacaaaacagacaaccacaaagacaacagcaagagcaacagaagcagctgatgtaacgctcaaggaatcaatcttgttcaaagcacagagaggagccaagaagatgaccataacaatcaaaatcaacactttacggtgatcccagaacccattccctaaccattgatccaaaaccccaatgtgatggagagaaccagacataacatcgcccataataatcaagtaaacaacgagaacgccaccattgttgacaatgatacaaatctcagacaaaaccctagcggttttccccaaagcgaattgaacaacctcgccgtaggatttggacttgtaaagaacagaaaatctaaccagaagctcaacactaatctcagacaaaagagccatgaggataatcaaaacaaaccctagaaccaagccgagaactttcatggtggcgggcaatgccatgatcccggcgccgataatagaagtggtgagattgaaaacagcaccgtaaatcccagatccttgattggatgatttgccatgaacgagtgggtaatcagcgacatcgaaatcgagatcatcagcatcttcacccccaacaccattacgggcatcgtcaaaatcattgacgaagctttcttcatcagaaggaagcaacttgtttctgggtttcccattaaccgtcggtttctgtaactcaacgtaagaagttttggaaatgacagagtaactgctatccattcgcaagatctgctctctgattttatttttaaaaaagaaagaagaagataaactttgtgattatccgagatcgaagaagacgaaagaagagacttttatgaatctcgaccaagagagagagagagagagagagagagagattgttcaaatcggattaagggtcaacgtctcaattggtcgtccttcctgcctcgtcggcgagcgatacacagagatttgataagttttgggaaacttctatcttccgattggtgcttttacttcacatgtggcctctttattaattgattaatcgtctttttaaacttcaataaagtacctaattaattgcggattagcaattaaaagtgtcacattaacttatgttaggcgtttggtcatgtttcagaaagatatacatcgtacatgtacgcttgttttccaatagattctgaggaaaagagagactttataataacaaccaaagatgaaattattttggattgaatggatcattcattactcatactaaacaaggaatcccattcttattaaaatgttgcttgcaagttagaaataacagaaatccaggcactcaaaaagaaaacagaaacaattgacttgggaactatgcgatatgggtacaagaaaaatttgatcaccaaatgcaaacagaatctccgtcttctctacaggtactttcttgcaagtgcacgtactttggtgtcaaaatgtgacgacgttatccgagaaccaggaagatacaagggattcagaagaatctgcatgaacaaatcatttggtttccatcaacaaaatcaggacagaacaaacaactgcgaattcatttcatcaagaaaatttacctttatataaagctcatgcacctcttgaaagaagctcttgatgccgtcctcattccgtgaatcatgaaggagcatcagtcgggtatgtgttgataaattaaggaagaaacagatatttacaactgcataagaatctgttatgcacaaaagccaatataccagcctgacactttttacatcaaatttttatttgcacttaaatctcaaagggtctaacgaaaaaggatatggcctgcggtaacatatactgacacaaccagatcgttaaacctgtccactgacttcaagaacctgaagacttgtatgacaatgagatggatcctttaaaatgataatatattttcacaagagactttacttacatggcacttgtagtccatgctaggtcttggacaacatctaacgctgcatgtaatataaattggtgcaactgtgcagcatcttctctctgccaaatagagagaatggtgtaagagactgatgtgcacttatcgactagaccacataccaattggttgaaacatatatctaccagctagatgaaaagatcaagacaaaaacaggaaaacttccgtcagtaagaaaggataaataactatgtgatagaccagaaaccaatgagtcatgcaataagcaatagaagatcttatagaactatattattagaattatctagtaagaacaaggcctgcttgcttggttatgtaaaacaggttgaaacgttcctcgaccaaaaataatttaaacaatggatatagcaacccttttcatatcactagccaaataaacaacggtgacaattaataaatgaactttgcacctctcccgtgggttaaatctagagagctatactatgaccatgaaactaagtcaaaaagaaagagctggagccagaacggagcaaaactgcaggaacatgtactataaacttcaatgactcagattcatacaaatagagaaagtggagaaagaaatgtactttagcagcagatccaacttcagcttcatagatgggaatatcattccggcccacaatgataaagcaggcagtgttagccatagaatccctcgtctctaaataaaggaaatcctagatcttgtgtctcctgaaataccaaaatcaaaccccagatttcaacatttttcttctattctttaataatccaatcggaaaccaaaaattctcaatggaacactaggagcttcgtcatcaatggaacaatttcctcttgttaccaaattctcaccaaaaaaatcctgtgatttatgcggagtacgatacagctagttagacactaaacaaaaaatcacaatatggatttacctcgcaatgccctcccaatcgattcaatcacaatttacacttggtaaattacacaataaaattgacaaaaatcgacaacaagacaacaaaaacaaattcgtaaattaaagaatgatcactgcgggatgcagattcaattaacgatctaagaagcatggaataagaaatgggggtgagagaaaaatccaatcttaccaaaaaaagaagtaaaaccctgtgaatctgatgtgcgtatcgtttcttctttaccatcaacgcatcttatgtctagacaaacattggagaatcagattccttgggatgtctctcgtgtttggatccgtgctaaatacttcaaacaggtttgattctgtcgtgtactagtttaggactatacaccacgagaactttttagatacgggtgagaagtttgggtttgtgacctgaattttggaggaagaaaggggatctgcggtttgattcaatattgggctattgggtctttaacgggcttgtcatttcgttccattatataatagtgaaagtggctaaaagaatgttgttttagtcccaacgagatgggaagacgactagaaaccaaccccaacgaattaccaacaagtttgatatgtagtacatagactaatttttatgaaaaaaatagtttggtctatgacaaaatattatccgtacgttttgaaataaaaaggtgtcattacaaatcttttggttaattcgctcaaaagtataatgaagtttgatagtagacaaatatcaatccaagcggcgttgggataacaagagaaccgaaataaataaacaaatttgatggtgtcgctgtcgtcgtcatataacaaaaatcaaattttcccaacaaaaaatagttagcggcaatgtcttggatacgtggaaattagtctatctatatatacatacgtgcttatttgggctaaataaataaatagtgcaaataattatggcttacaaaaattcacattataattataatggcaaaagacaaccgacaacttctccccagaaagcaatcagtatatcgcctttaattaccgcgatatgagagaagagaagaagctgataaattgaagaatagactgtactagtatcaaaatagcaaagcaattaagctttttaagagaagaagagaggacatacataagtggaaagtaaccaatagccattagccaacacccttctcatctacgtttttatttatttattaatcaacttaaagtttggttttaaaatttaaaaaactaaccatgattaaacaaaacaagtagtacaaacaaaaatagccaataataattgtagtagtttcacatagtgcgctttattaatacttagtggactttagtaacttatgaacatactcactagtataatttgacactattttcctttcattggttacagattttctaaccaattgcattgaccaactgacctaaaataatgttttgtagattccaatatttaaaataaatacaattattagaaaaatcaatgccttctttggaaaaaaaaaatcggtatgtggctctattaattgaaaacatattttatatttgactttgttttttttattgaaagtgatttgatagcatcgttgaatgatttagtaatatctcccgtaagaatttaattatcccgttagactttttaacagaccagccagatgggaccaacgtgcactgttttttggccggagaatgtataaaaaatattgaagatgcagtgaacactgaccaccattcacttctccacaacttttaatgaccggtttacaaaataaaacatagtactatataattttcaacgtgttagtctgatttttatatttctaaagagaagtactcatctatttttgagctattaatctattacaatttgtgttctgatctggagagtggagagttatttcaaagtaaagtatgtagattgtagaggatctatcgagaatctactcatttaaaatagtttgacgttgtagcaaacaatttttttgtcattgatgatttgtattgtttgtaaatattatttagaaaccaaatcgaatttttagttgaaaattataatctgtttaataagtgataattacatcatgcacatgtacctagtgactcataatgaaacgtatcataatggattgacgagtagttgtctgatattgacatcttaatttataacttcccttttcattgttaatgttccttactgtcttctgattgataataaagacgttgacatgtcaaaccacataattatttgaaaaatatatattatttcttcagattttcatcatttgttataagtctcgataagacagtttttgtttttttaacaattttttacaaaaaacttacgaccataatttagttcaggcgaaaatcagtgaatcattaatcatatttattagtttggatttttatgtgtttttctttttatgtatttgaggatttttcagtttgtgaaaacaaatctaatatgcttatttgatttcttctttatttgctgtattcttaatatatcttgcagagctaaggtaatactcaaattttttttttccacacgtaaaaactcatatttatcagtttggaattactgtattctttttagtagtcctctcactcgccatggcaagaagaaggtttttttttcctttttcttgcattccatgttaatcagtatttgaataaaaaagcaagctaaatcggcaaatgaacttatatccaaataatcaagatatcaatctgtgtaagcattactagaaaagtagagatactcgtgttaccgtgtaaattaaaagaataaaaatgtgcttttcaaaagttatatacttttcttgtgcacccataactttagcaaaagcaaccatcatcattcttgagcaattaaaacaaataatattgatcttcatttggtgccaaaatactttacggtaatgacgtcaaactcgatgtttcttgtcaaagtctgaaagaccaatataaaataacactagacacattataaaattaacatattggttcattgtaattaaaccgtcgaatatatataacgaaaataccaattacgctgtgaataaacaaacaaaatcattttattagtcatcgagtaaataaattcgattataatcctcaatagtcaatatatatatagctcacatcacattatgcgattaacaaaaacaatccaaaacagttaaatgattagaaattaaacgagtctcactaaattattaacgactccaaatcacgagaaggcttaagagttatcatgtcgggagaatttaactgataacctcttccattatctctcaatcacgtgatttttgttcaacgagtaccgcatctcaagaataaaaatggcaatttaggtaaatatttgtcattttcaagggcaatggaacttaaagatgcatttcagaaggaaaagctttgtcgtgttatgagggaaatgtggggacgcagctacttcgctttcaaaccgttggatgaatatcctttaaggttcatcgtacaagatcgacggcactcaccgagggtgtactcatgttgtgacacagaggatcatgtctacttggagtacagctagcagctagagattctgagccgataacgtcgagaattgtagccggctaagtcgtatatgctggtttaaactttaatctgtacttatatataagtcaacgtgcttatcaaaatcagctcccttatcgtgtgataggtgcattgtcttattagactccgttatccgtcaccttcgcatattaaaatcactttttattttttggttttaaattaaagtctccatttctgcaagattttaatgttcgtataaataagcctgaagagagagagagagagagagagaaaacttgttttttttttttccattagtttttttcttactttctggtcgagagaggagagtccaaaaaacccaaatccttggcctctttcaatatcaggagagagaaactgaagctctggcctttgtttctgaaatcgatcgtcttcttcttcttcatggcaagtaacgtatctaggtctttcatttttggtttaatatctaaatcgtagcttttctgggtttttgatttttgtttttgtctcatggaagtgaaaaagatggccattttaagctttatatttaattcggtggacaataataatactaggaagacctaatttttgtgtagcccaattaaacactaattaaatccgccggaatagagacttttggagaattttccggaggatagttgtaaagatctagttatatactgtgtaattaagaggctgtgtctattttcattttttaaaaataataattaaatggaggaatatctgaaacccagtaaattgggatgatttgatggttttgtaaggttatcatcgtcgccattatattgatatgcagatctggtgggtttttctgcatctgacttgatagctttatcggactgagtggcaaaatcaatcatgtcttctctgagcagagagctcgtcttcttgatcttacagtttttagatgaagagaagtttaaagagactgttcataagtatgtccgatctctcttttcctttttgtcttttattaggcattattattaacttgattgattattaattaggcttgaacaagaatctgggtttttcttcaatatgaagtattttgaggatgaggtgcacaatggtaactgggatgaggttgagaagtatctctctggttttactaaagttgatgataatcgatactccatgaagattttcttcgagattaggaagcagaagtatctcgaggccttggataggtaacttgtgtctctcaacaacaacaagaatcaaatgttttcatattgccaatcaatcacacctgctgctgcttctatctaggcatgatcgtcccaaggctgtcgatattttagtcaaagatttgaaagtgttttccacttttaatgaggagcttttcaaggaaatcactcagctcttgaccttagaaaacttcagggagaacgagcagttatccaagtatggggacacaaagtccgccagagctatcatgttggtggaactcaagaagttgattgaagctaatcctttattccgtgataaattgcagtttcctacccttagaacttcacgcctcaggactctgattaatcagaggtattctttgtcctttcttgttcacttcaacaaattttcttcttgtcagctactttaactccttgtttctatgtggctacataaacctgcagcttaaattggcaacaccagctttgtaagaacccaaggcctaatcctgatattaagactctctttgtcgatcattcctgccgcctaccaaatgatgcacgagcaccatcccctgtcaacaatccgcttcttggatcattaccaaaagccgagggatttcctcctctaggcgcacacggggtaggtcaatttccacctgatttttcgtattttctataagtgccatttctactgcttttggttctagctctatagttacctttacatgccgtgcttgacttacctttatgtctttagccttttcaaccaacaccttctccggttccgacacctcttgctggttggatgtctagtccttcctctgtcccacatccagctgtgtctggaggacccattgctcttggtgctccatccatccaaggttatttgcttatcaaatgtggtgtttctttataaaagctgtgtggaactatagtcttaaattttatcctcgcctttttttcagaacctttaagtttcacctgtgatctatgtaacatgttctcctttttggttcttagcagccttgaaacacccgagaactcctccttctaattccgctgtagactatccatcaggtgactcagaccatgtctcaaagcgaaccagacctatgggaatctctgacgaggtgagaaaaatcttaattaatattatatattttcttatcaataccaattttacataattggtagtactagtttagactttaaacgtatttcttctttctccccatatgtaggtgagtctaggtgtgaacatgttaccaatgacattcccggggcaggctcatggtcataatcaaaccttcaaagcacctgatgacttgcccaagacagttgcacgaactttgagccaaggctcatctcccatgagcatggatttccatcctattaaacagactctgctactaggtctgtttcttggtctgtatgcatatttcatgtaacatacatcatcagaaattttgtaaaaccagaagtttcttgcttcaattttctttgttccagttggtacgaatgtaggggatattgggctctgggaagtcggttctcgagaacgtctagtccagaagactttcaaagtttgggacttgagtaaatgttcgatgcccttgcaggtgtcttcttttgtgaaaatcaaccagaatattaatatctaatatctatttgaaacttcagtgaccaacaattctggtctttataggctgctttggtgaaagaacctgtcgtttctgtcaaccgtgtgatttggagcccggacggttccctattcggtaagacttgagattacaaatgctctttcaaccgatttgagtattcatatgcgcacgttttcaactgcaggagttgcttattcgagacatattgtacagctatactcttatcacggtggtgaagacatgaggcaacaccttgaggtgtgatatagtttacaacaacattttaggagtatttctttcatttcctgtaatgaaaatcattttttattatttcagattgatgctcatgttggcggtgtcaatgacattgcattttccactccgaacaagcaactatgtgttactacttgtggtgatgacaaaaccatcaaggttcagtattttttttcttctttcatttccttaactcttgtttttttttttttttgttggaactctaaaaacagactaatcaattctgtgaattaaggtctgggatgctgcaacgggtgtaaaacggtatacttttgaaggccatgaagctcctgtttactctatctgccctcactacaaggaaaacattcaggtaaagtagcaatatttatacggtttcatttttgctaagtacaagttgaaattcgtttctatttggttttgacttgtttatttcttcttctgcttaagtttatcttttcaactgctcttgacggaaaaataaaagcatggttatatgataatatgggttctcgggttgactacgaagctcctggtcgctggtgtacaacgatggcctacagtgctgatggaactaggttataacatgattctcatcatctttatgttgtggttctgttctgtatcgtcatgaagtgataataaatttaaaatctattttttattatattcacatggataggctattttcttgtgggacgagtaaagatggggaatcgttcatagttgagtggaatgaaagcgaaggagctgtgaagagaacttatcaaggattccacaagcgttcccttggtgttgtccagtttgatactactaaaaaccgttatctcgctgcgggtgacgacttctccattaagttctgggatatggacaccatacagcttttgactgccattgatgctgatggaggtctccaggtatgcaaacaaatacctcgattctccctgggaaccgaatgttttcatttgcagccatcatggctctctatgttttgtaggcaagtccacggatcagatttaacaaggaaggctctctcttggctgtttccgcaaatgacaatatgattaaggttatggcaaactcagatggtctaaggctattgcacacagtcgagaacttatcttctgaatcctccaaggtactgaattttgtgctcactggatcttcaacaagcaaattactaacccccaatttgaaatttcttcaacactttatttttcatgtacatttgcagcctgcaatcaacagcattccgatggtagagagacctgcctctgtcgtttccatccctggaatggtacgaaaatcgatactttttccgtcagtttctctatctcttggtctgggtccaatcatcgttgttgatcacttacctttccaacagaatggagattcgcggaatatggtggatgtgaagccagtgattaccgaagaatcaaatgataagtctaaggtatggaagcttactgaagtcggcgaaccctctcagtgccgttcattgagactccctgagaatatgagagtcaccaaggtactaacacatagactgacataactgtacttatatggcttgattctaatgactcaaaacttgagcagatatcgagattgattttcacaaattcgggaaatgcaattttggcattggcatcaaatgctattcatctgctatggaagtggcagcgaaatgaccgtaatgcaactgggaaggtacttatggtctaaaatcttcctttaagatcgccaaaagagttgaaatcatgatgaaattcaatttgagattttgtgtaggcaacggcttctttacctcctcagcagtggcaaccagcgagcgggatcttaatgacaaacgatgtggctgaaactaatccagaagaagccgtaccctgttttgctttatcgaaaaatgattcctacgtgatgtcagcatcgggaggaaagatctctttgtttaatatgatgacgtttaaggtaaaatcccagctacagacagcactatgtctaatgtatgcaaacaatgcttcatctgttacatttaattgtgttgttggctaagcgcagacaatggctactttcatgccgcctcctcctgccgcaacgtttcttgcttttcaccctcaagataacaatatcattgcgatcgggatggatgacagtacaatacagatttacaatgttcgtgttgatgaggttaagagcaagcttaaaggacattctaagagaataaccggcctcgctttctccaatgtattaaacgttctggtttcgtctggagcagacgctcaggtgctgattcatctcatgttttgtaataaagaatccaaatccttagaagtcttagtgtgaatcttttggtttttgtatgcagctttgcgtatggaacacggatggatgggagaagcagaaaagcaaggttctgcaaattccacagggaagatccacgtcttctttgtcagacacgcgtgttcagtttcatcaagatcaagtacacttccttgtggtccatgaaactcagctcgctatatacgaaacaaccaagcttgaatgcatgaaacaggttttagtctttatatatgttcattctctctccttgcatctgagtaacccttatagaagaaagaaatgtctttattttgattccagtggcctgtgcgtgaatcagcagctccaataacacatgccacattctcatgtgatagccaattgatatacacaagtttcatggacgctacaatatgcgtcttcagctctgcaaaccttcgattgcgttgcagagtcaatccctctgcatatttgccagcttctctcaggtgagttaatgaaatgaatataaactagtgcaatgttggatcatgaatcttgagtcttcatgttgatgttttgtgcagcaactcgaatgtccatccactggtgatagcggctcatccgcaagaatccaacatgtttgcagtgggtctgtcagacggaggggtccatatattcgagccgcttgagtcagaaggtaaatggggagtagctccaccgcctgaaaatggctcagccagcgctgtcacggctacaccttccgttggagcttctgcctctgaccagcctcagagatgatctgcttcagtttcttactctgttttttttgtgggggttttagatcttttccgatttattattgttttgtttgtgtggggggaagaaagcattctaacaaggtaaatgaattaatagcttacaagttcttcttaattggttaattcgatgttgcttgcctctgatattttggtcttgagaaatatcagttttgcaaaaggacgaatttgcaattttgcactccgaatctaagcacgaactaaggattgaatgccacgtgcagcttcgagataggtttggatattcgttttgagatacgaaggaagaattactaaggcctatgcggcccacggcccacagacttatatatctacaatgataaatatcttcaaaaatagtaattttgagaaaatattgagaagagacagagaaaaaaaatcgagtgaaaattatctggtgtgtgtatctagaagaagctacagagtgggacgaggtttaaactcgccaatcgccattgacctctcgcttgctttctttaactaaaatggcgacgctatcaacactagagattgctacgaccttcctctctttcaccgctcctcgttcctctgccgccttcaactatcgcttttcttctgccgccgtctctgttctctccaggcccagagctaccaccgtttccgtcagaacgacgccgtctttcttctattccccggtggtccgccgtcaaagattctcatctgtctccgcctcagctacgcagactgaagattctgatgtcaccactaagattccgccagataaccggattccggctactattatcaccggttttttgggctctggcaaggtcagtcagtgtttctcatcatttcatatctattctagggtttaaaattagccctgctaagtaaaagaaatgttggactaattatactgcaatgttttgtttttccacagacaacattgctgaatcatatactgaccagagatcatgggaagcgaatagccgtgattgagaatgaggttagcttattatcctcgcctgaattcagttataatggtgttgctttctaattcatgtttcatgtgaattctctcagtttggtgaagttgacattgatgggtcacttgttgcttctaaatctattggagctgaggatattgtgatgctcaacaatggctgcctttgttgcactgttaggggtgatcttgtcaggatgattggagaattagtcaataccaagaaaggaaagttcgatcatatagtcatagagactacaggttgggaaagggggcattttcatttagtatgcttagagaatctggggaatgagtaatgactatcttatgtttattttcactttttaggattggcaaacccggcaccgattatccaaaccttttatgccgaggaagaaattttcaatgatgtcaaactggacggtgttgttactctagttgatgctaagcatgctcgtttgcatctagacgaggtcaaacccgaaggtgttgtcaatgaggctgttgaacaaatagcttatgcagatcgtatcatagttaacaaggtaaccaaagttttgaacacaattgtctcaaagagaatgtgatagtttttgtgatcttgagtggttgaatctcttctatcataagattcaggtcgttcctctctcaaatagtttatagtttacaaataaattcatttgcacaaatggttttgacacgtcctaagtgatggatccatatgttttactcaaatatattgagaagttatcggttgtattgtttttgttggcatatccaatttctgaaaagtgactgtactttgttgcagactgatcttgttggtgaggcggaattaggttcggtggtacaacgcataaaggtcggtctcacatcttcttcgtattcatttatttcactagatgattatatgttagtctctcagaccattcttggttataatgttaacgtatttgctatggttatctacagacaataaacagcatggctcagatgacgcgaacaaagtacggaaatgttgacttagattatgttcttggaattggaggttttgatctagagaggtctgcttcttgtttaacttatgataatattcagtttggtgtcttgtagcttcacacagttattaaggtgttctttgctttatcagaatcgaaagctctgtgaatgaagatgataagggagatcaccatgatcacgaccatgatcatcatcatgatcacaaccatgaccacgaccatcatcaccacgatggacatggtaagtttattaggaaaccttgatttagttatattgattgcatgctccagctttacgaacatggattgttggttctggtctctctcatcacaacctaatcagtctctgattcttaaacctcagatcatcatcatcattctcatgatcacacccatgatcccggtgtttcttcagtcagtatagtttgcgaaggaagcttagaccttgagaaggtaatatagataatatgcagcttgagaggcacacaaaagtctcatataaaacgactgtttgatgaaaccgtatgttaatcttcaaattgtgtcacaatccatcaggcaaacatgtggctcgggacgttactgatggaacgcagtgaagacatctacagaatgaaaggtctcctctcggtccacaccatggaggagagattcgtgtttcaaggagtccatgacatatttcaaggatcaccagacaggttatggggaagagaggaggagagagtgaataagatcgttttcattggtaagaatttgaacagggaggagttagagaagggttttaaagcttgcttgatttgatttttgcactagctctatgtatactgaggaaatggtcaccggcgttgttgtaactcgattttaagtgccaaaggatataaacgtcattactcttggttctcctctgtgcatcaccattgtggcggagatatttccaacttaagtagagaacgtagtagcaataaagttatgcatgtttgttgtgttcatatttgggaaaaacgaaaaaaagaactttgtaagaaaataacaatagagatctcgatgagatataacaaaagtcgatcaaattatagattcaacttacaaaaaaaacaaatgtttggtcagacccatgatccatgtccacaaaaaatctaagatatcttccacttgattactgatcaagtattttgggaatgaacccgcagatcaaaggtagtaaactggatccatgagaaacattctcgtgcaatggctttggcatggcaattttacacccttcagaccgtttaggaatctttctgactttgttgatgacgtttccgaaactttcatttaacatcagtttcttcaaaacagaacagttccttacaaagtatatagctagttccatcttgcttgatgtctcactcactgtgattggtaccttcaattgaacatactcgagagatgattcgaagcaatgaggaaccaatgacagattaatctcctccttctctggcaagcagtcaaattcctgatgatacaaccaaacgaaaatttcgttctttagttagggttttcaaaatgctattataggataataggaaaatgatgcgcaccaagaagagggaatgtagattcgggcaacaaccaagaaatgtcggaaacatttcccaagaagattcagagaacgaagcatgcaagcaaaacaggttcgagaactgaggtactagttccgtttccgattcaacgtaatcatggatcatctgttagaaagatatcaactgtccataagaaaattgtataaaatgaattggtattgactcaaatgaatcatgtgtacctctagagttcgagcagagattgtcaattcacggacagtggatatggcggtgataaaatcatggataacagaatcttcatcctccgcatcaaagacaacatcgatgttcacctttgcacaaggagatatattatgtattatgaagctctcagattggtaatcagtgatgctcatgtattccagtccgggggtatcaacttcaacattaggatcttcacattcgtcataatcctcacgcatagactcaagtttgaagcgccttagtgacggagagcgcacagatacatctccgagttcatcatgatcatgcgtgattatggttaattcgtcgagaaaagagcagcttgatatgagagtcccaagaatggtctctccgtcaaacttgaccgcctcgagatgcatagtcttgaggcaaggtaaagaaaccaattgtgctcgaggagcatcgaagactacactatagagagttaaattcaccagagtcgcacatgagtagagcgagacaggcatccgaactgagtcatcctcaatattaaccttgctgagaatagttagatctttaagtccacgtttcaccacatgatcgatccgagacacaaattcagggtcacaatgctcttcaacgttgtaaatccacttgaatctctctatcttaagattaccatcaaactgcagaaagctatcaaagaaatcttccaagtccgactcatgagggaatttactggagtccaagtccaaggcaggaacgtgtctccagagatttctccatcgctttgacatacggcttgtgaaaacggattccctcgtagggactttcgagaggatctgaagtagcaaatcatctgctaaaccacttatccaatcggattccgtcaacttgctcttctttacagagggttcagccatggttccttcctcctctgcctaaaccatcaaaaatcagagtatactctcacgactctgtcaccacaagtaagccaacaaattctagaggtgtctagaaacaaacaaatgatatttattgtataagggtactgaaataacttactgagttaggccttttcccgcgtccgccgttcattcaaagaggtgatgacggcgagagagagagagaggagaagacgtcgatacgaaaacaccgtcgatataacttggcggcgaagaaagagcacgaaggttttctcgctcgctatctgacttctctttgacaatttttatggtatatatattcaaaatcaaagagtcacgccccttggttaattttaataactgacccttttttttcgcttggcctttattaatggtggatttattatatttaatgataattacaataatgataaaatggttaatttacggcaatctgaaaagaccacacgtagaaaataatgattacttttgctaactgttgttcttcattttaaatttctcattcaataattaacgcctaacagaatttcaattttatgaatatatactagaaaaaaatattttaaaaaatgcgtattaatatttctgttcatatctatacgataatagaaaaataaaaatgagtaatttaaaaataaaaaaacgacttttcataaacaaaattatcgtaaacaaagctaaatgataaaattaacaatagatggaaactaatgttacttggtaactcattaataggcccaataaacaactagattgacaaactagtaataggcccgttaagagtccatggacttgtatagacacatgcagccgactaatcaaatcatttaggaagtacattttaaatataaccttaatttttataagtaattacatagatatgctattagaaataaaattttaaaaagtaaattaatttatctctttaaagattaaaaagtcaaatactaatttaattaattaaattaaattaaaaaacaaaatacattattaattttcaaaaataataaccaatgaaaatcaacatataagatttgatatctaaattttaattaatttaatttaattagaaaaacgaaatacattattaatttccaaaaaagtaacctattaaaatcaacaaattagatttgatatctaaattatcatattaattttttattaattattatagttcacttctcatctttatataattcgatttttgcgaaaaataatatcatcattataaaaaaataattaaagtttttttgcatatgccataatttgaattttaaaaacgaatataaactgttcaatacatgaaaaaatattataacgagtaaaaaatagatttaagaaaactttctactgagtaacgggtcataatttaaaagatttatattcaatttcatacatattatattgaaaatttaaaatcttatatactataataattaataacatattagatttttttatgtgtatgatgtgattcaatttttaatacaagctggaaaatcttagaattgacaagtttagatcgatattaatacaagatggtatactacaggtgaaactcttaaattaacaatcaaactacaaatatataatcttaaacattaaacaatatagataatatcaataaaacatatacaactcacaatttactatacatttaaaatcaaataaaataatatcatatatttttaaatcatctttacaataaaagtttttagtttaactaaaatataaacctaccatcgatatactgcaagttaatatctagattatagggcttattggatctaaagacgggtcatcaaagatttcctaaactgaagcaaaatatactgaatactcaaatatctatctgttaccaaattataaacaaataagttcgtaaaacaatttaatattttatatacaaaatcaattaaattttaatcacataaaattagcacaaaaaagtattcaacgattaaaaatttatcaaatctctgtattatataagttttgatactatattcgaataaagtgtaatataccttttcaatttgtattttttaactaatttaagctaactaatatatttgctaatcttatacctatcaaaaccgactatcgtttcttatctctatagtatttttgcaagacttttttggtggatttgggtaaaagtgcattcgggtcatatggtacattcccctattaaataaatatggtgtactcctatgttattagctaaaatgtttagattataattcagagtcatatcattaataaaattaatgttaataaaataaatggctttttggcaagacggatttggagtgacgggtttttgaatcaacattaataaaaaaagtaaaatataattaatccaccgtttcaatacgggttaaatctttaatttattattttttaagaccactaatattaaacatatcaaatcatcctaatttagaaaaaattatataaaaccgaaaatgttatgtggtatgtataatgttactatatataaaattaaactataaaatataaatgtattagagaatgatacaatttgcaaaacttttatatataaaaaataattcttaaattttaaaaattactactttaaaaaaaaatcacgggacgggtaaagagattattgaacaggttttattttggaatgggttatatggtggatgtatttgaatcaatggccatgttcggcacgttaacgctgcgtcagggatctgcgattgaaatttaaacgtcaacaacagcaaaagaaacagaaaaaaaagaataagggtgtcgctgcggccacttttacaggggataccggtgtcgtcggcatcgctaaaaaaaacggcgaccatttttatagacactgcggctcttttcacaagaacgattatgttagtttccatacagattacatgcaaataagctataatttccggtcgccaaccgctgacgcagcgataacaaaaagaacagggcaaatatttttaaaattttaaaatattattaatatgctgttttaataggggttacaacttcagttttttaacaattgtctcatggattcgtggtatagcgttacttaataacaattataaacagtaaaatataaatattttataaaaataaaatttgcaaattttaatatatattacttttaaaaaataaatcgtcccgcgctataccgcgggttaaaatctagtaatttattatttccaagcaatttttgaacgaataatcctactatattatttgggaagtacattttaaatgtaaccttaatttttgtaagtaattacataggtatgccattagaaataaaattttaaagagtaaattaatttatctctttaaggattaaaaagtcaaatactaatttaatttattaaatttaattaaaaaacaaaatacattattaatttccaaaaataataaccaatcaaaatcaacatataagatttgatatctaaattttaattaatttactttaattagaaaaacgaaatacattattaattcccaaaaaagtaaccaattaaaatcaacaaattagatttgatatctaaattatcatattaattttttattaattattatagttcatttctcatgtttatatgattctatttttgccgaaaaataatatcatcattatagaaaaataattagagttttttcgcatatgccataatttgaatttttaaaaacgaatataaactgttcaatacatgaaaaaatattataacgggtgaaaaatagatttaagaaaactttctactgagtaacaggtcataatttgaaatatttatattcaatttcatacatattatattgaaaatttataatcttatatactacaataattaataacatattagatgtgattcaatttttaatacaagctggaaaatcctagaattgacgggtttagatcgatattaatacaagatggtatactacaggtgaaactcttaaattaacaatcaaactacaagtgtataatcttaaacactaaataatatagataatatcaacaaaacatatacaactcacagtttactatacatttaaaatcaaataaaataatatcatatatttttaaatcatctttacaataaaagtttttagttgaactaaaatataagcctacctgcggtatactgcaggttaatatctagattacaaggcttattggatctaaagacaagtcatcaaagatttcctaaactgaagcaaaatatactgaatattcaaatatctatctgttaccaaattataaacaaataagttcgtaaaacaatttaatattttatatacaaaatcaactaaatcttaatcacataaaattagcacaaaaaaaagtattcaacaattaaaaaattatcaaatctctatataagttttgatactatattcgaataaagtgtaatattccttttcaatttgtattctttaactaatttaagcgaactaatatatttgctaatcttatacctatcaaaaccgactatcgtttcttatctttatagtatatttgcaagatcttttttggtggatttggataaaagtgcatatcgtcctactatattatttgggaagtacattttaaatgtaaccttaatttttgtaattaattacatgacaatgccattagaaaaatttaatcaaaaacaaaatcttttaatgacatcattaagattaccaaaatcatttaacgacaatattcatctcttaattatagggtttattggatttaaagacgggtcatcaaagatttcctaaactgaagcaaaatatattgaatattaaaatatctatctgttaccaaattataaacaaataagttcgtaaaacaatttaatattttatatacgaaatcaattaaatcttaatcacataaaaattagcacaaaaaaatgtggtacattcgggtctatagtagttttgcaagacttttttggtggatttgggtaaaagtgcattcgggtcatgtagtacattcccctattaaataaatatggtgcactcctatgttattagctaaaatatttagattataatttagagtcatatcataaataaaattaatattaataaaataaatggctttttggcaagacggatttggagggacgtgtttttgaatcaacattaataaaaagtaaaatataattaatccactgtttcaatacgggttaaattattaatttattattttttaataacaattaatatatataaatacttaataataattataaactgtaaaaatataaatattttataaaaataaaatttacaagttttaatatatattacttttaaaaaataaatcatcccgcggtataccgcgggttaaaatctagtttcatttaaacttgttaagatttaaaagtatttgattatttattttgaaatatatgaaaagaaaataaaatataattccttacagtccagacatggaaacaaataaactttgataatctcttcaaattataaattataaatagaaacgttttcatcataactcattcagaaaataaaaaataaaaaataaagaaaagataggggtgaaggaattagcatgattttgattatgatgatacattaagttaattacccaattagatttgaaagtataattttcttgaagcttcaaaatgggtgagtaatataataaaattatgaagcctcgggaaaatgtaaatgaaattaagtagatatgggccagaccaacgatattaactgaataataattgtggactaaatattggactccgtaaaagcccaaaacaaaatataaaacgaacccacacgacacgagttattatcagaaacattactgttacaatgcaaacgcgcaccagtagagcgtatagcgcgtgtgtcgaaaatgcctagtctatatacccaccaaaaacgctgtttttagcctaaatactttattttaaaagaaatcagcgcgtgggagaacccatgaacatttgggtttgtttatccattgttttgatatttatttatttcggttaattccaaaacaaaggattgcttcttcttggtatttttgactaacaaatacttttttttggcgacacacttatgtatagcaaaactaaaaagtatgaattcaaacaaacaaacaccggtataatatgtttacactaaactaaactaggagaagatgtttaatttatgaatgaaaccaaaattggaattattcactaaatgacgatttcgtaaactcagcttaacatttattgacgataacatcataaagagctcaaaatgatattgtactacataaaagaaaattctcttccatactagctataaaagatatttcaaatgaaacaatagtattattggttacaagtaaatcatagtgtacctcttaacaagtcaaataacttaaaaagatcaaaatatgcacaatcattttattaacaatccatatatataactgggaaaattaaagtggcgtaaatttgatcaatttatgtagctagccggtgattataattgaatatacgatgatgttccgagacaagttagttgatcaaaatattaattcatacatatccatccaacatatgttgctattacaatttacatatgataatcttagggcaggcctcataatatatacattaattggtaaaatctggtcaccaaatttacgagcagtagtaatcaatattagtagtagataacccagtttttgtttttttggtctgaagtagataaccccatttctatccataatatctttgtatttaagatacgttttcacgagggccagccgtaaaattgaattaaaatcccatttgtttataagtttatagtaaaatatagtagcttcagacaagtagtactaggaaaataaatcaacttaatagaagaaccagatctgtgaacggagaaagggacatatgagtttgtcaaagtcaacgatagaaacggttacaagaatatccaatgaaagagagccacgtgggagatgcagctgaatttaagtaagaatgatctcataatcttgaccatccaccaataaaaagcttaattaatacatcatcatccaatccggtggagtaaatgcgtagatggatagagaacggtgaagtttccaacaaaatctctgactctgattcagctttctatattcaatcgttcccattatctcattttgtagtttagttttatcctcaacaaccatcttcttcgttatattccttgagataacaacaaagcatcgttcttcacctttaccaaaaagataaaaaaaaagaaaaatggcaaaagaaaatggatttataggatcaatcgatcaaggaaccaccagcaccagattcatcatttacgaccacgatgctcgtcctgttgcttctcatcaagtcgagttcactcagttctatcccgaagctgggtaaaactaatcaccttttcttgtttaaattcatgtattcattggttatgactagtaaagtgagactttttatagtggatggatcttgtctgattggacactatttccgtatctttgaagctccatcggaccaaagttttgttttttgtttttctgtctgtgtgtctaagcgatctgttcgtttttccgttgggtcttgtcttcctatttgatttcgaatctgtgttcttgttcagtggattttggatgcatatatatatatatctctagtctcttgttattgatttatttaaaatgtatttgaagatgggtggaacacgatccaatggagatactggaaagtgtgaaagtgtgcattgcaaaggctctcgacaaagccactgccgatggacacaacgtcgacggtggcttgaaggccattgggcttacagatcagagagagactactgttgtttggagcaaatccactggccttcctctccacaaggctattgtctggatggatgctcgtaccagctccatctgcaggtacataactttcattgatctctttcttttcttcttgtatggtttgtctactatcatcttcaggattgctgagggatttggtttctgatgaaagctttctttggtgatccttaattacaggagactagagaaagaactctcgggaggaagatcccattttgtggagtcttgcggcttgccaataagcacatacttctctgccatgaagctgctttggctcatggagaatgtggatgatgtcaaagacgctatcaagaaaggggatgccatctttggcactatcgacacatggttgatctggaacatgactggcggtatcaatggcggccttcatgtcactgatgtcaccaatgcttcacggacaatgctcatgaacctcaaaaccttgagctgggaccaggacactttgaagacacttggcataccggctgaaatcttgcccaagattgtcagcaattcagaagtgattggagagatctgcaaaggctggcctattcccggtatcaagattgctggatgtcttggtgatcagcatgctgcgatgttggggcaagcttgcagaaaaggcgaggcgaagagtacttatggcacaggtgctttcattcttctcaacaccggagaagtgccaatcaaatcaggtcatggtcttctgaccacgttggcctacaagctcggtcctcaagcacagacaaactatgcattggagggttcgattgccatagcaggagctgctgttcagtggcttagagacagccttgggataatcaaaagcgcctctgagatcgaagatttggcagcaatggtagattctacaggaggagtgtactttgtgccagcgttcaacggcttgtttgctccttggtggagagaagacgcacgtggtgtgtgcattggaatcacgaggttcaccaacaagtctcacattgctcgggctgtgctggagagcatgtgtttccaggtgaaagacgtccttgactccatgaacaaagatgcaggtgaaaagggttcccttaataacgggaaaggggagttcttgctcagagttgatggtggtgccacagctaacaaccttctgatgcagattcaggtatgatgatgctctcctctcttctctgtatgaatcagattctgatgattgtgttgttcgaacattaatctcattctcttatctccttgaaaatgttgcaggctgatctgatgggaagtccggtggtgaggccagtggacatagagacaacagcattaggagcagcctatgcagctggattagctgtgggattctggaaggaagcagacatattcgagtcgggagagaaggcgaagaactccaaagttttcagacccgctatggaagaaggaatcaggaagaagaaagtggcgtcttggtgcaaagcggtggaaagaacatttgatctcgctgacctctctatctaaaacttgaagaagttgatctcagagatgtcctctttatttaccacagttgggctctgtcttccaagtcacataatgttttaaggtctaatatatgtttgattaaaccgtctttgaatgatttatacatcaatgcttaattctgttggaagtaagattgcatcataataagacatgagagacatcttgtattcgaatctctcgtgactacttcaaacacttaactttgcgggaaaccagcaagtacctgtgttatctcatttatctaactgaagcatgaacttacactcatagtatgatggaaccacaagttcgataaaacattgtctatcacattaataaacaatcgaaataggcacaaacaatcgaaaatcatttaacagaataaacaaagtcagtcttttctcggtggaactgtgatgatagcttttacaaatttcatttgctttcagcttctttaggacaaagcacttctcactaagcggatgcaagcatcaacaaggctgaaaccacctctctatctcggacagaattagggtttttcttcatgaaaccacactttgaattctcgatttctctacactgagaccaagcgctcttctccatctctaagctcgaacgaaactcttattcaaaagaatctccaattccgtccgatttgtgcttcaaaattaaaaaagaatcatgttccctcgtttttcttcacctccaaaactgggcctctctgggccttaattcgtttaaagcagatgggctcttaatgaaacttcccttgaccataaaatttgactcttacgttgttgattttccttttcttcgagtcaacaggatcaatcaacattgtcttagtttggttgaccaggctcaacatttgattcaaagtgactttttttcttatgatttttaagttttcagaatttaaaattagataacttcctagtaagggtgttagttggatacttttttcatcagaaatttcatagcaattttttctatcagttcccactgaaacagcgagaatctaagaagaaaagtggacaaatggaaatgaagaaagagttgttctgtattttactcaagcctaaaaggaatactaataaagaaggtttcaatggaaacacaagaaaaaaagttcatagagtcaaatggaagcaaagctaaggaacaaagaaaaaacgtgaagtgtgaagaaaaaggagggaaaaaatcttcgctttttgcctacttccttcacgcaacctaaaactaaaagcctattaattttgttctcttttctttttcagattgttttatatgttgaacatttctatttatctttgtcctccactaattaaatcggatgcatgatgtattctctcatattaacaatataaaatgtaacgtaagaagaagtacttttttaaaagtaatcacaatctctaacaaacaacaccaaaaactttatcgcttatattattataattactcaacaatgtacggatttgaagtcatttaattttttacttttcaaaatttgaacctccataaattttgtaggggaaagttctgatgcccttctcgtcacagcatttatttctttgggaaattcaaaattcgaaaattcataaaatcatggacgtgtggtaattacgcttattacatactatcatatgatcacggccagggatcaatcattacgcagttgcctacaaaggttataacattaggttttcttttgtatcacatatcaattcgtcaaccacgtctaaagtatataacgtttgtgtacagaaaaatatatagtgggatattatagactagtggaatgctttgaaaatatcaattaagttgcttgcggagtcaacaatgaaccgactaaatgtttcattatcacgaattatctatatatgatgttcccaggtattgaattggcaacacttctaataatgtatggttagcttgggcgttgactttgacattataatcatctagaaacagttttaatccgtattcaaatcacaaatattagtgaattattagcaactaaacatataatttattttttagtcaacttatcaactaaagattctagacgtgcaaagtcaaacaataatagccactttggttaattactaaatttaatatgttggcaaaaaatgtcaataaaaacacacaaacacacaatagggtcttctttaaatatatgtgcagtaggcagacgaatgtcttttagacaaaaacaaaaacaagcttctcttctctcttctcttcttctctttagtcatctcaaccaccatgagtcaccagcagccgccgagctatgccaccgagccaaacaccatgttcgttcaagcagacccctctaatttccgtaacatcgtccaaaagctcactggagcaccacccgatatctcctcctcatccttctccgccgtctcagccgcacaccagaagcttccattaactcccaaaaagccagcgttcaaactccacgaacggcgtcaatcatcaaagaaaatggagcttaaggtcaacaacatcacaaaccctaacgacgctttcagccatttccaccgaggattcctcgtctctcccgtctctcacctagacccattctgggcgcgcgtgagtccacattcagcgcgtgaggaacaccacgcgcaaccggacaaggaagagcaaaaagccatagcggaaaaagggttctacttccttccgagtccgagaagcggctccgagccggcaccggagcttttgcccctgtttcctcttcgttctcctaacggcactaatcaccggattcatgaagataatcatcgagactcttagtcttaatttagaacgtataatttgagttttaggctatttaatcgtaagttggggacacgtgatatttgctgttgctttttactatttttgttagggctagttaatatccgttttccatttaacctagacttttttcatccttcattaaactttttcttcaagggtcaactatttcggcgcgtgtactccacttccttttggaatacaaaaaaatcttattctatacgcggcaattacttacattagtcaaggaagacatcatttcacgagcatataaatcaatgtctttttagatcttttatctaaccattaatacgtgggatccaaaacacaagctatctagtttctaaatttcttgaaaaaagataatataaccacaatgctcaattttcttttggaaagtagtactttttgacaagtctacaacgatcaagctagcgtaatcgtcttcgtatcttaaatttttccttacaataaagttgatgatgtgtgtatggagatgaatgaaaagataggctaaataggccgacttataatagatacaaaaatgtgttgactttttggttaagaaagaaactaaagaagctaaattctctgtacagtttaacactgctccaattcaattgtttgtgtgtgtcataaagctgccagccgttggatttaatgacaaagctgtgacgcagaacgaagcggcgcctatttcctctgcagattcaacggctacgatttaattctcctgctgaaaatataatgcacttttcttttgtatcgatattaaatagatgttacttgtaacagagggtgtctctgcatctctctttaaagtctgttgtcagtctatcttcgaactctgcccctcaggtgtaatccatatttcaaacctctgctctaatcctagccatccatttgtctcaagtcccatccaaaagcccatttaaagatcaaaagttcatcattcaaaatctggtctatttgggcctcgagtaaaaaaattaataggactagtctatgaaacccattaaagttcttggataccaaaatcaaggctcctttaataaactttaaaagttttgtgtcgacacatgtttcgaaagtttgtttgcttgcaattatataattagatcagttttgtatagagaacctaaaagttcaaatcttccttttgaagttttgtatagagaacataaatatttggtaaagtgacactgaataaatacaatatttctttattttgttgttcatgaaaagatttgtagattgacacacgagactacccattggtttgttgcggtttaggttcaaactccaaagatgaataggttttccattagacctccaagaagcagccagcttgaacatgaccaccgtgtgtttccaattttacccatcgtgagctacttaaatcacatatataccctacggtggcttcaccgtatccagccaacgccttcccgttgccgatcacaatcagcatcccgggcctcaccgctacgtaagtaacattgtacacatcagcagggatctggcccaccttttgccacttgtcatttagaaacatcatcacatcgccaccccagcacgcgtacaaatccccaccggcgacgcaggtcggagggctaacggtatcgccggtgtcgtcgaggaagtcctccgtaagtggaccccactcccacgtagacacatcgaacgattcggctgttttactaaactgcccctgttcctcagtggcatatccaccgatgacgtggaatctgccagcatggaataccgctttgcactcgtctcgttcccgcgccatatccggcaaaaacgtccacttgtcttctgacacgtcatacaccatagctgacgtaagcgcacatttctcttcgttgtgtccacccgcaaccagcaccgtccgatccgaatccgaagcgcatccgaagaaggacctccgtacacctggcatggttgcccccacgcgccatttggaagtgagaaaactgaagacgaataccgaatcatgggcctgccacgtaatcgggtcaagcccacccaagacaataagatcggatccaacggaaaccaatctgcagaacagaggaagtcctttggtttgaccaggaatcggaggaagctccgtccaaagacccgacccggattcgagaacagagatccggtattcaggcgtagcgatgatctttccggatccagcggggtcgacacgagcctgagacagaataagaagctcttggctatggcgtgaagcttttcgctgatgtaaaaactgagagagagagacttcacggttccaggctctgcaaacggaggcgatgacagggaactgttggtaggaggagcgaaggagacactcgcgagcaacgtcgtcgggaagattggggataagttccatcgagaaagtatcaaagattgaagctttttgtttatctgtttgttgagaagtgaagaagattgaagctttacaagtagagtgagggatattgtaatagttttggtaaaagatgaaattttggatcgagacaaggttgaagaagatgatgatgatgatgggaaagaggagagtgtgccgctttatagatatttgaagataagtgtttctagaaaacttgttgattcattcatcgtttctttctttttttaatataatttttgtgttgtatattttatagtttaaatcaaataaaatgaagataacggaatttgagttagtatgggcaaaaacggttaatggttgtgtcttgtatttaaagatggagactttggaccaattgggacaagttgatggatgtcatatccaagttcattttctcctgatatttttctggtcaggtttagtaatttagcattcgaattccagtcaacaacagattatatatctaaacatagacggtaaaatatactaccgaatatcgaattaggcctttcgactaatactgattttagattttggatgttgttttgacatgttactctgttttctatctaatgctatagagtatacacttactagtgcgcacaacaaaaaacagaataaaattaatctatcatttgttcgtttaagaataatgaaaaaacttaaaacctacacataaaagactgtactttttgaatggaccttctgaatctataatttagatcacaccctttctttttctcatatactaaaatattaatcggaccacacacacccttttgctttgtaaaaatttaaatcgatctcctaattccaaacaacagaacttgttttttttttttttggttttattataaacaacagaacttgttctttttttttggttttattataaacaacagaactttgtggcaacttgtatactaaagtgatgaatatatgtatactacacatacacgacggcaaaatattattatatgaagaacgcaaaactacaaagatgtttccttcgcattatgtggtacataatccaagcacataatagcgtttaaagattaatttatgttttattaaaatgaaatccaaatccagctcaaagactaatgccttggagtctttcctctaaaatccttctagataatttctctaatttcacttgtagaatttcccttttttttgacaaaaatttatttgattcttatttggcttgttgttgtctgtatgtgtgtgtctatctttggtcggccatatttaaatctgtattgatactcgacatctttaaactattaccgatgaccaaagttatatgtttttataaatatagctacaatatatacagatatttgtcgtaattatatatgatctttattaaacttcttaacgcgtgtgacataaagaaacgaaatgttgtctccgtactcaaaagcgtatactcgttaatcaaagcatttttgcttactaatttaatctgtaacgtatggacatttatgtacaatactctatttttcgtagctgtacaaaattgaatacggaataatacaatatttagggaattagtagcatgttccatgcaggttggactagttctagtgtccgccatatgtataaagctgtaaacatctttaacgcatatatttggtttattaaaacaatagttttgtgattactatgacccattcatgtatttgcatataaatgtagtaacttggagttttggttaattagacaaaagatactccgatctaatattttttaaaataagctaattgaaacttcaacgtgggataaaacgggctgacaaaaaaaggttcaacatgaagaaaataactctaactgataaaacggcacggcgtctgaatgactataactctataaggtgacaaaacgacacggtgtcaacatccttaaaggggggaagaagagtcgtcgtgattcgtcgggtggctggctctttgataaatctaaacaataaacgacggaagcaatccgattcttcgtagataggaatagcccgaatagactggtactgggagtgttggacccacttcatcaatgttcgtgtcgatattttcaattctcatactcttctttggtcgcgttcaattattcaaatctcttaacaagtattttcttcacaagaaaattcgccaagcaaattggaaaaaaacgaagaacacacgaaataactagccaaaagagtttaattacttctttatatatgtgatcgttatttatttgcattttactcgtttttttttccaattatgtcgacacttgattaaattagaagcacaaagcctcgaagcaaaccggcaaagataataacatctgccagagctaagtaataaggtttacagttagatgatcgagagaatatgagctttggcaccgcagaaaacgctggccaattacataggaaaatgttcatttgaaaagatatatagctaaacagtatatatgtctcaaaagatagtttgactcgccgcatctttctattaggcactcgacgtcttcatcatatatgcattattattttgcatattaattaatggtagggatcaaattgttacgaagacatgcaatagatcatttggatattcatgcggtcgacatcaaataaaacagctctcgtacatacagacaggataagctcatgaagtttcctttggtatttatttttacgtccttttccatatccattatgatagttatccggtagctgatgtggacttcgtatcttctactgccagtaattgtatttctttttttataagtgcgcggaatatctattttcattcatcctcatcatcatatactaacatcaacttatctacctttttttttttaagggtttgctcgaggtttcatgtcattttttggaaataaattttgacaacatgatttaatgttgaatggtaatgaaataagaaaatcaagatgattcaatactcttcgatatatataaagtgagcgagagggaaagcacagagtatgataaatcaactgaatttagctaataaaacacatttttttatattgatagcgtcgaacagaccaacgacaacacaacggtcaaattaacatggcttaagtcaagcgaggacagaacgtgccaaagccattgaatatattgaatccttttataagcatatcttatttagtaaccacgtgagtcgtgacgatggcttattattagtacgtactacgtaactttgaagaaaagaagccctgaaatttcggaaatgggttcaaaagtccaaaaacagtttgcggttaaagaagggtacgttattttttttataacttttttttcattttttcatcaaagaaaggtacgttaaagacaaagtgaagacgtagtttaattttgacatgtttagactcattgatattcagaaacttagtcctggaattgtgttgtagcaaaaacaacaacacaacgagagaaagataagataaaagcatatatgatgggtttgtgttgcggatgttacgagaatatgagacatgacacatcatgacatcaatgatatggacaagcatacgatatatttcagaagaaataggatgtttcctccccttgcaagctttagcttctccagtgcattaagtctaattcatcgagctcattgtaggtatacgaaggatttgactgagctaacttaggaaaaaaagattgaaacgaggaatgatttagtaatggtaatttgaccttggttttgtacttcttttaattcataaaccccctccaccgtaaaaatgaaacattagaaatcctaaaagggcagacaagttgatgtccaaaaaaaaagaaaaaagggcagaagagtaaaaacgcgaatgaaagagtcaaagcaaaaaattggtaaaaaaaagcgtgaacggcaggattcgaacctgcgcgggcaaagcccacatgatttctagtcatgcccgataaccactccggcacgtccacctttgctagttgaatcatttgttaaattgaaaacccgtcattttgatctgattttgtactgtatgttgacaaattgaatagtctctgatgatttcgatcaaagagaagccacggggggagcgctagcacttaaaggttcctcgctttcttctcaagtttatagtcttctcctctgtgttggctcatttacatgggtagatttagttttcgagggttttatggcgaagttcgcgatgttctgttaattgcaatgtctttcttctttttttttttttttttttttttggtattcaattccaattttccagtgtgatttgatctgaactcgaattcaaattcagtgctactgagttatgttaaaaccattgtccattgatttttttatgttgaaattgaaaaaaggttataccattcgtttgtattaagatttgtctttcttagggaatgttttacattttttgcagatttgcaccgttttctctctggctttgtgttgtgctagatgcgatgcaatagcaatattttcctggagtttcaagtaactagtggcttaggttcataatagtgtttctttgtaggacgaaagctgtgttagtattctctccactgtaaaggacaagatgtctcagaagcgaaatcttccttcttggatgagttctagggatcccgagattactccgagtaagtctcattgtaagaagcctaaggatgaaggaccaaccgaagagcacaacagtagaaatgccccttccaacaagtcagaacacgccgagccaagttcaaataccactgaattctctaaacttatggtttgtgtgtgtcttcatggtcttgttgagactcaattatcttaagctgtcatgttagtttatatgcttttgtgattgagttgaaggttaaactatgcaggaaggcgttgtttttgtactttcgggctttgttaatcctgagaggagtacactgaggtcacaagccttgacaatgggagccacctatcaacctgactggaacgctggctctaccttgttgatttgtgcttttcctaacactccaaagttccgtcaagttgaaacaaatggtggaacaattatctcaaaggttacctctttgactcttcttataagggattgtgtgcggatttgaatttctcctttttgctgatattttatatgatttcactgtctccaggagtggataactgagtgttatgcgcagaagaagttggtagatatcgagcaataccttatgcatgctggaaaaccatggaggaaaagcagtagtccccaagatgctaatcgaggtaaaaagaattatattggaaaggctttagatagaatctccgttttaaccatcctgaggttcatcaaatcaccttgtttttacgtttatgacaagagaaaagcttttcttattgcactgcttcactccgatgtttagttgactctgtgaaccttaattgattgtattcagaaaagagagaacacctgtctaaaaaaccagagaagcaagtagagaaaaaaacagaaacaaggggaacaccatctacctcatccaaggcatgtttaaatctgatgatttggttaaccaaaacgaaccgtattttgctccaatcaatggtctatgactgtttatttccatatgttcacagaatagatcagcttgcaatcttgtgaaagagccattttttgttacagaggtgaagaaatgggccagggatgacctaagtcaaaccatctcatggcttgagagtcaggaggaaaaagtaagggaattaatatgctctttcaaaagacatgttttcttgattgtatgtttccgttattctaaagccattgtaacagccagaaccaggcgaaatcaagcgaatagctgcggaaggagtcttaacctgcttacaagacgccatagattctcttgaacagaagcaggttaatatctctgaagtctgaacaataatagttgccgcctgtgtacatttttggatttgttaaactttgatcagtttctttgagaagatcattggttgaatttattctcgaatgttcttaattttaggacattggatcagttacagagctatggagctttgtccctcgtgtagtgaaggagcttggaaagatggaatcgtcttctaaaaaggaaaattcaacagcatcaaaggaagaagtttgcaaacaagcaaagtcgtggaaaaagatctacgaagctgagctagcaaaaccgggcgaagatgaatcgacctctcgggttgcttgtggctatgacagtgatatgaccgttgagatgactgaagaagagatcgaacttgcttataggaacgtttctttagagtgtctttagatcaaacttgtttcattttgcatatgatctcttaaggaattccaagaattcttgttatactcggtttgttcggtttgagtaggatgttattactgataaaaatttgaaataatccggtctgcttggttcggaaagaatgtttctaattagaatttatttatgctggtttggattcgattgagagatgtaatcggttgcaattaataagtcggtttgatttgatactttttagtgtcgattgacgatgaatttgatcggttaatacaaatttgatttggtcaattaggttcagatgtctccagttttgaaccggtttggttctatccaatttaataaccgttttgtaatatcagacaaacgaattgaaaccggaaacatgtaccgatatggttaggatcgaagaagattgattgaagacaagaccctaatttatttatacccttattgggttttgtcttgtgagagttgtgcctttctttgtttcgcagtagggttgaagcggatagtacgccacctctatctctctctcaccctatcgaactcgcgaagaacatcttcttcttcttcttctccgtcttcgtcttcgcgagctctctcagtagcgcaataaaatgggggcttcgcttcctcctaaggaggccaacctcttcaagctcatcgtcgtatgttccgattccctctctttctttctcagtttttactttgtcttaaacatgcgatgtgatgttcctggtcagcagaaattggaatacgatgagttttatctgctctattaaaccctaaattaagttaatcgtcaatgtgttgggtcaatagaaaaattcgttgacatatgaagtaaactgtgcggagttgtggttccttaatgtgttaatttgatgtaccaagttcttagcttcagttacttttgactatcggctattattagacctcgattgcttctgggcttttttagtcgctcagggattcgtagtttactttgaagaacttgaaaaccaagctttatcaatatatatatggtttcagcatagattttgggtttaaccattatattgttcaacctgctttgaatagttgacctttttctttatgtaattttcgcaagtaagtacatcatatatagttattctgagtaatcttataatgcagaaatcatatgagactaagcagtacaagaagggactcaaggcagctgatgccatattaaaaaagtttcctgatcatggaggtcagtttgtcttttatctaatatctccttctattcctttgtgatttagtgctaatctttttactgctatctaaatacttacaactctatactacatacatcaaccgagatctcatgacttgtaggtctactaggcgcttcgttgtcttgtctatagtcttaagaatcaatcactgttagaatttttattttctttcttcctattagagcaaataaattaactttttagtacaagggtaatgcttggtattgtttagttttgttagtagagaccagttctgtttcgtgttaaacgcagttcttgctttttttgatttgtcaacccttttcgttattcttttctttcttttaaaacttgtcgctcttattgtttgtgattttcagagactttatcgatgaaaggactgactctaaactgtatggaccgcaaaactgaagcatatgagcttgttcgacttggagtgaaggtttgaatatgctcttcaataatcacaactttattccttagtttccaaaatggtattttgttttcagggtaacataggatttatatacttcaaattttttcatgcagaatgatatcaaaagccatgtttgctggcatgtgcttggtcttttgtaccggtcagacagagagtatagagaagcaatcaaatgctaccgaaatgctcttagaatagatcctgataaccttgaaatactcagagacctctcacttctgcaggtaattatgagaaaaactagattgaggtgaatttattaggtgtgccagttattctcaaagctgatttttcatactttttatcactttactttgtgtaaagcttgttccaattttaatctcttttgatgctttcaatagttaatcatattggttactttctttttcctaggcacaaatgcgggacttatccggttttgtggagaccaggcagcagcttttgacattgaagcctaatcaccgaatgaactggattggctttgcagtctctcagcatttaaacgcaaagtatgttattgtccttgaccccataaatctaaatatgttaaaccactttactcatttgaatggaatgctagtttttcctctttggactattggctagctggttaatggcatatgatttggaattatagtcttgaacactttaaggagtagatagtggatgcctatgttggtacgaatcttgcatcagatttttaggaaataatataccaatgaacatacagtagaattttctgtgaacatcttttctttactagtaaaagctagccatgtatatcaaccttgatctcttaacttgttctattttctcctgaaaccagtgcttctaaagctgttgaaattttggaagcgtatgaaggcaccttagaggatgactatcctcctgagaacgagctaattgaacacacagaaatgattctatacaaggtatcaaccagaaactttacaactatcatatattgactgttgtctttctaagtttttttccctgaaaaatcatgcttgcctaaacgggtttcacacatttttctcctattgacgaaaataccaaaagtacaagttggttgatacaaaatatggcttactgcttgtatcatacattttgtgaatcacacctgtattcttttgtgacaaaagcataactctctcaagtataattggatatgaaccctggaaagtctctccaagccacctggagtggtggtgttctgttcactctttccccctgaaacttccctgtttgagcaacctacagttggcattagcacatttttcatagctgtagctgcaggaaatctcatctggatttttttttcgtttcaggtttccttgcttgaggagagtggttcttttgacaaagctcttgaggagttgcacaaaaaagagccgaaaatagtaagttcacaaaactgatggttgaatgtatttggataataggatgcacacataatagtagatttaacattcctcgtttgcttgtttgtaggttgataagttgtcttacaaagaacaagaggtatctctcttgtcaaaggttggtcgtctagaagaagccaataaactctacagggttttactttccatgaaccctgacaattacaggttttttccttgcacttcaaagtagctctaaagaaattatctgtgtattttttcgtttttctcaattgtcacatctgtttgccctgcttcattatctttggcattggcggtctatacctttgctactctcaaaggcttctatatatttttggtactgtcaattttttgtaaacaaataaaaagtgcattccttgctttttcagatatcatgagggcctccaaaaatgccttggattgtattcagaaagtggtcaatattcgtccgaccagattgaaaagttaaatgctttgtaccagtctctaagtgagcagtacactcggtcatccgctgttaaggtgagataaggcatatcagtgcctgaagtgtaatacattttctagtatccttctacttcatagggagctagtagtggctacccatgttttacccgtctgatgttttttttggctgctgatacgtaaaattctaaaactggtattaagttattttctatttccccatttcagaggataccattggattttctgcaagatgagaactttaaggaggctgtagcaaagtacattaaacctcttttgacaaaggtatcttttcattcccttgaatctctttgtttagacagtggtctaattgaatatgttcttacatttcttgatacttgtctcagggtgttccttcattattttctgatctctcttctctgtatgatcaccctcgcaaggttagttccctgctttgtccttgagcttgctgtctccaatttcactgatctgggcaacaccttactttttaatatgttttaatacttattttgttacccagcctgatatattggagcaactagttgttgagatgaaacattcgattgggactacaggaagtttcccaggaaggtatacaactgaatccattactgaagtagtcactgaattattgtcatctattatataaggtcttactttttacaaaacaacattgaaatgttctctacgttaatgataatcagtcgattcttttgtttaattcttaattgatgcagtgatgtaaaagagcccccttctacactattgtggacattgtttttcttggctcaggttcacttttgctattgctgtcttaattctctctattttttaacagttttacgttttgtgtatttttattttgatacatatttttcataatgcagcattatgacaggcgtggtcaatatgatgttgcgctctgtaaaattgatgaggccattgctcatacgccaacagtgattgatctgtactccgtcaaggtatccttgtttatcatggccaaaaatcttcgtataagcttttgatccatcagtttttttggtgtcactattgctgcttgcactatgtgtggagacacattttgaaaacttttttgacaggatggctgggtttgaacttttttagttatagcgattgtgttaacagaatttctatattgtgtgcacaccctggatcaggttatcttgtttgtgtgaggatgttcttgtttcttcttaacccttgtacttgtttctctcaacacagagccgaataatgaagcatgcaggagacttgactgccgctgctgcacttgccgatgaagctagaggcatggacctagcagatcgttatataaacagtgaatgcgttaagcgtatgttacaagcagatcaggtttgcatctcggttttgttcgtattatattgttttcgtcgatttcttttgatgttaagcctcaacgccagttctccattctgtaattttttctggtgaaggtgcccttggctgagaaaactgctgttttatttaccaaagagggggatcagctcaacaatcttcatgacatgcagtgcatgtggtatggctctatagaaccctgagtagttttgctaatggaaaattgaccattcagctatctttctaatggctgtcttttgatcttatttcgttaaaggtatgatcttgcatctggagatagctatttccgtcagggtgatcttggacgtgctttgaagaagtttttggctgtggagaagcactatgctgacatttctgaagatcaatttgatttccactcgtattgtttaaggaaaatgactttgcgttcatatgttgatatgcttaagttccaagaccgattgcactcattcccatatttccacaaagcagcaatcagagctatcaggtgaactcttgttgcataaatgtaatctagaaaatgtttatactgtatagctacagtatctactgtatcgatgcttgagaggttccatttaactatagctcatttgcctctcggcctgaatgttcaggtgctacctgaaattgcatgactctcccaagtcaactgctggagaagatgaaatgtcaaagttggctcctgctcagaagaagaaaatcaagaagcagaaaaaggcagaagcccgagctaagaaagtaggcgtgtgttcattgatttgactagagaattgacactaagatggcttaagagtgctctttttgtttcaggaagctgagagtaagagtgaagaatcaactgccagtggtgcctctaagtctggcaaacgaaatgtgaaacctgtagacccagatcctcatgggcaaaagttaattcaggttgtggtttacttcatttgtaagatgtattgtggtcgtcaccacaactgtattatgagttttaatagaggctaactagagaaccaaatctgtacaggttgaggagccaatggcagaggcttcaaagtacttgagactactccagaaacattcacctaattctttggagactcatttactttcctttgaggtcaatatgagaaaacagaagtttctgcttgcattccaggtaactgatttagatcctattcaagcttagactggctctatcatgtttctataatatgcttcgtcaagtattctaagggctttaccaatcatttttcattctcttcaggctgtcaagcaattgcttaaattgggtgcagagaaccctgattcacatcgttccttggtatgaaatctgtgtaacttgtgatgttttaaggaagagtttaatcacgtaaagcagagaagggataataatttttcccttcaagtattatgtggctagacgtgttttctattttctggcttatacgtttgaacttggtggcaggttaaattctttctcatgacagaatcgataagtgctccaacgactgaagctgagaaacttcgttggagggtcctagaggctgagcgcccatcaatcaggtggctactcaaacttttatccaatcttactg

SEQ ID NO: 1262 - DNA, 86324 bp, Arabidopsis thaliana
aagcttgcagtatatgttcaacaattgaatatcatatgctcatcttcactactaaaagcgtaaatctgtacctgaacacgtccctcgtcagagctgtaaattttaaggtcatgacggtacgtactatggagacgaagcaaaccagtcccttcacctgcatgccatttcatcgtgagatacttagaaaatatactgatcgtcacgagtacactaaactcctgtggaaagtaacaaatataagtagatcaagttcccttacctggatacatattgtttcgaaagtatctaccaagttcttctgcctgcagatgaagcatacatcaaaaaaattagacaagaatacaccaactgcctgcgcttgtgttggataagctaccataagataccctccatttagtaacagaaatctcaaattttgcaattattttctgatactgaatggtagtatacctgctttctaccagcgtgtgttaaaacaccgccatatttcagaaccataagggcctctactggtctttcttcttcgccatcaccatcgctttttggtattttaacccacttcagcggcttcagttgaaccttcctgtatataccagagaaatgtcctccctgcatatcaaaggtctaatatgagagagaaattacggagaaaaagccaattccaaacagaacctgtataaaagtcccagatatatcttaacaacaaatcattgtaaatccaaaaacaagaacatatgactgtaacagcggcaggcagtgaatataaattgaggactcttataatgtgactcttcccaaggactacattcactacaatgacatgcgggaaagtaacaaatatatcaagacacctaacctcttcaaggactgctttaacttgccgaagcttctcagcatgttcaaggtcttctgcatcactatcactttcacgacctggtctaaagataaaaaaggaagaccataaggttcttactagatttcaactgtaaacacgatttctatcagtagtaaatgaagcatgctcctttgtttctaagaaaacttcaacgggatagacaaaatccccttcgaaagatttggactaagacatgttactattaagacatgtttttggtaccttgtacggggaactaacattcttgtggcatctaatagatcttgcaactggacggcactcttaagtttggtctgcaaaaggggagaaattgacacagtataagcaaattaatcaagacaagctgaacttgaagatataaagacttgagcctctcacctcagctcttggctttccaccattgtacttcaacattaggtttaatagtttttcctctgtaacttttagtttcactttctgcttgggagttctatcgccactgacatgtaaaacaaagttgaacacttctcagatcctgactaaacagagagaaggataggaagaacaggtgattatatgctacaacatactgtcgaacaacagcaatgacacaacgtagctcttctgactgcccaaaagtgccgatgatgccacttccctggcgagttagaccttcattagattgtacaggttcattgaccttccatggcaaggtgggaggaagagtggatgagagatgaggagcttttgcatccaaacacattttccttagcacacacgcagcatcgtcataataccttacagtgcaagagatttgtgaatactttaaaattgaaactcaacttttagagagttaagaaagaggcgaaacatgccagtctaaaaaccatctcagcatttattctagaaacttaacctataaatacaactatgattttaagaaagaaaataaaaatgcagatgctagcttacttgtatgagttcttcacaaaactccatccattgacatcacaaacatatgaacagccctcagatcgtagaagatcaaacccacagacctggaaatgtgaaaaatgttgaagaaattactacgtcattgcacgaaatcagaacgtaccattataagggattacggccctgcaagacataatgagagccggaggattggattcacaacataccgcttgcctaaatgcaatgcaaacttctctagccatttgcttttcagcaggtgtaagcaatactggatatctcacctgttcaatatattaaccaaaaataaaatactgatcaaaatcaaaacattaacagtttaaaccttcatgaaaacataagcaactcatgcttttcattataatcagtagatactgaaaccatagcccttccttcattaaaaactaggtatgttaggttccctaaatggaactgttgggaaatgattgaaagacttacttccttcccatctgtattcctcataacaacaccatcaacaacaggtgactttcttgcttcagcatgtgcgtattcaggacccactgtatagacctgtgtttaccaggaagattgtcagttgagaactcatgctcaccagacagaaacaagcagcaataaaagctacatcagcaggtggaaagccatgcagcatgtatatactgtaatatataggccagtagaaaaacataggatattaacatagcaacctactacgttgaggacacttgataccaacaactgtacaataatattctcaaacgcctatgttgtccaaaagatgggaatggtaatggttttatcgaaaaatgtgtagaagggaaacaatcagaaccttgacatcagttcctccggtggccataaactcctcgtatatataagagccttctctccttacccttctgacgtcaggatgaaattcacttgatcggttcccaatctgtagtaagatggggacaagcgaaatatattaggaagaaaaggagctaatcagaattatgacaatatcagaataaccagttcgatccagaacagagaagttctgcagaaggatgcagtaccttgcgaaacaattctttcatgcctccacctgccgagctagggtagtatatcattatactatggtcatctcctaaacacgtataaagaatgtcaatagttagccaataataattttaaaaaaaaaaactgcaaatcagaagataaataaaacaaggaggatagccagaggcaagctcaccattgacaggcttttccacaaatggcttccagaagcgttcaccatggacctcaacaaaatcttcttcctcgacaaaataatgaaggtcttgatttggtacctttctattgacacaagcatacctaggaactgggatgccatacatctcaagatgctgtagatgcacataagtagttattttgattagtaaaaggaaaaattaggtagttcttatttttcgttaacgctgaatcactctgaagaatttgcacagaaacagctatcttgcagtctaaaatgcttacctcatacaccttccggcgatcatgaagaagatattgcggatcaagttcattcactaaaaatggcctgaataacacaagtttgaaaaatcacacctcaatagccaaactcatttaattttcaccaaaaagactaatgtaagataggctgtttattgagccaacagtgagagataaaaggtaaaactcactttcttaaagcagcatatgcctgagccttctcaagaggatatccagaggaatgaaaagcaatcaagcaatcacaaatgggccaactgaaagagtaaacagtctggtaaagttttgattccagtatatactttgtacttgatatatattcagctacagtttgtctaaatacactaacaacgaatctttcataacatgagttaaagccaaaagagagctctatttggtacagaatacctttctattggatcttcaagtataactttatccccaaaatgtaagatctgtggataaagttgcaacaaaagtgtaaatgagatcataaataaaagaggaaatggaatacaccagggaatctacaacgacaaaaagtgtcaacaactcttctttagcagactaatgcaaaaagttactcagaagcatcttccaataacatttgcccaagaatcacaaaaatacaggttattccatcaaaaaaaaacaatctctctccaatgaaaataaaaacaactataagaatacaaaccagagagtatcaaattgatcatcaagtgagaaaggaacctcaaattcaccaaaagactggagtctgtcgagaatttcccccatgggagctgagaaaacctataaagcaacaacaacaaggaatgtatgagcgagaacacacgtagtaaaaaaaagacaaaccggtcatcatggagccgtgtaatcggaatctgttggtcagtagaaaaacgcgaaagacgagcaacaaacaaacaaaaaaaagggaaaacagaacctcggagccgcatttcaccttcttttccatgacgcagactccaatctttatcttctcaccaacaccacttgctccttcttccatctccattctctcggcctttctcgctctcaacctacttttaacgacgtcgcagtgttcttctctctaaagtcacagattcaaaaaatcaaaaccagataaacaaaaataattcaccaatatagactaaatctcgtcagttcccaacgatgatgatatgatcagctctatggaggaaaccaaacaaatcagctcacagagagaacagtagaagatctcccagagaagaagaaggagaagacgaggagagacttaccagtaaacaggtgatcgcagctcacaaggcagagcaatagcgataatgctttgcttgagagggggagaaaaaaaaaatccgaaagaacggggaaagaaaatatctaaaagctgcggtgaagctcacggggccagacagaggacaattcagtcgtcacaggccgtttgcattaaatagtatattattaggagaaaactataaaaatgctaatttctagtcagcatccttggaccgaaattggacccacacttgacgttaaatacactatcatggtcgagcaaatataattataataataatgatcaaaactttattattgatatatgaactaaaatatcacatggtccattgtgtgtgtcgtccatcaatgttacataaatagatataatgtccctataaggttttcctatgtatattttggttaagacaaattaatatgtaacaaaaaaaaaaagtggaaggataagatctagtagtaggattctagaatatgcagtaattaagagaaagaaaaaatatatgtcatttagctttttggttgctttacaacttttcttattcccaaaaagttatgtttttgcataatagagttaaaaaggttccacccaaaaacatattatgtgtcattttcagattgtctgactttattttgtgtattaaacaaaattataagattctactaccaactagttcgttaggtgtgatttctatttgaattctaggtaacatacagtattttcattccaagatttttaaaagaaaaatgttaaacgaatagatcattatgttgtatatacaactatacatgtacttatcaactatcatatattggaatatgaagaataaattagcttcacaatgacttctttcttcgtacacaaataacaaaataatcttttttttcttcttcccaagttggttataatttgataatatattattgacaatcacttgtcaatctctgcgaaaaaaaaaaaatcaaaaaatcaaaaacacaattagaggctgtattaaaatagttaaacttgggatgaataaaagtttgtgctgacgtgacgaataatgagactttcaagaaaactatgtgtcggatttttcattagagttccgaccaaaagaaatcggaaaaacaacaactctggactcccaatgtctcgaatatacctaaagttttaattggaaatcgaaatcctcaattgaaaaaaattaggaatgcataaacaatattttgattatagataatggtaacaatgaagaaggaggtaagtttagtaccgcaagaagaaggaaagacgatgatgtgcatagttgcgttgttaggaggaagatgcaattgaagaggacaaagcttttcgttcaaaggatttctacaccaaatcataacatcttccatctctgtttcttcctcaagcttcttctttagttctatcaactcgcttccatggaatatcaatgatttttctcctatttccttatttatgttcccactatcatctccggtctcgtaatatattagccttccttcggacttgagtggtaaactcacaataaacgaatcatctgactgatcatgtatcgatgaatgtttagtactagtattttcagaagaatggtattggcacgtatgtgtagtgtatatagtagtagtacctcaatccgtgaaaaagtggaagaactgtgggtagactctgcatcatctttgataactcgaatctgaagaacgtcaacagtccacatgacccaatcttgtgtgaccgtacgactaggaatatcgtgtgtgatagagtttctccacggtggtacacctttgtttgccctcagatattgtccgtagcgactcttgaaccgtacgtgtacaccatcgtctgatagcggctcccactccgcagatgaatccaacttttcgggtagagtttgaagtaccttgtgaatatgaaacacacacggcttgtttagcaagaaacatttccacgtttaaaaaaattctgtttatgcgtttttgtttgcgctatagtcataagaatgggttttctcgttgttaaacatttgaaatatctcttgggcaagatttactttgtcaaagtgtttataaatgttatcaatggatttggatgccttgtttttcaagaaatttattgaaaaagaatcctaattttgatttgagatggtttcttgtaacccaatctcccctagataaacctaccttttcgccggtggctccaaggaggaaatgaatattagtggcggtaaggtatttgccgtaacagctttgaagacggatcacattggatccaggtacgatctcaaccgtccatctagtgttttttgttgtgccgcgacgatcttgatgaacggattcttgatcttcatcggcacttaggtatttgtcgttgtggctacggagacgtacaatcgttgcctttctaaatatctccatccgagaacaataatgatctctttctaaaaaattaagaattaggagacaaaaggggatggatctataagttattcttcattatcgtgatgcaacgtaggctaatatggtttgttgacctgagtcttgttttttaattcgcttgatttgagtcttttatcgttaatggtttgttatatgtttgatccatgtcaaaagtttgttgaaccgtgggattaggattgttcagattataagaccagatttctaaatagtatgacaactccgaagaccagattctgaacctcttccattaattgaactatttggttaaataaatcaaactgttctatttgtttctatgattccatctctgtaaacggtcaatgtatatgtgtgagtcttttataattcgaatcttctgctcagatatatgaatttattctcatagattacaagaatctctgaagtctgacatgtgaatttctcataaaatcatcaccgcagaagaagaaattatccaaaacgaaatttgaaggaaaatactaaaaaatcgaaagaaaagaagagagatcagagtttggttaagaattttttcggtcacggttaatctgaaacacggaccaatttgttgatcatcatatctctcgtttcaaacaaaacaatcaaaacagaagaaaatcaaatcgaaaaagatctagttgaaaacgattaagatcatcagagacttaaatactaataatcacaaagattactccatcatattgttgcagtattacctcatcacctgatctcaattttgcattatctatacggaccaatacatcataactcgaaaaccaaagatctaaagaaaactaaactgaagataaaatacgaacttgaacagagaaccctaaactgacttgataagagcttgatgtctgtcaaagtcatgtgtggtttgtatataaaggtccccaatggcggcgattcttaggtttctcgaggaaaaccctaacgcttatgggtcgtatatgagcttcataaggcccattataataaacctcttttgacccataaaaaccccaaaccaatactcaattagcttatatggatgggcttgactgaaaatttacaacttctcatttttggtttgattcaagaaaaaacaaaatattaattttaaaaaaaaatatgtacttggaacaaaataatttgtaagaaaatctacatctatttaaggcttgaagtcattggatcctattttaatggaagacaagatcaaaatttatatcctttttttggggagtagatataaacttttaagcttaatttagcatgttttgtagtaaatccaaaactggataaaatctaatttcaaactcaactaattctgttcattttatctttaaacaagttcaaacacttgaaacaatagcttcatacatacgcaaaagaaacaaacacacaacaaaattgatagaataaaataagtttggtattaaagaagatataatcgtaacaagattcaaaacttaagtaatgacatcgctacaaagatcagctgtttcgttccgacgtcaaggttcttcgggtcgtatttggagtgatcaattcatcttagatcaaaaaaatggagcaattcttcaaaatcatctagaacaaaccggaagaaatagtaatgatcttgaagataaaaatccatcacagaaatcaagttcttcgtcatcttcttcatcaccacctccatacttttctgaaatacgtagaggaccagacatctcatcttctacacgaaacaaactcgcttgtggtttatcatcacttttccgacaatgtatcggttcttcggctcgtgcttaattttgttcaatgcttgacgcaaatctgtacatatattttcttgttatatgaaaaattcatcacaattttttccgaccaaacagagttcttgataaatgggcctattattttaaaaagcccaatagatatttgagtgtccggcccaaattgaagtagaataaaagataagttaccaatttaccagtagttagcagcaaacacacagagaaagtgaaacatcgaagagaccccagaatgcaaaatctctctccgcctttttctccttccttattcgaaaattctcagcgtctttgttgcaaactcctctgaaattctccgtcttcttcattcgttttcgactctgcgttctactacttctcgtctcctatcagtatcatcgcaattcatattcagtctagtgtgttaaaccggagaatttggagtctcgccggaattttcctctgtctatgtatgattgccggtgatcaaagcgcttcttaacgattctgttctcctttgagagatctgagtatctgatttcatctactacatatgttttctcgagagtgatagaaagtaggtctcatacatatttttcctctggagggaattttgatcctctgcttcgttaattaacttgtgatgaagcggataagagatgatgtatatgcctctgggtctcaatttagacgtcctcttggttcttctcgaggccaattgtgagtttctctaaattcacccttcaaatttcggttttgatcttggttctgttttgtggcgattaggttttctataattctgcatggagagtgacaaatatttgttatgaattgagtagttttaagtaatcgattagagatgatttggtgcagatgtggacaatctccggtccacggcagtggtgacaccgaagaagaagaagaaggagggagccggagagtctctcagaaattgacaaccaatgatgcgttgtcgtacctgagggaagtaaaagagatgtttcaagatcaacgcgagaaatatgacaggttcctcgaggttatgaaagattttaaggctcaaaggttagctctttcactctctatcgacttcaaagttcaagtaagttttagtaggcggcattgtattaattcttcgtcttgcattttcagaaccgacacaggcggtgtgatcgcaagagttaaggaattgtttaagggacataataatttgatttatggattcaacacctttttgcctaagggatatgaaattacgcttattgaggaagacgacgctctgccaaagaagactgttgaattcgaacaagccatcaattttgtgaataaaattaaggtgctgtcgaaatcttggtcttatatttctcttttgaagtgcgcttacatcttgtgtctcaatgtacaagtttcttttttctcactgcagatgcgattcaagcacgatgaacatgtctataaatctttcttggaaatcttgaatatgtaccgaaaggagaacaaggaaattaaagaggtgtacaacgaggtaatatacttcatctcacctgtaatgccactccaaactttttctaaccttcgaatatctatgctccaggtatctattctttttcaaggccacttggatttgcttgaacagtttactaggtttttgccagcgtctttgccatctcattcagcagcgcagcatagccggagtcaggctcaacagtacagcgaccgaggatcagaccctcctctacttcatcaaatgcaagtggaaaaggttcgtttgatctttgtttcatatttttccttgttctattttttgccacgtatctcaattttgttcccgctacaactttttatcaccaggaacgccgacgagaaagggctgttgctctccgcggtgattatagtgttgaacgttatgaccttaatgatgataaaacgatggtgaagattcaaagagagcagcggaagcgccttgataaggagaacagggcaaggagaggccgtgatttggacgatagagaagcaggtcaagataacctacaccattttccagagaaaagaaagtcgtccagaagagctgaagctcttgaagcatattctggttctgcttcacattctgagaaagacaatttgaaaagtaagctaactcctgtgtcaaacatttttttatttgcttggtaccttttctattttttaagagtcccaaacattggacaccttaattctttctctttgagagagaatttattttccaattttggttgcatggtgatctttaaggtgcgaagatctgcttctgttttctaagatgtttactttgtgttaggtatgtacaaacaagcattcgttttctgtgagaaagtcaaggatagactatgcagccaagatgattatcagacattcttgaagtgcctcaatatttttagcaatggaataatccaaaggaaggatctgcaaaacttggtattgcaatttgtgatcaggggttgatcttgtggtaacgttcaggaagttgtattaaatcccattcattttctttcaggtttctgatcttcttgggaaatttcctgatctgatggatgagttcaaccagttcttcgagcggtgtgagagtattactggtactgaaatacgtattgttattttaatagttattacatatcagcaatcttcttctttctgacggtcatcctctttttgtagatggatttcagcgtcttgctggtgttatgagcaaaagtatgctgctattttaaacttcccagctgtgaataatattgtctctttccctcctactttgtaaaatctttactgacattgctggtacacttggcagaattatttagcagcgaagaacagttatccaggccaatgaaggtggaagagaaagaaagtgaacacaagcctgaactcgaggctgtgaaggaaactgagcaatgcaagaaggagtacatgggaaaatctattcaagagctcgatctctctgattgcgagtgttgcactcctagctaccggcttctgcctgcggatgtaagcttctatttccaagttgcattttgagcatgttcattggatttttacttactgtaatattatatttgcagtatccgataccaattgcgagtcagagatcggagctaggagctgaggttttaaatgatcattgggtatctgtcacttccggaagtgaagattattcttttaagcacatgcgcagaaaccaatatgaagagagcttgttcagatgcgaagatgataggtatttatattgacaacatacatattatagtttgaagtaattggtcatttatgttaattactgcttataacagatttgagttggacatgttgctggaatctgtgagctctgcggccagaagtgcagaaagtttgttgaacatcatcacagagaagaaaataagtttttctggctccttcaggatcgaagaccattttacgggtctgtatgcttttttgggaccattttacagttcgtagttatatcttctctcttcccctatttaggtgtcctcatatgtttggttattaactttaccattttcttattgacatatttacagccctaaatttaaggtgtattgagcgactttatggcgaccatggtcttgacgtgatagacatattaaataagaatccagccactgcacttcctgtaatcctaactcgtttaaagcagaaacaaggtgaatggaagaaatgccgtgacgattttgataaggtctgggcgaacgtatatgcaaaaaaccattacaagtcacttgatcaccgcagcttctacttcaagcaacaagattcaaagaacttgagtgcaaaatgtaagtagacttatagaagtcgtaagaagatttatattcaagtagttcctttatcctgttttatcgctcacatacatccggcagtgctatttttcctttcacttattcctttctcattctgtttttttattgcttcgtgaaccagcattgttggctgaaattaaggagctgaaagagaagtctcagaatgatgatgatgttctgttgtctatttctgctggttacagacaacctataaatcctaatcttgaatatgagtatttgaacagagctattcatgaagacatgttcaaagtagtccagttttcatgtgaggagttatgttctacaaaagaacagctcagtaaagttctgaggctttgggaaaatttcctggaggcagtgctgggtgttcctcccagggccaagggcacagatcttgttgaagatgttgtaataaaccccaagactctcgatgtgaatcacagcacatctcctaacggggaggctgctgtgagttctggaggagacacagcaaggttggcttctaggaaacttaaatctgctgccaatggagatgagaattcttcatctgggacattcaaacatgggataggtttgttaaataaagattcgacagggaaagaaaatcttgaagatgttgaaatagctaacagagatggtgttgcctgctctgctgtgaaacctcagaaagaacaagaaactggaaatgaagccgagaaaaggtttggaaaacctatcccaatggatattagcgaaagagcagccatctcgagtatatcaatcccaagtggggcagaaaacaatcattgtgtagtaggcaaggaagttttgccaggtgccttccagatttaagctatttaattttatttgtgctgcttgattatttgtgttgatatttgttactttacaattaaggtgcacatgagattcaagccaaaccaagcgacaccctcactgatattcatcatgatgtagatagcattgaaactgttcattcgactcaggtactagtactacaatcaattgctcgttgtaccatatttacaccattcagttgctcgttgtaccatatttatatattcgcctaaacccactattacctggaggtttccatagcttagggatgtaaaaatttacagtactacctatgggacccaggggtgtaaaaatttaaaatgtgtcttatattataattatgctttccggacccttctgactctgtcatattactagggaggtgatgttggcaattcgatagttttggcaaatggattaaggtcagattcttctaaaggtactaggaattctgatgatcccgaaggtccctccagaaatgagaaagaggaaggtgaactgtcacctaatggtgattttgaagacaactttggtgtttacaaagatcatggggtgaagtccacatccaaaccagagaattcagcagaggctgaagtagaggcagatgctgaagtagagaatgaggacgatgctgacgatgttgatagtgaaaatgcttccgaggcatctggaactgaatctggtggcgacgtatgttctcaggacgaagatagagaggaggagaatggtgagcatgatgagatcgatggtaaagctgagagtgaaggagaagcggagggaatggatccacatctcttagaaggagaaagtgagctgcttccacagtcagaacgtgttctcttatccgtcagacccctttcaaagcatgtcgcagcagttttatgcgatgagagaacaaaagatctccaagttttctatgggaatgacgacttttatgttctttttaggcttcaccaagtgagttacctaattatttattgaaattgattctctctagcaaagataacgtggtgcattttcagatcctgtacgagagaattttgtatgcaaaaaggaattgctcaggcggtgaactgaaatcgaaaaacttaaaggataccaatgccggagatccttatgcgaggtaccttcctttgtacaactttttatactagcctatgtagataatcatatacatgttgttcccatcaaaatctgatctgtgtgttgtacaggtttatgagggttttgtatggtttgctagatggatcagctgaaaataccaagtttgaggatgagtgcagagctataattggaaaccaatcatatgtgttattcacgttggacaaactgatttacagattggttaagcaggtgttactcacactagtggtttaggacaattttttttatgttatcgacattatgttaccttccttgtgatgttctaatattatccatctgcagcttcaagctattgtagccgatgaaatggacaacaagctgcttcagttgtatgagtatgagaaatcccggaaaccaggaagggttatcgactcagtgtattatgaaaatgttagggtcctcgttcacgaggaaaatatttaccggttggaatgtgtatgaacccttgtgactctcttatctcccgcggtcttcatacatcaatgtggtgactcatgatcaatttgaacttaattgccctttttaattgatatgcagtcatccttgccttcacgtttatctatccagcttatggataacataatcgagaagccagaagcatatgcagtttctatggatcccacatttgcaagttatatgcaaactgagttgctttccgtctcatcaggaaagaaagaggagggacatgacattgtattacaaaggtatatatcttatataatcatctgtctctttaaggttttcgcataaacctctaggttcatggaaatggtagattctatctcttttgaaacgcttgcaggttatatataggtttattatttctttttctcttctactggaactggtccaggatactgcaacgatattgcataattaaataaattcccttttggcaggaacctcaccgggttgtatgatctctgtaaagctatggaaggtgtcgaagtagtaaatggcttggaatgcaagatgtcttgctcttcttacaaggtaaaccgatcttccgtcccaaagatcttgaaccaagcaactcaattatacccatttcaacctgttcatctttctttatgcaaaagcttctctgtactcaatttcttgttcatgaatcagtcaacatatatactcatctcttgtagatcgcgtacgtattggacacagaggattacttccacaggaagaagaagaaaaagaagactgaacagttatggcaacgtaacaaggtgagagtagaaaggttccataggtttctctcagcttaaagatgaccacaacaaagtttcctcttgggttttcttctttccttcaaaccaacaacacacaagaaaaaggtaaaactgacaaagtcgcacaagtaaagttctctgcaacaattcccaactttggtcttcaagtttcttactatgctgattataagatgagatatagagagatgcacaaaggaacaaaaccataagaagaacaatggtggtttagagttactgtgtgtatctttaggtttcaagtgccaagtctgttagtgttacatgtagtgtgtgtctgtgctctttaggagaatgttgttgtaaatatgggaaagcacttgaagatgccttggttaatagatagataggcccaaaagaaaaattattattatatgcttcaaatttcaagattatgaaatcaactaaattttttattggtgactaagcggtaacaacaacatttttgttttggtgaattaagaacaagaaaacaatgagacatacagagacagagaaatcatatttcgtgttaattaagtttacgaaaatgactaaacctaaccctaattaggtttcatctttcctaaagagtaaaagaccaaagaatatgtgttgaaaacccctgcatccagtatatggatgtttcatacgttcaacaatgatgatttttttatcatctcataatcgatggaataatactacttagttgttttcaacgcattgaaacactccttagtgaggccgtcgtgatttgtctttaagacaagacttcaaacaaacgggatgcctatgaaacattcaacgagacataaatgattgtttgcgatttgtgaaatgttaagattcatttttgcttacggactaactaaccagtggatgcttaggcgcggttagttttcaacgtatttaaaatttaccagttttccataaatgagtatatgtaacttccaaatcttgtatacgtggcctttctttactcactctcttcttatagaaggaaatccttagaatacattccacgcagaagcaatctcacgtcaattctgtacaactacacaaactctataaaccatacatcttccgtcttctgttgtaaaaaaaaagcagaaaatgaaatcaaagcaaatcaaaatgatgttctttttattaattgtagtttcagctttgattttgcgaccgtccaaagctcagataaaaacgagcatatgttcaagaacacagacaaggccgatagataacgtggatggatgtttcgatgcggtgagattagctgcggatgtagatatcaaatggctatcaagagactgttgcaaagcagtgaaaacacttgatgattgccttttgcttgtatttcccaacagagcttacaatactaatctcttcaaagaaatttgtttcgaaattttcaataacttaattttatgatttctctgtattttataatgatataatcaacgaatcaaatttatttttttaattctgatacgaaaatattaacatttcacaaatcgcaaacaatcctattatatatctatacatgtctcgttctttgtttcatgctcctccgtttgtttgaagtcttatcactaaagaatgcttcaatgctttgtaaacaacctagtatttagagattccatcgattatgagataacaaataatccatattgttgaatgtatgaacatccatatcggatgcacgggtaatcaacattattctttggtcaaagtgaaacctaattagggtaaggtttagtagtgattttctttcagttgttatttccaacttaactaatccgaaatatgatctcgctgtctctaattattttgttggtcttaagtcaccaaaaatgttgttactgcttatctcgaccttaatattgaacatatatgacccctcaaagattatctctttttaacaaaaataaataaaaaagtccattggtcaaactaattcaagcatataaaattacttttccataaataagtatttgcttgggtcaaaacttgtatatttaattaattacgtctttctttctttactccatcttcttatagaaggatatcctgagaaaaaaacccacaaaaaaaaaaggcatcacgtcatttctctacaactacacaaactctataaaccatctatacatttttcgtcttctattgtaaaacaaaaacagataaaatgaaaacaaagcaaatcaaaatgatgttcttcgtactaatagtagtttcagctttgattttccgaccatccgaagctcagatgaagatccaatcgtggatatgttcaagtgaacagatagcaccgatagtaaacgtgagtggatgtttcgatgcgttgaaattagcgttagggtcggagaaatttgtcagattgctatcaaaagactgttgcaatgcagtgaatatacttcctcactgccttttgattgtatctcccggcgtagagtacaatactattgtattgagagacttatgttctcagtagttttcaatgaaacaaatatcatgtaatgaaaaaatacaaatattttgaatttttttttaagttttaattatttaatataaacaattggaatcaacgaaatgtatttttaattttagacgcttcgtatatcaaactttcttctcatttgtattcaaaatcattttgattttttttatattataactgaaacattttccgagaattaaaaattatctaacgatcaagatcctttttatctaacgatgaagaagatccttttttccttgattcattttcttcatagtttacaactttaacatggtacaaataccaagtcaacagaactgacatgcacatgaatgattttgattcgtgggttttttttaatgcatattcggatgccacaatcaatttggatatagattatgcgatgctatcaaagaaataatatacatatttttttcttactccacatatatgactgtttccgatttgtgaaatattaagattttcgtaccagaaacaaaaagtgaatcagattcatttttatttcatcataaaaaatgtacaaataaaaatccccttggttacatgatttttgtttcgttgaactttaggaaacaaaagtttttgaagatataagtattgtaaactatgttgggataaagaacgaaaaggcaatcaggaagtgttttcactgctttgcaacagtctcttgatagcaatctgaaatcttgatgcaccgctaatctcaacgaatctaaacatccagccacgttctctatcggccttgtctgtgtacttgaacatacgctcagttttagctgagcttcggatggtcggttaatcaaagccgaaactagaattaataagaagaacatcattttcagttgctttgttttcattttctctgtttttgtttgacaatagaagacggaaaatttatggcttataatatagagtttgtgtagttatagagaaacgacgtgaagattttttatgtgtggaatttattctaaggatttccttctataagaagattgactaattaaagaaagaccatgtaataaaattaaatatatatttctgctttaaatataattagttgaccaatagagtttttagttttgttggactcaaattttttattggtgattcttagtttttacaaaaaaaaaaaaaagaagttctcactatttgttgtttttgtttaaaaaaaaaagatatctttgaggggtcatatatgtaatatgttcaatatatattgaggtcgagatagtgaggaagcagtaacaacatcttttttgtgatataagaacaagaaaataattagagacagcgagatcataatcgatcgtaaggttacacattaatcaatggaaggtcaaaagacttggttgttttcaacgcattgaaacacttgttagtgaggccgtcgaaatgtgtctttaagataagacttcaaaccgacggaagacaatgaaacattcaacgagacacatatgattgtttgcgatttgtgaaatgttttaagattctcgtatcagaattaaaaaaataaatttgtttcgttttttttatttatcattaaaaaaaggaatacagagaatttataaaagtgattcgttgaacttttcgaaacaaatgcctttgaagatataagtattgtaagccctgtcgggatatacaagcaaaaggcaatcatcaagtgttttcactgctctgcaacatactcttgttagcaatttggaatctttgtccgcagctaatctcaccgcattgaaacatccagccacctgtgtaattggcgttgtctgtttacttgtacatatgctcgtttttagctgagcttcggatggtcggaaaatcatagctgcaactacaattaataaaaagaacatcattttgatttgctttggtttcattttctgttttcttttttaataaacagaagacggaaaatatatggtttatatactttataaagtttgtgtagttagttgtagagaaatgatgtgaagttttttttggtgtggaatgtattctaaggatttccttcccaaaagaaaaggatctccttctataagaagagtgactaaagaaagaccacgtaatttttttttgacccaatcaatttatggagttttgaccaagcaatacttttttaaacataattagtttaaccaatggagttttagttttgttggattcaacaaatatatcaaagatttatactggatataaaaggatttaactgatataacatctatatttcgaagatttaaagtgatctaacaaacgagatcctgtttttcttggttcggggatccttttacatatgaaacatgatactaataccaagtcgaaagatattgacacacgtatgaccaataccaagtcaatatatgattttgcatagtttatgtatggatattggatggttatttttccggattaaaaacttgaatatatttattttgctaagaaaaacttgagtatatattgacaaagcctgaggactgtatttagatataagaccaacatagatataaaacttgaaatacaaactaaaagaaacaagaagaacatgagaccatgaaacattcaacgagacatagatcataggtgtgattgtttgcgattttcttgccagtatttaaatgtaaattttgattcattttcaatgtatcattaaaaatacaccaaagttataaaattgatcatccagggaactttctaacacaaatgcttttcaagatattagtatttaaagctttgttaggaaagacaagcaataggcaatcgggaagtcttttctgtacaacaattatgcgatgctatcaaagaaataatatattagcttattttactctgtacaactttttttctctcctctacatacaaattttagagttatgcaaaatcttgagattttcgaatatattgcaaattgagtctttcgtcttgtcaatggattatattcaatttttcatagatagctaaaaatgcgaaacctgaggattatatagcctttaagactgaagtgataagatgatcacatgagatctcaaacaaagcgaaggaccatgaaacattcagtgagacaaggtaagagtttaaagttgaggatttcttataaacgaaacttcgaatgagacgaagtacaaaaattaaagagtaaattagtaattcatcttattattggttaacacttaaaagataaagaaaattaatgacgcaatggaggaaacttgccaatacaaatgcttctgaagatattagtagggtaagcttggccaggattaacaagcaacaagcaagtatcaggaagtgttcttactgccttgcaacaaacttctgtgaaccatcggaaatctccggctgccgcttttctcaccgcatcgaaacatccaggcacgttatcgatcgctgttgtcggacacaggttcgtattatgagcttccgatggttggaacatcaatgttgagattagtgctaacaagaaaaacattactttggtttgctgtagtttcatttttgagtatatttttatttttttgttgttttgtggttttggattgtgtggagatgataaggtattgtatcgtatataaatagaaaagaatttaggattgtatggaatgaatcttatataataaagtttgacaggaaagattgggaaaattaatgaattatttgtttgacccatatagaaatataattattaagagaatccacaatcaatttgtttatataataatatgtgatggttttaaggagattatatacagtattaccgtctgaaaaaaaaaagatatataagaattgatttggatatagaaagattaagaagggcaagtgaaaaaagaaatgtatatacaatagtttgaatgacgtaagaaaattaaaacagttttatttaagtatctttttttatcgtatcattgaaagatagagaaaattcataaaattggttatgcagctgcagggaccgtattactacaaatgactctgaagacattaattggtaacgccaagtcaggcttaagtgtcaagaagcaagtatcaggaagtgttgcgtatactgctctgcaacagtctactgatagccatctataatctcttcccgcagctaatctcagcgcatcgtaacatcctggtactctgcttatcctgtatgtcaaacaataaacttccggcggagctgcttccgatggtcggagaatcgatgccaaggttatggctaacaagaaaaatatcacttcttgtttcattttttttttttgagaagtttaaacaagaattgattccgtgggttcaaatcgtatggagctgagatcttttgtttcggcgaataagtagaaaagagattgtgctgtattagaaattaatgttgtgtagggaatgttttttatgaaaagaatttacgtaaagaaagtttgacttgataaattaatttggaaaattcatatattagtttgacccatatatatatctatccatatcaattgatatatagtcaaattttctgcatatgcataggaaaatcattgaatatgtgtaaaccatattatattgtacctaaaacattgtttgtatgttgtgtctaattagtttagataaaatttcaaattttaattcttaataaaaaacctcaaagtttaaataacttttttttaagaaaagaaaaataagtgttaaaaaaattaaacaatatataaaccatattgaacgtagaacaactcttaaagatttggatgttgtgtccacttagttaacacaaaatttaaaaaattaacacttaacaaaaaaatatcataatttgtggcacaagctaaggtacaaaagcatttgtccaaaaaaaaaagctaaggtacaaaagtcaaaacatgatgatatatgtttgttttaaaattttgagaacaaaaatttattttcttacaagtgaaaagaaatgtaatgatatcaaaccaaaaatgggattaaacatttatattaagttaaggagagaataagaattcgaacaaactatagaacaaagtcactgggcaaaaatacatggatttttgttgggtgtgacttttattaacaataactaaagctatatatgttggatgatctgttatgtgctctcatgtacccagagaaaacatgtaacctcagtataatgttatttattcctatcaacctctacataccatttcttccatgcctccgtgaaacagttttcctttggagaggtcagagtcaacaagtgcttgttgctgagttcatggcaaacaatcacctataaacttgatataaaacttgaaataaaaattaatgaaacaagaagaatatgagcccatgcatgaaacattcaacgagacatagatcataggtgattgtttgcgattttcttgccagtatttaaaagtaaattttgattcagtttcaataatatatcattaagaatacaccaaagttataaaattgatcatccagggaactttgtaacacaaattcttttcaagatgatagtatttaaagctttgtaaggaaagacaagcaataggcaatcaggaagtgttttcactgcctcgcaacagtctcttgatagccatctgatatcttgatccgccgctaatctcaccgcataaaaacatcctggtaagttagctaccggcgttgtctcatcatccgaacataagtggtttggatctagacttggatctagacgagcttctgatggtcggaaaatcaatgtgaagactagggttaacaagaacaacatcactttggtttgttttagtttcatttttgacaagattccaaaataattagctttgtaggtttggatagtgtagaactgagatctctgctctttggtaaataaatagactttttttttgtattattcagatgctgtgtatggaattttcttatacatagaagatataggtgaagaaagtttgactataagaactagaagagaataggaaagtttgacccatatgcatatattagtaggatattcacaatcagtttttatatcaaagaaaaaatatatatatatttttttttactgaataaaatttcttcgctccaccacattcaaatcttagagttatgcaaattcttgagattttccaatatatatattgcaaattgagtctttcgtcttgtctcccgtactatggattagatattcaacttttgttttcatagatagctaaaattcgttttctatggttggctgctttttaatttggactaaaaattccaaaacctgaggaggattatataacatttaattaagacgaagaaataaagatgagatctcaaacaaagtgaaacattcagtgaggcaaagtaagatcgatataaaagagtcgaattgttcataattttcttataaatgaaacatccaatgatacaaagtagaaaaattatagagtacaattttaatcatcttatattattggttgaaacttaaaagataaagaaaatgataaaactaatgacgcaatggaggaaacttgccaatacaaatgcttttgaagattctaatagggtaagctctgccaggataaataagcaagaggcacgtatcattaagtgttctcactgccctgcaacaatctctatttagccatcggaaatctgcgtcgcctgccgctaatctcaatgcatcgaaacatccaggctccttctctatcgctgttgtttcacacaggttcgtattccgagcttccgatggttggaacatcaatgttgagattagcgctaacaagaaaaacatcactttggtttgttgcattttcattttttgagaatattattttttagttgtttttgtgggtttggatttcgtagagatgataagacattgtatcgtatataaaaagaaaataatttaggattgtatggaatgtaatcttatataacaaagtttcactggaaagattgggaaattttatttatttgtttgaccccatataaatataattattaagagaatccacaatcaatttgtgtatataatatgtcatggttttaaggaaattatatattaccgtctgaggtacgtaccaccaatatccagatgtatcaagtgaaaaagaaatgtatagttgacgtaagaaaattaaaacgttttctttttctttttatcgtatcatttgaaagagagaaataattaattttatcacttattcagttttggtagacaagattacgtttggagccagtataagtacttcttttttttttaactcagagccagtataagtatgatcacattcacaagacaaatgaatggaaaaatgtcaaaaacaaaagaaaagaaaagagtaaggtatttttacatcttcgtttaaacgatcctttacatatttaacttgtgacaaaaggtaccaagatctgaactatgttgtgatggtttatatgaattaattcgttgattaatatttctgttaattaaacaagtgttaacgtgaattttcagctgaatatggcaaaataacaatttaattgtaatcttttgaatattttataaatgggtatatttctttttatgaaatcaaagttgaaaatatatattcccaataagtgagaggaatgataggcctattaaaacaaaaggaacacggtgaaaatgagagttcagataaagtccaaggacgatgaaacattgaagtgaacaaagatatgtatagtttgaatgaggtaagaaaaattcaaaaatattatttcattatttattttataattgaaagatacagaaaaatcatgaagttggaggcttaacagcatcacaaatatttctgaagttagtcattggcaattcaagttcagaagtaagtttcaagaagcaagtaactggaagtgttgcgaatactgctctgcagcattttcctgttaacaaactaacatctctgtgcaccgctcttctcaacgcttcgtaacatcttggcgctctttctatgaataatgttgaacaatatctgaccggcggagctgcttccgatggtcggaaattcaatgccaagattagggctaccaagaaaaacatcactttggtttgttttagttccatttttgttcttttcttttttgagaagttttcaaaagaattggttgtgtgggttcgaattgtatgtatctttgtctcgacgtataaatagaaaagagtttgtactgtattgtgaatttgtgatatgtgatgaaagtttgacttaaaaaaaattaacttggcaagttcatatattattattttattttattttggtagaaagttcatatatttgtttgacccatatatattggaaaatgattgaatactgtatgaagaaatccataaagtggatatcagctccatttcccattaaaaaaagaaagaaaataaatcacttttctatagtacatactatttgacagaaaattaattaattttatcacttttcagtttttgtgattctgaaattaaatacaacagtatattattatcaacaactaatccaaggataaatgaatggaagattcaagttttctaggtaggtaaaaaaactaatattgtcggtgaaaaaaaaaaaaaaaaacaaactaatattgtagttcttctaagatcgtttgcatagttgtggcacaaggtacaaaagtcaaaacatgatgatatagatttggtttaagttttatgagcataaattttcttttctttttacaactgaaaagaaatgtaatgataccaaaccaaatatggatggattaaacatttatattaagttaaggagaggataggaattcgaatcaagtatagaacaaagtcactcggaatttgttgggtgtgacttttattaacaataacaatactctgtttcttactattgtttaaggcaaacaaagactaaagctatatgttggatgagttatgtgctctcatgtacccagagaaaacatgtgacctcagtaatgttatttattccgatcaacctctgcataccatttcttccatgcctccgtgaaatgcccaagaagaccagttatttctgttttaacaacatttttcaaaaccaaaactcagtttatgttttataatcagatatgtttgccaatcgaatcaagaaacgattagagtgtggttgttaccttgattgcaatactgtggttggtaggtagaagcaagggcctcgatctctagtaaccttccctttccgactttgtcgttgttcgtcttagatgctcctattggggagaacgggccaaacacatatttacttgcagctggtttcgattcctgctctgtgttttcctcgtcatgtttcttatatccaatttgcttgcggattgatgaacaatatgttttgtttctctttgccctcaagtttgtgatctctgttccaaatacccgcttcggttctccggaattaaataagcttaatcctctttcagctatgcttttggaccctaaccacctatatgctggtttcctagtcactggtatatgagtctggagaaagcaaaaaaaataataataataactaaaagatgatacactggaaatttgcaagtattacagtgttaatgtattggcttaggaacaaagctcttaccttctcgattaaattcatcgaggcaaatacatttgcaatgtcgtaaagtcttctaactttagctgttaatcaatttcagaaatttggttggttaatggtactgtatacttgtgagaacagagattagaaaagatctaaaacaggaaatatagatgtacttcgcatatggactgaatctggagagtcgctcagcaaggcttttgcagcactatcaagtgtgatgagatcatcctgaagagaaggcagcagacagggtgtgagttgttgtttataagagggatttgaaaagtattgtgtaagaagccaaagagagatattcacttacatcagaacatagaaacatcttcacaaaattctgtgcgagaagccagagagatttttccttcttttggtctgaaaatgatattagtttgatttcaagttagctcctaaagaaaatcttatcctggaaacttttattcatcaagtagcactttgttaatgcagaactatttgcagaagaatgtttattcagaatcaagttgtggactgaaatcccaatagtgattagcagatggatattgataacactccaacaaaacaaaacactagaagaaagaagattacccattttagaggatgatgagttctcctgatcatcaggtgttaaagttaaaggttcttctctttcacaaccatttgaaacctaatacatttacgaccatagaatcacatcacaggtaacatcttcaaagttaaattccaaaccactttaaaaaatctaataaaaaattcagcaacaaagaatcttaagaggatgaacttatataccttgtctgaattgtttgaacttgagtaacctaacctctctctcatcccttcttcctgtaaacaaaaacaaccaaagacaagtttcaaaaccattctccttgcatcattaaaagccagatgttgaacatccatatcaagtaaaccttgagttcatctagagaacgaggaatctctccaaaacctttccacgagtattgattcttccctcttcttgccacaatctgaatatacaccacaaaactctaaatcagctcaagctaaacccagcaaaataaaaaagagcatacataccccaatactctccaatatattgaccacatcatagatacgccgcctttcaactcctgaaacaaaatttgagaaatccgatgagagcgtaaccaaaacagtcatcggattacttagttctccgttagcccaattgttcttagtctaggaatcgaacgcatacgtttagatttgacctatccatcgattttaaaatttcaatctcacaaaatcaggaggaagaagaataaacctaattgcccagcggcatcatcgagcccaatgagatccacatcgtctcggttatacagtctcaggaaactgaatcgtacataagacatcaattacacataaatccaacaaagcaaaatctggtgaaagagagagagagaggtgttacttggagacgagaaccccaagagatttctccttgcggctataaatttgcagaccaagcgattccgcatcttgagaaacaacaatcgcagaagacattttccccagaaacaaaaaacagagaaagaggacgagaaatttctgagattcggatatttgtcttagcaattaaaaaaaaaaaaaaaaaactttttggggccaaagcggggggagagagatttcgaattgtgaaaataggcgcttcattcatcgctttagcacttgttatcactgttaatgacgcaaataccctcgatcctcttaactacacggagtattgaaagggtaaatattataaatcgatgcagagccggattagcattttttgagcgccatcggcaaaatttcgtaaatcaaaattttatgcctaattgagcattaaaatttatcaagtggctggctaaacgagctggttaatgagttgaaaattagttgatcgattaaaaacacaattaactaaggttgaacaggcttaaatttttaaagtattaattagttaaaaatgagtttatattgaaatcaattaaattttggttataaactacaatgaatttacgccaaaatcggaatctcataaaagggtaaaaatgtgaaaaacatcataccagtaaaaaaaactcattatcggaattaaaaagttttatgaaaaatacatttcttttgcaatctctgttgtctgattaaaatacataagaatatactttcctgagaaacgtatagagagaaacaggtccctagaaattgtatacagaacacaccacattttgatattaccacaaaacaaaagataaccaaacaaacaaacaacaatctatggctcaacaacagtcacttgttcccactctccatcaacagactctttccacactgtaacgttattgttcccatcggaaacagccaacaaattaccggtcaacgaccacgagacccgccacactggtgttttgaaatctttcaaaacagtaccttcccattgctcaccttctttccctatggtccatatgatcactttcccatcttctgaaccactggctatggttgactttgggagacccaagttcggtgcccaagccacatcacggacccaatccgtgtgcttgttgagagccgggaaacaatccattttccatgacccgttcgagaacttccacactttcaccgtgctatcacacccgccggatgctagtttgtagaccggatcgatcataccagagctaacgagtgcgcctggttctgtggccggtgcccacgacactgaagtgacaccaacagggtgtgcttggtctatctttgtcgtgtcccaaccgccatcagctcgagccgagaaaactgatatgtttccatcagatgctccgcaagctaaggagagtccaagttcatgaggagcccaagcgatagagttgacagatactttgtggtctgtgaagacatgagcttgtgtccattggttttggttaccttctttccataatataatttgcccatcataggaacatgaagcgagaagtgaaccaaactttgggtgcgcccaagcgacttgccagacaggacctcgatgaccggttaaggtagctagatgctgagatccaccgctgttgcttactccggttatcttgatcgtgcagtcagacgaggcagttgctactcgctttccatagtaatccatgaccacatcatgaatagtgtcgctatgaccagtttcaatcttctgaggaggcatgtttcctgaatgctttcactgttacaatacaaatcaacagggaacacaaccatgagcatgttgatccagacattaaccgaagcaaagtgttagattattaagcagaacaattaacaaattatcacagccaagaccatatggtaagcacaaggattatttaaactcagacctcaattttaagcgattaatcaacacaatcaacatcgcaatgtttacaagttgtgaaaaaaacaagatcaaaacgagaaattataaaacgtggattctaagattgatcgcttcccaccgatgtgaatgagagtacataacctaaatcgatctacaggcgctgatagaagtctagcaaattttaacgaaattcattggaagatcaaattgagctaagacttcataaacaacagagaaaaatctcacatcgttacgaacctctggtattggagttatcttcttcctttgaactctccaaaactcagatctgctactgcttagagacgagagagacaaagcgaaagaggcgagtttgtgtccttattaccgattctacccctacttgttggaatgacattaataccccctacatactatcaggcagtagatgggccatcgtgtatatggtattgggccttcaatattgtttagttgtattattgggtatgttgaaaattgagaacaccaatttgacatttttaaactgaattcttttcattcattctctctcatcgaggccaaagcttccaaacaaattccggcaccggtagagccgtttgctcgccggtgccgggagctatcgttcccttgtcgctctcttctcaatggctatgtcatctggtgttctctattctcccgtgttcccatgtttcgcttgtcttttctccctttgtatccaaagattaccttgaccaccatacctctgaacacgttcacttcttgtgctagttctccccttatcttctttgcgacctccgtggtttatccctctcctcggctccccttgaagtcaataccggcatctccctattcccctctggatcggagctttgctttgacgccggagctgttgaagagctttaccttggaagatccaacttctgcagaccgagcctcatcgcaaacaaacttcgtttggttagatcttgtctctgacgccctcaattcggcagctgtaaaccctaagtccgttttgccgtcgccgtcgtcgttggtgacaaagagaagatgcgcttggcggctaaacctaatgctgcctcagggttttcgcattgggcccaacccaagccccttctgtcctccccctaacccattacctaaactattaaagcccatgaagccttctgctgggttaagcccatatcctctaaggcccaggtctgttttcaaatctgttttacaaagcccaaattttttgatgttgttatcatttagggagagtaatggacgctttcctgtgatggtgatgatggatttagcttggattagtagctctctctcacaaaacctagttgatagtctatctcgtttggtccgttttcttcagtgtttgagtctagtcttgaatcgtttggagctattttctctttggaagtgtcctagagtgttgctgcccacaccaagtatcgttaatttactatcgagttccctccttttagcaccctctacctctgtttgggctggtaatggacgccttgctatcagaatagtggtttgtttaggtgggaatggtagttaccattgtcgagataagatgttaagttttctttggaccctatccgagactcctttacccacccataggcaaatggcctttagagttaagaggatcggcattatgaccctgtctctaccgagtaggtgttaccgaagccttgaaaactctcaacttatccactcaccatttatcgcgctcattcatgtcatgttaatctattgcttggataatttgcaatctcttgacatgttgaaaaagtacggcattatgaccatgtcttcaagaagtggttaccgtctttttctcaacctcgttaacccgtcagcctcctcaacggagcacttcttcaaaagctcggatgcattgtttgcaagagcttcttttgaccacaagatggtcgaggatttcgcgaagcccgccttcatggtcgaatctgccaaggcctcaacagatttttcaatcattagaaaactcatgaagcttctatccttattttcctgtaatttcttattttcattgtgtatgaacttgtctcttttgagattttaatgaatgaagatctttgtttgacaaaaaaaaaactgaattctttatatcattgttcatatatataataactgaagaaacataactgttactaatataagagtcaaaattatatggtaaacaaagaaattaaacaaaagtataactttctaacgtatggatattttggtcatatttaaatactcacttggagtcaaacagtcaatactataatgtaatgtagaaagtcaccaaaagaataatacgatataatcttaaaatgttcgtgaatagccaagcattaacatatttaatgttaactttgtaccaccaaactaatacagatatttctatgacactagtataaaaatacttaaattcaagttttgtgtaagtgcatgtagtcaccttaattaactagatcgtatgaaaccaacatgtgttcgttaagtgctagtttacgtaccatgtagataaaggatcaggcacgcaaatagccaaatattatatgattattatctttatcaggaagacaggaaatactagatttgatagttataatttctcataaggacagacaaaacacgtacagtgttatctctgttcccattctactttgtagaccaaaatgatttccatctcactaaaccaccatagcgtgggggtacaaagaattttaaagaaactttttttgttggacaaagaatttaaaagaaactaaaaggtctatattatataccaagttacttgaaataaaactacatgcagagagtgtcttgaatattttcgttacaagaaaaaactcaacatctccaaaatacagtatatccttttttacaaaacaaaaaaatgtcaacatctacatcataacttcattattgttttccaggtagtacgtgatcatgttgtctacaaacaagtgataaataatttcccaatataacattctaacgttcatataatcatatttactttacacacgaatgtattcaacaatagctttcgcagttcacgtgcttagcaaacgttagcacgtgttgctctcaagttctcaacaatggaaccctttaaattctaaaatttaatattgaatatttaacatgacattcaacttaatttgtgttggatataaaaacagaaaacaaatataaaaccaaaattttaatcaacttaaatagttactttttcctaacacactaaataactttataatattataacggtgaaaattgactgatgtcaaatgaaataaaatttataataaaatataatttttgttggaccatgaatgatcttcacttttctatttgtggtcagcattattggaccacataaaaaaatacgtatcaatttgtgttaaaacgttaaagaataaagtattttccaaaaaagaaaaagaaaaaagataaaataaattttgctgccagtaaccgaataaaagaaaattaaagcatccataggaaatgacgtgtatttatcgacgtggaaaagaacgtgagacacgtggcagtatatatcagagcgagagagaaggttgatgcacggaagctgttcccttttaaaaaatttggtgcaagtctacgttgtggcactcactcacttaataaactccacttttctccaaagttgattttatcatcctttttccttttttaaaccattattggattcttataatttataatccgcatgaacatttaattaccataaattaatctctactgtatatcgtctttagtagttaattgtaatttcatcttaggtattttaagtctttctgtaaatcgccaaatattccggaaactatatggttctgagaccatcttatcttttactctcttaattatttcctacttttctatttatagagttaatactttgatagtcagaaagtaataaatctttatctctcttaatttttcaaatctctgctcagtttataatttctaccttctcattttctccgtactctctgcagatttggcctaatatattaagttttttttaaaaaatatatatatatatatatatattttttcgtgactggaaaaatgcagatctaatccaacaatgataagcctctttgataataaatttcaaacaatcgaggtatgagaggaaaaagaaaatgagtcctggtttggtaactccttggatattgaggaacatcggtttaaggccaacctaaagcttcgatggatatatttgcatcaaagattcgaataatggctcactgaagagcaagtctcggtaatacttttgctctaaacaattcgatcttatctcattcctctcttaaatccaccctataatggcaccaccacccacgttgcataagtttgtatataggtgtttctttcacaattgttttttataaaaaagaaaaatgtttttttcaaagaagaattttagataaatttaaaaacctttcgacaaaaaaagaaagattaaatttaaatattcaaaagaaaaagaccttaatccccaaagtcggtcaatgaggcaaaaaaaggttgttcaaaaaatgatagcacacttttaatggatttttgttttttgtgtcacgaacactttgaatttaaggaactaaatcgtaagaattgaatactataacgttccactacagtcagttttacaactatagaacagtttaaaaaaaaaaaatttatctataattccttaattacagaaccacctacaagtgttaatatgcatccgtttttatatgcgacgcctggcacgtatagagaaaacgtgttttgttcacgtattcgctattcgcaaaacgtatgccacgtgagatctacatgacgacatacttacttgtattgtatgtaacctcttcgtacatgatacctactaaattgaaatttaagtttgcttgaattttctttaaaaaacaattctaatgaaatttatcgaaatagaactatcattttttgtaatcatattaactttcatgagcttttcaattcgatactaattgctactaaatgagttgatctatcattaatatattactttagactttttgtattttttgatgtggaattctaacaaaccaaaaataaattaagttaaaatatagactaaacacttatcacgaaatgagctcacatcaatattttgataatcaaatgattttttctttttttaccaagaacaaaacgtttaggaaaaatagagaaattagaaacaaagaaacaaaagaacaaccttgtataaggaaaaagaatcgcaaaaaagggaatgcgaaaattatgtatataaaagagtatcaaatacgccaaatgtaaatgaaaggaacatataactttaattatagttatttctttttcatattgtacaagggtgaaggatgaattcaatgtagctaacagatagaaagctaagagctagatggtccattttagtgatatatactgcatgattttgcattttatcgacatatttataaaaaatttcctctttttctttcttttgtaaaatacgttaaacctcaatttaattaaaagggtgttgacctataaaaaaactaaagggtaagagatatataatagacttaatagtgtttaattataatagaacaaatctgcaaaaaaaaatggtttgcgcaacggttattaaagatataattcaaactagggtgcatacaaacctattgaatttcctaatctacttaaaccaggtttcatttaaaccattttcatgaaactttccaattcacatatttctttaagaattcaattagttagtttattttggttgacatctacaatgagtgtttttttcccctacataaaactccatcatttggtaaaaaaaacttttactagcttgtacctttcttcgttaaatgtttaattttcactttttaactcatccgtattttacaaacgaagagaataaaaatcaatttgaagtgtatatttggctatatacagttttagtttaattcgtataaaattggaaaacacatcttttgaagaaacagaagaagcatggtaagaaaagaaggaaaaactatttaataaatacataaatccacccacataggtgtggagacaaagatatagaattccaaatatggaaattaatctctgccattagtggaagttaattctcataacaccgaaaagctaacgattttcaactttttttttttgttactcagaagattttaaacctttataaatacgaaaaaaccaatctcacaaatcatcaacaatcaccttgatctccactctcttacatataaataaccaaataatttctctcccctcttctctctacacacatagacaataaacacataaagacagtttctaatggatttagaacagaagacaagaggacttagcaagtcatgtgcccttctcataggtaaatgatttcctctcttctttttgttcgtttgtttcaaagattcaaaacttcactgaaactaaagattgaacttttgtttttctgtgtgtatagtgattgcgggaatggagagatatgcattcaaaggagttgcatcaaacttagtgacatatctaacagatgtagtgaagatgagtaattcaagagcagccaaaactgttaacacttgggctggtttcacttctatgttgcctctcttctctgctcctttggctgatacttattgggacagattcttcaccatccttgcttcttcttccgtctactttgtggtaagtagaatcaagtgttaactaagtgctgaaactctcctccaccgtcagacaataacggtcaggcggtgagggaatgttgcttttatttatcttattttataatcgcgttgttaatagaattggttatattttgataatgttttggccttctattagatgtctatgtatatgcttgattaagcagtcattaagtgataaactgataatgggtattaacttgtgcaagaaaaactggtttagacgatatatctaaggaagttataagttaggtgttgggtcattttccgagttaaggaatagatcaagtagaccatcttaaagagtctttaagaaattagatacttggtcaccgtccgattagaaattttcttttaccactaatggagtttatatggatccctttaatagttgggttgataatggaattttgattagaatgttgatatagtgcttataatgggtcttatcggatcttataggcgaaaaagctagcttagtggaaactcgaaaatcttcttttgttagtagtttttaatatattatttctgttttttctttgaagggactagtgggattgacatggacggcatttgctgggtcacgttcagctactaagactatctcttcttactttctctactcttcactatgtcttgtctcaatcggtttaggcgtcttaaacccttctcttcaagcctttggtgcagaccaactcgaccacgacctcgataagaatttcgatctttcctcgggtgatcaaaaggacgcgaaagctacccgaaagactcagtttttccaattgtggtactttggcgtctgcaccggcagccttatgggtgtcacagtcatggcttatattcaagacacttttggttgggttctcggtttcgccattcctggtatcgtgatattcctgtcgattttggtgttcatgtcgggttgtggaatttatgtttatgctccgggcgcccgtctgaagaagaaaacaactactacaccttttgagaagattcttaaattcattaaagggagagtagtgaagcagagaagcatatatacacttgcagatgagaaagatttggatgctatggagcttgagtaagttcggaaaaaccacgatatctcatgaaactaattagtcttttaagttttttagcgactaatgattacctgtttatgtaggctagaggagaggcctctctgtaaatgtgagaccgaagacattgagactccttcaacaacctccaaaggattggaagatgacgagagctcgaaaacggttttctctggaattgataatgttaagttagtgattcgccttttccccatatggatgatgcttctcatgttcgcggttatcttccagctaccagcaacctttttcaccaaacaaggtgtgactatgaagagaaacattgggtccaacttcaaaatcccacctgcaaccctgcaaagcacgatcacattatcaatcatcctgcttatgccattatatgataagattttgatacctattaccaagagaatcaagaaaaacggtacaggtatctctgtgatggagagaatgggagtcggaatgtttctatccatcattgccattgttattgcggcaatagtcgaaaggaaaagactagccataagccaaaagatgaagactttacctgattatgatccagaaaccgtcccactgagcatcttctggctgctgcctcagtacatcctcttgggaatctcagatatattcacagtcgttgggatgcaagagtttttctacagtgaggttcctgtaagaatgagaacaatgggatttgctctctacacaagtgtttttggtgttggaagctttgtgagcgccgcactgatctcaattgtcgaggcttactcgagctcaacaggtgaccgacaaaactggtttgcagatgatatgtcggaagctcggcttgacaaatactactggcttcttgctcttacaagtacaataagctttgtagtctacatatttctatgcaagtttttcaagagtagcagtgatcaaggcgatgaaaaagaagaagcccctaaatgaaagaagaaaaactttgattcctttgacacagtcgacttagataaccgtttgccataagattccacgaatgatctaactgtagtagtagctttagaactaactagcaaaccaaaagagatagacaactgtaagatttttattcataagaaacagtatcttataatatcaaatgcaaaagattcaacattattattatctcgtgtgtttgattacatatcatcattaatcctcccattgaccaacaacatttctaaaatggacagattcaaaacagacaaaaaaaaaaaagtctgaaactttgatttatacctttaatcatgtgagctgtttccattgagaccaacttctttagctacgttgctctcttctcgaacctcgtcttcttcatcagagtcaagtgtgaaagtacttaaattctccaactcagctccgagaggtcgatatttagaatgatcttgacggagataaccattcttgttagcaatgacagagaacaaaccagtagccacaactaccattagagccaaatgacagttaaattgaagagtagctatagcttttgctcggtgataatcaccgtgtcctttgcacttgatcgtgaaattgcctctgctcttctcgtgaaacgtacagttattagtgatcaaaccggtaaaaaacgatacacccatttgcagaaaccatgttccttgcagaatcagaccgatcccacgacctaatttcgcaaaccgatgcgtgctagagtcggatttgagctcaaaaaccgtggagaagacgcagatggcaatgggcacgagcatgagatcgtaataacgattctcgattccagaaacatctttcttttgcaggtagaacattaagaactcctcaatgaagccaaagagaagcaataaagttgtaatcgaagacggaagtgcaacaaagacagcgtttttggagttgaccagatatgttagaatggcgtaatataggaatagtactgccactgccacgatctgtaactggatcattgacccgacccgatcgcgagatccgattgagctgaagaaggagaaaaacgagttcgcaataaacagagacgaaagcaaagctacggggatggaagatgatccaacagattttggcggcgaagctctgatctgagccataggggaagatgaatcagcagtaccagaagatgaattcggatccaggttcgatgagtccagtgactcccacgcgccgattactgcaaatccaccgccggcgacggcgtaacttaatatacccatgactccaatcttcacaatctctgcgaatcaggttatacttctttcgaggaaatttggatttttccgccattaaagcttaacagaatcgagcttctgatctgataaaccggaaagatccgacccgacccgaataacccaaaatgggataggctagtagcccaataactcaatatgggcctactggggtcttcaaatagttcatgtttaaatattctaaccatcacgtgacaatcatgtgacctctatggatatgctgctgctgcatatagctccgcttgcgtaatccagtttgcttggagaaatgttgcttccactgtttcaccagcaaccattgatacttgccaaaacctttcccgatcgaattttcccgccattccttgttcccaacaccctagtttcgcgacgcaatgtcagtcgagcgaactccggcatcttctgtagttctgcttccggtcgaaagactcttccccaatcggctatccagagaatcgctgagaagcttcgtagccttggattcgtggaagagaagcatgattcaccgactaggagaatcacgggagaagaatctggtaagaattccccaggagagatattcgttccgttgcctaagcagcttccgattcaccgggtcgggcacacgattgacacaagctggagcacgcctagttacccggttccgaagcccgggtcgggtactgccatttcaaggtaccatgagttgaagagagtgtggaagaaggaaacggagatggagaggaagaaggaggagaaggttccgtcgttggcggaattgacattgccgccggcggagctgaggcggttgaggacggtggggattaggttgacgaagaagctgaagattggcaaggctgggattacggaagggattgtgaatgggattcacgagagatggaggacgacggaggttgtgaagattttctgcgaagatatttccagaatgaacatgaaacggacccatgacgtcttggaggtttgtttgcctctctacttttgatttcatgatagggatttgatagtaacatttgactctcaatgaaagatctatgaacatgtcaacaaatggcacagacggaaattcatacttgtcctggttgattttacagacaaaaactggaggcttagtcatttggaggtctggaagcaaaatattgttgtatagaggggtaaattatcagtacccttattttgtatctgatcgggatttggcacatgaagctgcttcaggagcatcatctatggatcaaggagtggttgatagtagagagaaacagagtattgcagaatcttctgccccgagtattactaataaaatggttaaaccgatgttgacgcaaggcgttggttctccggataaggttaggtttcaattacccggggaagtacagcttgtagaagaagcagaccgtttgttggaaggattgggtccaagatttactgactggtgggcatatgatccccttcccgtagatggtgatcttctgccagccgtagtacctgactacaggagaccatttcgccttcttccatatggcgtcagtccaaaactaactgatgatgaaatgaccacaataaggagacttggtagaccactcccttgtcattttgctttaggtaagcttggtttcacctgattttagcttcatttagacacgaaaagattgttaacttattctggcttaccttttcgagacttccaggtaggaatagaaatttgcagggactagctgttgcaattgtcaagctttgggagaaatgtgagcttgccaagatagcagtgaagagaggagttcagaacactaatagtgagctgatggccgaagagttaaaggttgttggtttacttctagtgatcaaagtatcaaactatttgtggctctgtttgcgaacaatagaaaattatgcccttcggagtcccatataactaaagagatctattgatgagcgaaaatatatgtatgttgcagtggttgactggagggactctgatatctcgggataaagatttcattgtcctgtacagaggaaaggatttcctcccatctgcagtttcttctgcaatagaagagaggagaaggcaaacaatgataatggagaattctagtgtgcatggtaataagctgactgaaaacgaagaggaaataaaacctcgggctgttaaagaggatattgaactagaagctaaggatcagaaggatcatatacaaacccatcagatgaaatcaagacagcgaaattctcctgaggcaatccttgaaaaaactagtatgaagttgtccatggtatgccctaacagacaatttatacttgaatccattgggtttgcgagaccttttttagttctgaacggttagtttttgtctttaggcgttggaaaagaaagcaaatgcagaaaaagtcctggcggatctggagaatagagagagtcctcaactttctgatattgacaaggagggtattactaatgatgaaaagtacatgctccggaaaattggcttgaaaatgaagcctttccttttactaggtaggtcattgtttttcctctttttccaattgaaagcagtctgttcccgtctttcatgtaaatactcgtggtaaatgagtagtaactgtcatggactcatctctttgacatggtttatgtaaacttcctgttctgacgtatcttgttgtgttctcaaggtagaagaggcgtctttgatggaacaatagagaacatgcatcttcactggaagtatagggaacttgtgaagatcatttgtaatgaatatagcattgaagctgctcacaaagtagcagaaatcttggaagcagaaagtggtggcatactagttgctgtggagatggttagtaagggctatgcaatcattgtgtatcgtggaaagaattatgagcggcctcaatgtctacgacctcaaacacttctcagtaagagagaggcgctgaagcggtctgtggaggcacaacgtcgaaaggtaaagaaccaatcataacaaatccatgacatgacaatattgtcctgtaaataatatcttatctggaaacttcaaattacttttatgacttcctcgcttgcatgttgaattaattttctgctcaaattaatgcagtcattgaagctacatgtgctgaaactttccaacaatatcgaagaattgaaccgtcaattggtaagtcatatgtgtggctcagcttgattttcttaaacagtccttgaagagacgtaacatttgaatgctgctggttgggggcaggtcgaggacagcgcaaccaatgaaacttggtcagatggggaatcaagtaacatgatggtaaattatttacagtttcagtaaacacatgccaattcttgatgctacacctatgcttctatgagtttctcaattctccttatttcttatgtaggtcgaagaagaaacagaaaatcagcatactgaacctgagaaagcaagagaaaaaattgaacttggctattcatctgacttatcagttccttcctctggtgaagaaaactgggaggtgagattgtgagctcctcctctaagtttcttgcaaatggctcctattaatatattctctggattactaaaatgtgaacccgaattctgagactgcgttggtgaatatatttgaaggatgacagcgaaggtgaagtagacccattaactacgagcagtcaggagtatcaagaagatgaatctgaatctgcctcgtctcagagacacgagggtaactctctcgattcaactgcaaatctgtctgtgtttgcggaaaccggttccgccaatgcttcttcatttcatgatagatcactggtaatgtctaaaaacctcttctctttcctcgttggccctatgcgtagctttatttaattaactaccctttttgtgaaaaaatttagccgcacaacagcttcctgaatgccaatcgaaagttaccaggatcatcaactggaagtggctcacaaatctcagctctgagagagaggaaaagcgaaaatgatgggttggtcacagatctgtccaatagagaaaggctcattctgagaaaacaagcccttaagatgaaaaagcgaccaccctttgcagtaggtgagttttgctatcttctatactctttgctgctaagaaaccacctgattcatatctcaaatataatactttcaaactttttacccgataaagctcattacataacctcaaagccttttgggtttcacatgtaggtagactcacttggaaccttatagttccttatatggagaatgacttcacaattttccaattttcaattttgtaggaagaagcaacgttgttacaggtttagcaagaacactgaagatgcattttcagaaaaaccctctagcaatcgtaaacgtcaaaggaagagcaaatggaacatctgtgcaagaagtcatcgcaaagctaaaggtcactacaacttaaaaaccatccactagttagttcttgatgatcctttcgggcttcgtttaacaagtggtttgtgttgattatgcaggaagaaacaggagctcttctggtgtcacaggagccaagtaaagtcatactttaccgcggatggggagcggaagaagaaatgaaaagcttctacccaaataacaatgtcaaaagctctataaatctaccctctacgagaagctttgttgatgatcctcctcatgtgtctcctgcactcatcgaagccataagacttgaatgtggtttgtaaaaatgtttaatttattagatgtaaataatttaacatttgctaaagggcaccagagaagttggatatgcggaaaacgatatgttcccagtcacggacgtgtgggtccattaaaaggacagaaaatccacatgtatcggtgaaggttccaccaagaaaaacaagttgtaatgtgataatactcttttgaaacgaccaaggagtgatagtaacaagacaaataaaaaccaaaccttatccactgagcccattgtgcaatcaactgagaaaagatgaatgtctcttccgttcttcttcccaaatatcctcaagaatagactcgaagcaaataaaataagatgaaacctaaccagatagctaaagagcagattagtgatcattccatatatgacaccaagtttgagtggcaaatgcaaggcatccaggcaggaataaatggacacttgagaactgaaaacaactgtagccaaatttgaaatataaaccccaaaacatgttatcttagtgtcataaactatcctatctcaatacaatccaaacaaatgatagagcaaatatcttactccatcgcagtgtatactctactcaaaaccggctccaatcaacccctgagtctcttttggttacaacagagtattgtagctaaataatttcacatgaagtcatcatatttgtaaacaaaaattaacttcatatggttaaaaaaaaaaaaaaaaaaaaaactgaaactgatcgaatagctctaactaagaactcatttgctacatgactgtcacagcgatgaaaaacgtgagtttttaaaatagtggcgtttcagagcgttttgagagaaggagaggtagagagtggcttgattcggatgcttctggtgtagaggtttgtgagcgcaaagagtaaaagcacaaagaccacttgagcactcacaatcccaaaatggctaatactattcccaatttccatccagcttcctgtgttcttcacctgcaacatatttttggtcagtgaacaccaatatctatatgttttaattttgacataataacagtaagcaaatgaatgtttacttaccaggaagaagaaatggatcgtcattatgtctgaaaataagatcacaaggaagtaacatcccaatcttggcaccctcactaatttcgttattgcactgaacgcacatctgcaattcacagcaatttggacaaccataggtttaagactagttttatactattcattactactggctttggttcagtgtttacactcacatgacaagcatgaacggtatgaagagcttgaatataagaagagctgccatcagaaacggctgtacagatgcaccggtttaaacataagattttatggaaacacagattataacaaaagtagaaaaacaaacaataatgcagatacttacgctgaagattgtgataaaccggtatacagatgatatctcaaaacttgctatacttgcaaaattcccggttccgaagaaagcaacattgaacaaaaccatctacagaacacaagccaaatactaaattcatatgacttccattttttcagatgtattcataatctcgctcacgtcacaatgggaccagggaaacaaagaagacgacttacaaaaaccaaaggaatccgcacatcagatagctgcaagtatctttcatcgcttccgatagtgatatgttcctctgtgttattttctgacagagacgattcttttactttgctagaatgatgagaagcattctcaaacaatatccatgccataagcacaacggcaagtgcactgtaaaatacagcttcatatctgcaaacaaatggtggaaacatgagaacaagccatataaccagtggactttaatgtataactaagtcttgtaaagagagatacccaatagacagaagaagaaatggaggcgcaaaaccaagaaatattgaacttaatcgagaaaggatgccatttgctgaaaacaacggaagaaccattgaagaacctgcaaagatagaagacggttacaaaaggagtaacacaaacacaaagaaacactattatgcaaacagtacagaggtctgaggatataccggcaactaaccagtttatgaactgatgtgacgaatgcaattcttgattctgcgttcgatgctttgtcgacaaaaacaccatcacagatgacacaccaaccaaaaatatctgtatcatttgcaccaagaaagggtgaactattagatgaagaaccaaaatttgaagttataaaagtaaaatacctgtatacaatataacattgagcacatctgcgtcctgctttcatgaaaagtaatactctgccaaaatttgttcccttctgcatgtgtgtctagccactttgcagcaaggcttattactataataatagctccacttgtaactctgtaaccaagagatggtaccaacatgaaacactgagcattcacaagttaaaaatgacgctaaagagcaaagatgcttaatgctgtgttcaacaaatttttttacttttttaaatagaatgttcaatataatttatattcttatgattctattgaacaattctatacaatggaagtgaagccttcttctagatgagttgcagctcaaaagttactagatgtgctaagtaataaatgtggtttcccaaagcatcagtgtcatgtaaaccacaaaacgtaaaaaacaatcagagagaagttcaagcaagggagagaaaaagaacttacactaagttattattatcaggaatttcagctggcatcaaagtgaagacagataggaaccaacaagatatacagacaaaaactggtatcccagatcgccaagggattgaaaagtgcaacaaaattgaagccacaacacctgctatcaagaaaaaccaagtgtaaagctttctctccgtgaagctatgaacctgcaagaggttcaaagatcaaacaatcagggaaaaatcctccacttcagagaaaaactattggaccatccaactactcgtaccaataattccacaatgacaactgctacagctgcagcaaatagaagtttgatgaagtagtcggccctccgctctctcaaatatttccacaatcctcttattaatcgatattcactaaagatttgtgtccatagaaaaacagtcattccaatatatgcatggtaaagagggggcgaatgctccaccaaatttagcaccgagagaattgccatcagcaggcagcctgagatatatacctgtatcaaaatgatcaaaaatatgagacagacagagatttcacatgaaagtgtagatgtttaactatgacaaagaaatcctgcttaaccaagaatagctaaaaaagaagagtaatcttatcaaagtgaagatgcaagcgtttacttttccggagtcttttttctgcacagacaaatgctcttttttggacaaatctcctgatagtgaactataacattgcaggacatgcagggcaagtacgatcatccatccagtgtatccgagtgtaattacagtcatcagcataagccagtcatacgtttggaaataatgaaggccctctagtgacaagtttctgaggtccacagctaatttcattgcagcttcataacttttggcggatattaactcatcaatctgactcagcgaaaaggaatggtggaccaacggcttaaatggcttgaaaaataaggaatttgagctttttatatctgattttgtcaaggacagacatacccaggataaaaagagcagaatataagcaagctaagaaacaactctcaaaacaaactatgaatatgaacaaatatctttttcgatccctataagactactgtactatagcatgaacaatgtcaaaggcttgaaagcagggaacggcatcataatgagaagtgatgctacagtaaaaattataatcttcagtgcagaacttaagctaagattagagtgtgagcacaaggatacatgattttcgaagaagctgattaaggatttgtttggtattggctaccacagcttcaacttcttctgcctaaaaatacataaaacaataaagcaccataagtcttgacctccagccaatttctattcctattcctattctaaaaccaattcccaattcagtttcgacctctcacccatgaacactcaacagggaactgggattttaggaaagaaatgtagcattaacaaatacctaatctctttcagagaccacaagcggagagttcatatcaagtaacatacctcattcaacttcatataaccaagtggtagatttccaacggagttcactgggcatggcaaacccaagagcgttgactacagatattaacaaaaaagtgagaccaaagaacttgggaaacagattcacattttaagttgtttgactgagaaatgaaggtaaagtccaaccataaggggtgctatgtcagcttggttgacgtctactctctcaacgcgacgaaggccccagtcataaggtgtgggcatatcatgtgcatgcttgtcaacaaatgtagtaacagaatcagagtgactatttccagatgctggtttgggatattgaatcccagctccccaagcaactaatggagtatcagtgtttgtaggatgcccatctccatgacttcctataagtaacaacaggttcatatagcatcataagctcaaaacgaagcaagaaaaatagatggaaggtgcagatgaaacctaaccagatagctaagggcagattaatgatcattccatatatgatacgaagtttgagtggcaaatgcaaggcaggaataaatggccacttgagaaaacaactgtagctgaattgaaatataaaccccaaaacatgtccccttagtatcataaactatcctatctcaaaacaatccaaacgaatgatagagcaaatatcttactccatagcagtatactctagtcaaaccggctcccaaatcgtaggtagtctaaccacccaatatgccctagagtgttaactaatgagaaaatttgaaacaaaaggagtgacagaagcaaaagcagacctttgtcgctcatcccatgatcagcggtaaagatataagaagtgcgattgtctctgtagtaatcctccaagagatggtagaccctttcagcaatcttatcaacaactttgacattgttgagatagattgatgagtaaggccgatgtgcatgaccattggaatcacaaccaagaaggtgaagaaagacaacgagtttgtcctggtggaggagctctttcaactttggatctgcgtgagacctattgagaaggccttcaaattgatcgaaagaccactcatccaaaaaggaggcatctacaccaagatacaacatctcagttcattctagtaataaaaagcttctgttgcattcacaagcaataagcaaattgaccgcagagtcaaatttcattccagatactaatacatagtttttcaaacaaggaaacaaacctgtagcaaagtcttcatactcgtgcgggtaagaattccaagtgctgtgaggtaaggcactgcagaaaataggaataatatcggggctcccaaaagcaaacgtatgccggctctggttaaaaacagaatcaaattcaacaggattagctttccatcctgcaaacacacaatttcatttcaaaaagccgctaccaacttgacaagactaagtaagtatctacaagcatatatacagaagaagaagagaacctttagtgacagcactaggatcttcatagaaaccagcaataatagcaacatggccaggtctagattctgtaggaggacgagcatgagagacaccccaacgcccctgattctttatgatattcctcaagaagggtgctctgtatttgccttcctcgtccggctcaaagaatttgtcagcacgtaaaccatccgctgataaatgtccatcagcaaaagcaaatcagaaatgtctcgagcagaatcatatatactctaaaatcttactataagctataactgaaagaatccagagctgaagtaagaaacacatttcagtgtgtgaggactactactacgtagtacgtacagatgagaagaacaagtcgcttagccggcggctcagagaatctcggaggcacaggatccatcccgtggactatgggcgttttgaagtaaatgtcgaagatgcttagcatgtagacggcgtgaagagcaacaccgagaaccaccagccatgtttctcgcctctttagccatcttcgtctactagcgaccacgacggctgttgctcgactctgatccgaacctccaactcccaagatcccgtcgctcctcatagatcttcccaattctccgaccaaaaacatttctccttggatttttttgttaaatctccatttttcagtgttcactattctcagaactaaagcccaaaccttcagcttacgatataacaaaactatgatataagttaagttaggcccaatccagttgagatttatttctttttgtaacaatttagaaacataaataatccaattgtgttcctctgcgctcaaattattattacaacgttccaaatatatgaatacaaagaagagtgcagagatggttgttcaaaaaaaaaaaaaaagaagagtacagagataaattacaaaaaagcagagaataagtagcaacaataatataagatgagtctctcaaatccagaaatactcacaaaagagaaagagagcagatcactcaaaaatgactcccacttttttcataaactttttttttactttcttataaaaatatctctcagttcttcactgtggtcacatgtttcagaagcatttcgacaacatctttggaaatcctcgatgcttcgttcttcaactgctcgattttggtatcagtctcttgctccagcctcttcacattcgcaccagagtctccgcttgtctgttttcaacaatatgataattagagtgaggacactacattttaggttgtctaagaacaattttctctttttaaaaaatcatttacctcctcaagtttcctctggaagtcttgctctgtttgagctttgtattcggcaatctctttctctgcctcttccttagcttgcttcagtcttgccatttttgctgcaaccaataaacaggttataaatcaatttcaagccatataatcaaacctatgcattatgctccaagtgctacacataactacaacttcatttccataaaatatgcaggctcccaagaatgtaattggatgtagatattagtgttgggaaactttcagttctaaagttgacaagtaattatagagtttcagatatgaaaactaaactggcaaaggaaaaaaaaaacttaaaattaccggtccttgcagcattgacaatgtgttgagcttctacctcagcagcaagcaactgttggatcgaaccttgacctctgttggattccatgctttattacacaaaagtctacaaaaacaaatctgttaatatataaggtccaataatgcatcaggaaaacctaaacaacaaaaatttgaacttccataaaggcaaaacatacctaaaattttgctcataaacctacacataatctcactgtcactgatcactaattcggccgatcatatgaattacgagactgactaactactaacttaaggacataacaggattagagaaacataatttacccataattcaaagcagatctgttactctagcaatccataagtcggaagcaaaacaagtggaaaatcaaattgggatgagaatcagatagatctaagatcccgaaaaaaggattaattagaatctaagatcaccaagtaagtgaaatccatgtataaattagttgatattcaaacaaaaatcaaaactcttaacaccatcctaacaacgatcctaccacgttgaatcaccggaatttccgaaagaagtcaaaacagtttgacttccgatagaaaactgaaaccgatcgcattgaagagaagaagacacattacctttgttgattccgaggacaagagagaagagagaaaatcgaggatctatcaacacgtctatctaatctgctgctctcggtacttgtatgattaacatcagcagtgggcccacttttaatagacattgaagcccattcttataatgggtcttatctacaaaaagcccaaagtaaccatgagacacgcggagcctcgtaataataatgggaccgggccattacaaaacataaaatatatatttatttatacatgaatgaaaaccattaattaattttataataaggtattattattccactctctctctctagactctgaattagctcattcttgcctccaaacaaatattcctgacagaccagaccactcgtaagacagaccaaaccctaaactaaaagcatccacgttctttgtttttgtattgatggtctgatctcatatccatggagatggagaatcaccgccccggcagtttcacctacatgggccgcaaattcagcgatttaagtctcaacgatgactcctctgctttcagcgattgtaacagcgacagatccggcgaattccccactgcttcctccgagagccgtcgtctcctcctctcttgcgcctctgagaattccgatgatctcatcaatcatctcgtgtcgcatcttgattcctcctattcgatcgatgagcagaagcaagctgctatggagatcaggctcttatccaagaacaaacctgagaatcggatcaaaatcgccaaggccggtgcgattaagccgttgatttctctgatctcttcttcggatcttcagcttcaggagtatggtgtcactgcaatcttgaatctatctctctgcgacgagaacaaagagtcgattgcttcttccggtgcgattaagccgcttgtcagggctttgaaaatgggaacaccgactgctaaagagaacgctgcttgtgctctgctccgtctatcgcagatcgaggagaacaaagtcgccatcgggagatccggagcgattcctctgttggtgaaccttctagaaacaggcggattcagagcgaagaaggacgcgtcgacggctctgtactcgttgtgctcagctaaagagaacaaaatcagagccgtgcaatcgggaattatgaagccgcttgttgaattgatggcggatttcggatcaaacatggtggataaatcggcgtttgtgatgagtctgttaatgtcggtgccggaatcgaaaccggcgattgtggaggaaggaggagttccggtgctggtggagatagtagaggtgggaacacagagacagaaagagatggctgtgtcgatattgctacagctttgtgaggagagtgttgtgtatagaacaatggtggctagagaaggagcgatacctccgctagtggctctgtcgcaggcaggaacaagtcgagctaagcaaaaggctgaggcgttgattgagcttctaaggcaaccaagatccattagtaatggtggtgctagatcatcgtcccaactctgatgtgagcttttcttatttatctttttttaccacactctttcttcgtcttttactgttaatgcgagggtgtatacaaacaaccagaaaaaaaaggggggaaaaggaaactgtaaatagtttgtgtagaaaattagtgggcttgttgtaatttatcttgagtttggcttttcttttctttttgtgatccatttcataaatttcggtttggttttaacagatttctcattaccaattttccctcccattttatgagtagggttttgaataacataagggagacattcataattgaaattatcgaactagaatgcaagaaaagtgttaaaaagggagagaaacatagacatgttcttgcgaatttttaacttagagaacaagtgactgaagttttaacagactggggacagagcaaaagagaagtcagaacatgttctaccatgttcatgtttatggtcaacacatagcatattcttagaaatagtaataaacgtattctcagaaattttaacttagagaacaagtgactggaaatctcaacagtcatggggacagaataaaagagagaagagaacatcgtcatgttcatgtttatgccaagacacagcatgttaaagacacgatcccggaaacacaaaaacaggaatacactaaactaatctcttctagccgcctgaaatcacttgcgtttgaccatctggatacacattgacaaaaaaaaaaaaattgattgaagcctggttagcgatgcgtatggatttctttcaagatccatacacaaaaatcaaacccatatgttttttttcaagaacttcatctaactcacctgccagaaaaatcgcactgttagcttgtttatcagcttctgaatttttttcctgcaaaccggacagcttacaattagtggtcatcttcatatcaaatgaactcaaagatacttggtcctaattcgcactaaaactctcaaaaccaaacatgattggatatctaatgattgttgcgcagacggactacagagttgatcacaagcaaatcagcagctagaccaagcgggtttggtggcttaccctggcaatgtgtttgatatcgaatgttttaaaactgttcatgagctccttagcctgtttgcacagctcagccatttttgggtgattggttttccatgcaccttgaacctgttccattgtcgaatccaagttatcaaaacaattaaggcacaaacatgaataattcaaacaagacaaaagataagagtgaattttatatctggacctgcatacagacaagcattgagtcgcctaagacgtgcacatttttaaaccctttgtcaagagcagacctcaaaccaagaagcagagctcgatactctgcaacattgtttgtggcattgccaacaccttcccgtaaatagaagaggacactattatctgaagcacggagaacagctcctgcaccagccttccctgggtttcctttagaagcaccatcaaactcaatggtacatgaatcctgagggcgaatgatagataaaggaattataaagatgcagaagaagaaaacaagcatctgactgaataattttgttggatgttattacattttgacgtataggtgtccgagttaggagactggaaggaatccgacgaagcatgtcattttcgatcttaagctgcttctgcggaggactaggggaaaatgaacccgattcaccacttccctgaagatcagaggcacaagaattttcatcattatcttcaagagattgcaaaacatacagttactaatacatagcaccagcagcaaaggcaatgaattatgtctctataacagaaaagatttacagttgttaccatatcttgcaatctcttagacggggaagatttgttgagagactctccttgggaagaagacggttgctgaaatgaaaaatcaaaagtcagaacagaattttgaacgtcaactaaaataatgtcacagattagacaagcaactgagtagatgttcctgtaaaatatgatatctgcactaagatcactctctattattcagtcgctcatacaagaatgttagttagatcaagattgtgtgtcaaacctgaacaggacaaggaatgagtttcccaaaagcatcatctttgacatgacttgcattgacagaaaaaagagcgttcttaatcccaaacgaagataacaagtcctctgctccttttggccaaccatatcctttgtacacactcattgcaggatgtgatacctgaaaccaaaacaaaacatatgtaagccctaataatgcagacatcaacttcaacagtgaataagataaaaggaataaacagagaaattacagatgaaccagcttgcccttggcattcgctcaagcttcgatagacaccaataatgtctcccttacgcacaatgtaaaacgcatctttttcatcctccattgtggaacccatcaaccctaaaatcccccaaatcttcaggaatcaacaaaaccccgagttatcaaaatcacagaaccctaaaacctaagccaaacgaacaaataccaaactaaaacaagtccccagaaagcaattcaacagagatccagaatccgaacaggcaacacgcatcgagcgagagagagacgatttggttttcgaatttcaaacttagtgctcttgcgatgcaacaacggaccacgagaaaaaatatgtagatgggcttccgtgtgaaaaagcccaatagaatattacggtttcaacacgaacgaaactacttgccgttccatttcacacaaataaaactacttgccgtttagtggaaattacattaatatattcacaagttatactccacttacacaaaattcatgagtaacctagaatttccaattatattttagcagcctgaatattgatctctctatatatatattaagaattattagttatggattattagttaagtatttactcctaagttaagctctatacttgagttgtagtcaatatataaggcagatagatttgtaacttaaaccccaagaacacgatttatacgaatcaagttttcttgacattaataatgaaacaagtacttaagtactgtagtaggaaaataaaaaaccacatatagctattttataacaaggtcttaaactcttaataattctccttaacaactgagcccttcacagtatgaaagatttgtttgttattcacgaaggaaaacagtgttcttggtgtttacagtttgtaaaaatattggaagccatcttaattattatagatatatgtcactcatatcatgttgggaatcatgcctgatctagttgtcatccaaaggatcaaccaacatgtagatgataaataaggttataggaaaacataaaagggttccaataaagtaggaccatgaggatgtgcctaaccaaccgaggattgcaaacagagctcctaagtaagtggtggacagagtatgtgtaactgtaaaatcttttattggacaagagagttgcacgatcgaaatccccgctagtataagacacacgccaattatggacccctctactctgctcattacgccttggacattatacgagatgcaatacataagtatcatcacggccaagaagaagaatgcccgcccctccggtcctagttgatatcttgggactagaacatctttgcacaagcaccaaattaccataccaatgtatggaatattcgcagccctcagagttgtgtatctggccatgatgagacataatacaattaaaaatcatccaaataactacttcaaatcaaatctatatacaacaagaatttccttacacgtatacgggcatatagctagggggttcaatgtctaagaggatttgtaatgatactctcaaggcaatgaaatagtataatccacgactataaagacaaatcacttctttgactctcttttcacctttcattttttttgtgattagttaattaagacgaggagcacaatactacaaagaagactcaaactataaatgttatatgtctagaatgtatattggttttattttatactaaatcaaaggtgataaagagagatttgatcaaatctgtatccaatcaaaatttgataaatttttaccaatttaacacattttctaacttaaactctataaatctatacataattaagtatataattactatccaactcactatttaacaaaattgataaaatataaaggaatgattaatatcaaatacatacatatatagacattttttattaataaaaaccattaaaaccttgacacatcagtatttatcttcttttatacaaaatttaatctgtatccaatcaaaatgtgataatttgtttttaccaatttaacacattttttgtaacttaaactctataaatattcataattatttaattactatccaactcactatttaacaaaatggataaaataaaattaatgattttacatcaaatacatacctatatagacattattataaataaaaaacctattaaaaccatgaaaaatcaatatttatcttattttattcaaaatgtaatctgtatcccatcaaaatttgataattgtttaccaatttaacacgttttctaacttaaactctataaatatatataattatttacttactatcaaactcactatttaacaaaattgataaaataaaatttaatttaatatcaaaaatacatatatagacactgttaaaccccattaaaaccttaacacatcatatattaagtcgtttctactttctaatgatttaaaataaatctggacgtataactgtttttcagctattttgtagttgaatgtcaatgtcaaactcaaaacgttttgcacattctggcagtttctcgatgtcatgtgaataaattttcagttttaataatgaaagaagtacttcaaatggtatgaaagtttatatcatatacattattttttattataacaaaacgggattacaaacaacttattgaatcacatgttctgtcgaacgtgtatatatttgtgcgcacaaatatatctcaaatacaacattggtgcaatatttgttaccccaaacatatttgtgaaatccatatattatattattatattttcctttctctcaacataatgtgaataaattttcagtcgtaataatgaaacaagtactctagtaagaaaataaaaaaccacatatcacttatcagccttaacaaccgagcccattacaatatgaaagatttgtttgtaatttacaaaggaaaagatttccttggtgtttatttgtaaaactattgtgaagccaaattaataattattataagtatttgacactctacttatatcgggttgggaatcatgcatgatatagtggtcatccaaaggatcaaacactagatgataaagaaggatatagggaagcataaaagggttccaataaagtcgtgctatgttcttcctatcccacctaagatagcaaacaggcctcctaagtatatatggtggatagagtatgtgttgaaactgtaaaatcttctaccggacaagaaagttgcatgattgaattccccgctagtataagacacatgccaattatcgacgcctctactctgctcatgacgtcttggacgttatatgagatgtaatacataagtatcatcacaaccaagaagaatatataacacccgcccctccagtcctaatcgatatcttgggattggaacatctttgaacaagcacctaattaccaaggtacagagtattcgcagccctcagtgttgttgcgtatctagccatgatgagacataatacaattaaaaatcatccaaataactacatcaaatcaaatctatatacaacaacaatttccttacacgtattcgggcatacaactaggggttcagtttctaaaaagatttgtaatgatactctcaaggcaaataggcaatgaaataatataatagacgactataaagacaagtcacttctttaactctcttttcgcctctcattttctgtgattaattacgacgaggcgcacaagactacagagaagaaacaggctaaaatgttatatatgtctaaatgatgaatgcagaatgcgtgtaagtctttttatactaattcaaaggtgataaaaagagatttgatcaaatctgtatccaatcagagtttgataaaaattttaccaatttaacacataattatttaattactattcaactcactattcaacaaatttaataaaataaaaaccaaggatttagcatcaagtacatacatatatagacattaaaaccttaaaaatcaatatttagttatcttatttatacaaaaaatagtcatttactttcgatttctttcaaataactatttttgtgttgaatgtcgccaatgtcaaactcaaaaacgctttgctcatttagggagtctctcgacgtcgtgtgaataaattttccgttttaataataatgaacaagtaattaaaatggtataaaaattatatcatgcatatacattattttaattataacaaaagagtattacaaacaacttattgaatcacatgtatatcacccatttatttatctgtatagtacattacaatgtcgaaacacagctcacagccaacaaatgccaaaaaaggaagaaaaaaaatcattcgaagtgccatagatcacattaaaatgatcaaattaagagggaattcggagatagagagggattggatttttggtaagtggaggtgaatcccatactgaaaatgcactttcagagttcatccatttgtctgtcatatcaggataatgacgatcaatcacatccttgagactctctgtagtattcacccattcaagccccttcttcgtgtaaatcgtttcattgaaatcactcgtgaaaaacctatccgcttctaatcgcctgaaattgtttaaattagtattagattattaaacttttctaatttactgtgatatcttcaagaaaacttggttctatatatatatatatatcgaaaatatataccttgtggccatgatgaggaaaatgtaaaaagcagtctcactgatagcaaaacctttgattttcttctctgccataagtcccacgagaagatcaagctcctccacatcaccatcgtacacgtcatccaacacttcaatagcttcctcatcctccgttagatcttcccacttggttatcggaatcataaacatagatctcctgaactcgttgtaccgtgggacgctcctctccctgtccctgtagactaaaataaccgaaaaaaccgaattcacgtgagaatcaagtcaaacaacaatgaacggctgagatcaggttgacttactctctaaagcagctaagtcgacgtggtctggacgagcttggccgttggggtcgtggggaacaatgtctcttaaccacatcggataattcatcagttcaagggcaccacttgcttggtgacccattgagaccattagcttagtgaatccaatgtgagacatggtttcttctcccttgcgaccaatcaaatctctcatagaaatcctaaatccaatgaaataaaaccctaaatttttttacaatttggaaacttcaaaataggagagagatgtatatatataaatgtcgagttatactcttgaatcaacggtagtgatttattagttcctggtacatcatcaatgtcaagtatatggagttgatcaggtaagagagaatgcattcgatagacgctggtgaaatcttcagttagagagtaagggaccccatgattttgcggtttcttcattcccacgacacctcccaagatcgaactgcctgcatgtccgaaagaatctttaaacttctttcctagtagtccgtacctaaaatcacaatattcaaaagtgttagaatgcaacgtctgtacgtaacgtgattcattatagattcaaaaaaaaaaaaagtggtatatattgaccaatttgctcgcatcccagcaagtaaagtgtcggttttgagaagctggactgtccaatctatggtgtgaatcttggctaccacggctgaggtcactagcctagcgtaccggtacaaatcttcgtcttccaaatcatcatcctcatcctatattaaataaaagtgttcttaattagttttgtacaaaagaaaaaatattttaattaatttcgtaatgtacattaaaaaatttattaaaaaaaaaaaaaccttgagggcgtcgcatacggcgttgtgctctttgatgaagagagcttgcaaagcggagacaccagcccaactgttacgaatgtcgccggagatagctaaaccgtcttcgtcatggagaaggagacccgtctcctccgatatctttagtttcccgtctttgtaagttcttactctatccaatgttttcgagttgcttccatagatgacgctcgaatccctaatttatcaaattatttatggtcatcatatatatacttaaatgtatgcatggatgtgtgtttgcgtcgtccatatatatcatcatctatagaataatttatttatttttcctttgcgacaaattttgatcgtaaccgatcccacaaaaatgtaaatagtaatatgtaacacatttttgatgatttatataataggttagaataaaagaattaccaccaaggtgtacggatattttgcgagccagtcttgatttcgaagaaaccggtagggacttccttggtctttaagaacctaaaggagcttaagggacacttgctcgctacttcttttggagcgacaagttcgatctaagttaccaaatcaattttttcgttaaaaacatatatatgataagtgcatgtgcgtaaatgatggattaaacagaaaaataatagaattgacgaacttggtgagtgtcttcaagatgatcaatccaatcatggatcatgaactgaatccaagaagctgcaatcatgttgaattgttttcccgtgtcgataaactttttccttcctaatagttttgtcgccaccaccatggggtctggcctccgtaacttcaaaaaggaaaaaaacattaattattttttaaatatccacaacttgctaaaaatgggaaaacgtgtttaaatttagaaacttctcaataagatattctcttatattagtcgtcaaatcatattcgacactttcatacacatatatatgaaggtaaaaaatgattacctttgatttctgatcgacggggggacaatttctcccgaaaaaactattttgactgccgacgccttcattaaagggatcattgaattttccgtcagcagtccggtacggataattagcaggatcaaaccggatcccagtcggagtttgaccgacgttgagaagattgtattgttggtgaagatgtcttcgtacttcaagataggttaaccccaagaatactggaagcttatgccatggaaccatcttatccactccatgcacgatctgcaccatgtaatttaaacatcatattataactttttccactatgtaaacaaaaaaacatatcggtaacgatttaaattccttaattcagttaatgatccgaagaaaaaaaaagtgtggatgtgtttctacgtgcatatatgtgtgaaagttcaattacttacaagaagaagaaaccgatcgaggagggacattcttgcataaatctcatggaagtctttgtggatgaatttaagcaaaatagaagagattagggaagtaattactttcattctgttaaatttcttggggttattgtagatatatcttgttatgtgaaacgtcacaagataaatgtttaaatagagttgcgagggttgtaagaaaaccttagtgtgttagttgcctatttataaagcataagccatgatatatataaaaaaaaagagaagactattcaaattgagtgttttgaaaaaatatatatatacaaaagtcattatcattattttcttgttattaaaattttgaaaatgtgactcattaactttgtatcattgtgatttatatatgtcactgcgttatcattgaggtataaacacaagtctcaaatattaaacatacgctttctttttcttttttgggtatcctgtgttgtatcggaatggttatctattataaaagttaactgcaactcgaattaatatgaaccttaattttattctcaaaaatagttatataatagaaactgttactgaattgttctaaagtgggggtgtcatcacctaagaaaaattaagtttctacatgcattaaagcatatatgtatatatttaatgggggttggttaaccaacccattcctcccttacccaaggtccgctcttgaacacaatcaaagattaaaagattgccattttgcttcaaaataaggaaaaagaatgatccaataaaataagtttgatatatagagccatcatcaggtacgtgttagaatctaatattttttatgtttccgtagacaagttagattagttagtttagtcctactcggctactcctttgatttatactatttgaacattttatattgaatcagtctctctctgcacgtatatcagaaaacgtccgaatctttggctcttaaagatatctatgtatgtactagtaatttgtctttataatatatatctatattagacagaccaaatctcaaaatgtcttggatgaaatgttaaaataataccatttctgttagttttcgtgcgtgttactcaaaattaattaataccaataaattatagtatatataaaaatttcgacacctgaagtttggttgaccagacaatattcaataggtttttttaccactgtttggttgcttaatttgcacgactttactggttgataattctaaatcgtctcgaagtttatgatttattgtttttatcataaataataaaagtaaactcttcgataattaggattctttttgtttattccaccaggtttataaattataattaatatttttcttgacaactatggcgtctatatattcgaacacgacttaactggttgagaattctaaacttaagtttatgattttcatcataataaaagtcatatatgcaagtaattcaagattagggttctttttgtttattcaaccaggtttataattaatatgacgtctatatactcaaacgtacgacttaagttttggttgataattctaaatttataggtttatgatttattgtttaatttcatcataataaaagtcatacaagtaaactcttgggattagggttcttttcggttattcaaccaggttcataattaatatatccttgacaactatatatgacgtctatataataaaaaccaaattataaatagacgtcacgtattattataatgtagataccaaacatgtttgatcttttctctgtggaatgtgaactgtattcgaagaagatcatgtcggagtttacaaattatacgtaactggatttgatccaataaataaaagatcaaagagtaacaatttgataactaaatgtgaaacatcagcaaatgacaactattaagatgtagataagtcttggattaaataaaattttcacgtgatcgtttgggttaaaatagcttcgttctttcacttaagattcaattgtcatggtcattttatataaattggtcattttatataaaagttcgtttcggtcatgtcatgcatgtttccatggactaattaatatgaaaaaattgtaaacaccatatggtcgcgcacactagatctatcacaagaactatcaacattacttttcaaccaccaaaaaattatgatagcctactgccttaagcctaacgcgatccaaccaaacgcaccactaaaaatccaattcaaagacttgaaacaggtaaattacattcgagcaattctactcctccgaatctacaaaagtggtgaaagtgcttgatgatgtcagtgatttccaaatatatatagagtccctcgaaaaggtaaactttttccaaattcatgatagggtaagatcaaatcaactacaaggaaacatacgtggcagaaaaaaagttcaaaagaaaagataagattgtagtttgtttgacaaagaaataaagagtcgcaaatatggatggttacgggtaactacaaaaatcagagaaaaattgatcatatatcatcatgaattccataaaaggagaaagaggtggctacacaagcgatcctataaaaaaacagatcaacgagtgatccttgtagttgtggaacactaattcttacacgattttcgctaatccaaatcctgataatcttagtgttacactaattcttacacgctttaccctaatccaaatcctatgaacctaattcctgatggtttgaaaatttttactccctatgttcctaattttttatttttttctagagttttgaaaaaaaaattgtttaattatttctatatttaaattttttcttggatgaaaggtgcttttctttgtaattacattggtaatgacagaataatactcaatagtcaatactaatttataaaaaaatattggaagaagaaacaaaatgccatctcattttggtctcacacacgacaacataaaaagtcgagcgcgtggctttcacttgttatcaatgtcgctatcgaaatcaattgagcatttagtggaaaccggtaaggaaggcgcagcgaatctcatcgagtaatctcggtacgggaactcgtcgtcaaaatgtccggtttgatttccgtcatcgaaatttaacgagtagctcaactgatcgtaccggaatttaccctgatccgatgaccggttaggcattgcaccacctccgcatcctccgctgctgtttccgactctccctcctcctcctccacagcagttgctgcgtccgaaccggcggatatacgtcttccatctaggtccagcgacgagctccgaccactccctcatcctccgccaccctcggatccaccatcgctcgtcgggttcgagtttgtcgacggtcgtgatccgttgccaccacacagatccgccgcgagttgatggctgagatgaggcaaggcagggcatgaggaaacaacaacctcgcttcgcgaacaacgcctcgtgcatatcgtcggtggcatcaacttcagcgatcggcggcgattgatgactcattctcagagagaaacagaaacgaaggaaatatggaatttcgtcctgatctagctactctcttttgtctccttagatcgtcgttcctcttctcatctccaactctaaaccctaattttctccctctacccaagagatttctatcaccttctccaatcaacgcgtctcttgagctgtaactaaaacagaagagcacaaaacggcgtaaccgccaacccggcaatattggttctcattaaccctttttaaccgctttggttttatcacatctaaccgggaatttcagctgttgatgctattaatttattaaaccacatatgaatgaaggggttcatatacgtaattgacgttagcacatttggttccaagtattgatcgatacattaaaccgcaataaaattggtccgtttctctctggcccaaaattggttcgatttctccataagctgaaattgataactcccagtggatgtaatgtatctaatattcttggaacagattcattgcaagtgaatgttctaaccaaaatcacctaatctttttgcaaaatctaatatagtaagtaggataatatcttacttttgcaacaagccactcattcgtaaaaaccggacatactttaatgggataacctacaagtctacaactcatctggaaactatatcacaaccgatggtttagtatagttcttcaagtaacctttttatgaataccaatatcaatcagaagaaggataccggtcagcagtttgtttcagatcttcaagctgcgtgagaacatattcaagcttctggaagcagatctcattggctattctcgcgttgtaatcgcatttctcaaagggacggtactcgcaagcgcttttgatctcttcccttagtgtcacttgtatatcctgcaagtttcacaagaacttcatcttattatggattggcgataacattatagcacatttatgtacagtcaaagatcaacaagttcatgaaccagacaatgaagctgatatcttcaaactttatgattatctctagaaaaaaagcagaatcaaaagctttttacttgttcacagaatgtaatgatccctaatctagacatgtgtcaaatgagagcccaaatgttctttaaacagtgagattccatccaatatgaaaatatcagcatccatcactcataaaccttaagcctaagaataaaggatcaatgtcaaatcctaagaaacaggaaaggaatacaaacctagagattgtgatacatgaacccatatgttaactagtcacagaagaatcacaaaacgagaagcagcggccatcttgaagactaaaaccaaaatcaaaattctaaacaaagcccttaactttgatcaggaaatgtaatgaaccctaatatagacttgtgtcaaattagcccaaacgatcaacactcgagaaaagataccaattccccagagagattgagtcagcaagaacactaatctagctagacttgtgtcaagtgatccccaatgttctttgatcaggtagtttattaatacactaatgcaaaagaaatcagaaaatatttgaagaagagatagagtaagaaaccttcatagattgcataaactctcggcaatggctgttgacgaactctttcttgggaccagaagggctcgcgagttcttccatcactccaccagctagttccaaaaccttaacaactctctgcccggaaaaccaaaaataaaaacacaaaaacacattcacatcaaatcgtccaataaaatctctaaggaaagagtgagttttccaaaatttcacattctcaacattctggagtcgctgcaacgaagtgttctgcgtctgcggatccattggactctccacgatttcttttagaccagagagagagaactccaaactgagatatatcacaataccgtcaaatccactcatacacataccctaaatactcaaatcggagcagtgggagtacctcaatcgaacacggcgacgcgagacagtgaagatggcagagacgatgaaataacacggagaatttcgattggaaacggcgtgcttatgatcagcaacggagggaagattttggggaatcggcgacactcggcaatacagatcggtgaaggaaaaagcaaagaagatacaagttttttttgtcacgtaaaacggcacgaactctactttatcaattcaggaacagcgagtagttaaaatattgaattacgaaaacaccccttggttcagataaaatctttgtgatggccgcttttctcatttataacggataaaaaccgtaaacaatacacaagaacagaggctgacacctaaagcttactctctaactgcaatggctcacttcatagacctcaacagtctcaccaacactttaccgtctcttccgaaactacccgagagtcgtaaaaccgggaaatccagcgggtttgcttgcaggagaactgaagaatttcaagaaccggattcggtacagatcacaagacggatgacattaggatttgctgtctcaataggtcttaccggaattctcggcgaaaataatgtttccttggcacaagacaatgggttttggattgatggtcctcttccaattcctcctatttacaacagtaagcgccattttatattcttgattgttttctttcttcaaatgtttgaacattttgagccatacaactattcaagatgagaattcgatttggtagaatcatttgatttccggttttgaattcgtcctcgatttgaatatacagatatcgtgaatgagaagacgggaacgagaacattcataaagaaaggagtgtatgtagcggatatcgggacgaaaggaagaatgtatagagttaaaaagaatgcttttgatctcttggcaatggaggatttgatcggaccagatactttaaactatgtgaaaaagtacttgaggcttaaatccacatttttgttttacgatttcgacaatctcatctctgctgctgcctctgaagacaagcaacctctcactgatttagccaacagattgttcgacaatttcgaaaaggtaagtgtactaatgaagtcctggttcgttcaaaccgaagagactattgtttttttaaaatttcttctcttttctgatatatcctatatgtttatttgttgttttcttggtgtttcgacacagcttgaagatgcagctaagacgaagaacttagcagagacggaatcgtgttataaagatacaaagtttcttcttcaagaggtaatgaccagaatggcatgatcctggttcggtttataccggtttacttgctattgatgatcctacatggttgataactctgtggtcataaattgtaatctttgcggaaaaatattgagatctagtaatcaaaaaaaaaaaatgtaatgtatagaccaaaatatgatcaaatttataacgaattggattttaatttttcaatcaaagatacagaaagaagagtatatgcactaaatgtttaatattgaaatcttagttttaagaaaacatttggccaaaaaaaaaaaaagttttaagaaaaccaatgtaatatagactaaaacatgatatatatcaaataaaccgactaactttttgcctaaaactaacggttgagtcgttgagatttatcttaccacatcgacatattcacacacaaaataaagaaacaaacccataaaccaaagatagagaaacagtggtcgtacaacgtttactcacagaggcttacaatatcaaactgagggcttgtgactgtcatgaacccgcaacaagaccctctcgagccacacctgcgacattggtgacacgtatcacagcctgtgcactaagaggtgagaggtttgattggcagaagatttgccaagtgactggctctggatgctcctccttcggttcgacattagtagttttcttgtacactgtctgaagttccagtaagactgcccgtgcagcctcccgagattctgggagttggtcactgagctgagacgatgctgcttggactagtttctcaattccatattctctaatgccttcaatgccctaatgattacacagccaaagaaaggtgatgttggtgggaacatggactggatccaaattggttgtcatggtgatgacatgacaaatccaaaacaaaagaacaagactggttttatgatatcgagtgcagtttgatttaccagtcggggaacacatcgggagaagcacgtggatgcttttgcgcggatccgaggattcctattcttgagaaaaggttgaagctttggcaacagcaaggcaggagaaacatgtgcagtcattgctactaatgctttttctgctgcttcacaaacaaatcgcttgtcttgggaagatttaaggaggagttgagtaagctgtaagaagggaattcggagttactgttataagaacacacaaatgtccgctatttgaggagaattccaagagtatctgcaaaagatgatttaccaagagatccaattgatcgattgtatggtcattatatgagctgaagatgtcagcagatgtcatacatgcggttttacttacagcacttcttgggttcttcagtgatttcacgataaacaggatcactttctccctgtaagagctgacagcgtgagactagaaaattctctcgacgtgtaactcgctctactaaaactgatcataatcacgagtagaaagaaaatgacttacagcatatgcagcatttcttccttgtggaatatggaaagacgacgaatggtattaagagcatcacagaccaaaacccaatccttggagtctagctcggttacaagtgactggaataataaagaaagcagttccagaatggtattaggtaaacaacttacttccaatgtccaaattctaaacagatgaatataattgcaaatttgcaaggcagcattacaaatgagaattcacagtaaagcataggatactagcaggaaaaaacaattgataccttgagaactgcatcaacttgggttacattgttcaagtctttggattctatatactcaatttctacgataactctctctgcctcaggtttctcaatctcatcgcctttaggatgattgtgatcaaaggggacagagttttgtggtggtttatcttcagctgttccattcattttgccaaccaaaagctttgttttatagtcgatattcctctcagagacaggaagattcttcaaatcttttaaagccttggcagccatgcgtacctgaaaagtaacaaagaagacgccattataagtacaaacaacataagtttagcatctgcgattacaaaaccaaagataagattatagatgaattttcgacctctagcttagtattaagtattcccaatgaaaccctttcaaagtagaaatggtaagataaacacattactatgagagttcaacagcaataacattaaagagcagagatctatctacattcccaaatcttatttcaaacaattacgaaatttactcaaaacaaaagcaaaaaacctcgatcccactcaaggactctaaaaagttcaaacaaatcctcgcagtccgaaatctaactccggcgccgtaaactactgcaaccgcgaaagatcgaaaacgcagaagaatagaaaaagtagcggcgagtcaagcggtatcgatgactactaacttgaagagtaaatagtgaagattatttgactcgcgtacctctataaattcgaaatgccagagaaaattcagggagagaaagagtcgatgaagacgacgaaattgatttccggccaacagttcgcaactcgtagtagagtcgtcgtagtcatactcgtttacaccgacgtcgttttatggatccaacggaggggacccatttgtacggcatatcttgggcgaaattaatgtttttcttttccttctctctgatacactttggttggttattgtaaattcctcaaataccctcggactagatatgcatttttatttttatttagatatggaattggtatatacatattttttaatacgtaaaaacttggattggtgtggaaatattttattttctactaaacgaaataaattgaacgtataaagtacatcacatgttacatgcactgatgcacatgaggagtgcaaatttgaaaatataagataagaaacatgttgcaaagctgccacccaccgtatccaattgctactatttgtatcaatcagttacaaactgaaaaccaaaaatgaaatgactagaacaaataatgttaaaatgcacattgaaatagttaacaaggaaagcatacattgatcgataaaacgaatccaccacgttccaaaatattttgtcgcagatgttgcagacttgtagctaagttgggccggtagatgtaggtgacaagtgtttacaaatctgttaactgtcgctgtgttcctcctacttttgattttgtgttacactattcaaaagttggtcgactcttttaatcggttgattagactagtacttagtaaaatttgttgttaaaacttaaaagggagaagaagaagaagaatactgctttaattcttaattaatttttttttaaaattagtagtatcattaacgtgtttattacaccttcctcgagttactttcctcgtgatgccaatggtttttttaattctttaccttttcttctgacacagagtcacatatttgactacggaggagatctattgcttcctagttcctacttatctttatcgcgttgtaccaacatcaatataaaagcaacatcttactttataaacttccgtaaatttgataacaagtacaatcaagtttaaatttttctaaagttaacataaatttagcatcatacaataattaacattttttttaggttaaacttttggtgcgttacgtgagtagcagcatcttcgaaaatatgtttagtagtagtagtgataggaattaggaaaaggcacacacaaaaaagaaaaaaaaagggtaaaaggattcattcacgtttttttgttttctctctccaaacagaacttcgggaaaagtggacaaaaaaaaagaaaaaaatttaataagaaaacctctttttctcgcaatttggttttgttttcaatcttcttcttcttcttcttcgtcttcaatgcaaacaatgctcgattccattaacctaatcgaataatggaacccactgattctactaacgagcaactcggagacactaagaccgccgctgtcaaggaagagagtcgctcctttctcggcatcgatctcaacgaaatccctaccggcgctactctcggcggtggttgcaccgctggtcaggatgacgacggcgaatatgaacctgttgaagttgttaggtcaattcacgataacccggacccagcccctggagcccctgccgaggttcctgaaccggatcgggatgcttcgtgcggcgcgtgtggaagacctgagtctatagagctcgttgtagtctgcgatgcctgtgagcgaggctttcatatgtcttgtgtcaacgatggagttgaggcggctccttccgccgattggatgtgcagcgactgtcgtactggcggcgagaggagcaaactgtggccgttgggggttaagtccaagctcattctggacatgaacgcctcgccgcccagtgatgctgagggatacggagctgaggagacgtctgattcgaggtacgttcccctgcttctggtattcgacgatgcgttagggttttataagaattgaatttgggttgagatcgagaacatagttgcaagacttggttaagctgtctttacatgtattgcgagtaatgtgttcgattttaaagcgataaactattgaagattaagctggactaggatttggtgttgttgaatttaagtttcagtataagttgagcgttctgtgctaccgttcgttggagtttttaaggggcctttgatcttctcttatgaattacttatacatacgatatattttcaatcagttgtttagactttatttgattggacttgtctggccttatataacatgagtatgtctgagaaaacacatagccgaaattgtaaagcactgatggatcatgtggttgcttgtttcttcttctccagaaagcatatgctcgccagcagctcttgcattggaaactcttttgattatgcaatgatgcattcaagcttctcaagtctcggtagaggacatgctagtctcgaagcttcagggttaatgtctcgtaatactaaaatgagtatggatgcattgggttcacataatctaggttttggattcccattaaacttgaacaatagtagtttgcccatgagatttccatccttggatccaagtgagttgtttctgcaaaatctcaggcatttcatatctgaaaggcatggagtattggaagatggctggcgtgtcgaattcagacaacctttaaatggttatcagttatgtgcagtgtattgtgctccgaatggaaaaacatttagttcaatacaagaagttgcttgttatctgggcttggcaattaatggtaactacagctgtatggatgctgaaatcaggaatgagaattctcttcttcaagaaagattgcatacgcccaagagaagaaagacatcaagatggccaaacaatggtttccctgagcaaaagggtagttcagtgagtgctcaactcaggcgttttccattcaatggtcagaccatgtctcctttcgccgttaaatctggtactcattttcaggctggtggttctcttagctctggaaataatggatgcggttgtgaggaagctaaggtaagcgtaaaattgaaatctctcctgattgattgttttttccaatatttttgtaattcttaccctcatgtttgtgtatttgattttcagaatggatgtccgatgcagtttgaagatttctttgttctgtcgcttggacgaattgacataagacagtcttaccataatgtcaacgtgatttatccaataggatataagtcctgctggcatgacaagatcacggggtcactatttacatgtgaagtatctgatggcaattctggtcccattttcaaggttacacggtcaccatgctcgaaatcatttattccagctggatcaactgtcttctcctgcccaaagattgatgaaatggtggaacagaacagtgacaaacttagtaatcgtagagatagtactcaagagcgtgatgatgacgctagtgttgagatccttctttcggaacactgcccacctcttggagatgatatattgtcttgtttacgtgagaagagtttctccaagacagtcaattccctgcgctcagaggttgattcttctcgagtagattttgataaaaatttatcctatgatcaggaccatggggttgaaattggtgacattgttgtggaagaagattcattgtctgatgcatggaaaaaagtgtctcaaaaacttgttgatgcatgttcaattgtactgaagcagaagggtaccctgaatttcctatgtaagcatgttgacagagaaacaagtgaaatcaactgggataccatgaatgagaaagacaatgtaattttatcgttgtcaaaattttgctgttcgttggctccttgcagtgtcacgtgtggtgaaaaggataaaagcgaatttgcagcagtagttgatgctttgtcaaggtggctcgatcaaaacagatttggacttgatgcagattttgtacaggaaatgattgaacatatgcctggtgccgaatcatgtacgaattataggactctgaagagtagaagttcttcttctgttcctataactgtagcggaaggagcgctagtggtcaaaccaaaaggtggggaaaatgtcaaggacgaagttttcggtgagatttctcggaaagccaagaagcctaaactaaatggtggtcatggtgtcagaaatctacaccctcctcctgggaggccaatgtgtttgaggctccctcctgggcttgttggtgacttccttcaggtacggatatacgttttccttatatggtaatctacaacctacccctccattcactaagtcatgccgcacatatatgatagtcattttttatgcttgcctaattaggtatctgaagtgttctggcgtttccatgaaattttgggttttgaagaggctttctcacctgaaaaccttgaacaggagcttatcaatccagtgtttgatggtttgtttcttgataaacctgggaaagatgataagagaagtgagattaactttactgataaggattctacagctactaaacttttttctttgttcgatgaatctcgccaaccttttcctgcaaaaaatacctctgcttctgaactaaaggagaaaaaggcaggggattcttctgattttaagatttcagattcctctcgtgggtcgtgtgtgggtgcacttctaacaagggctcacatttcgcttctgcaagtgctaatatgtgagctgcaatccaaggtagctgcatttgttgatccaaactttgattctggcgaatcgagatccagacgaggacgaaaaaaggatgacagtacactttctgctaaaagaaataagctgcatatgcttcctgttaatgagttcacttggcctgaattggcccgtaggtacatcttgtctcttttatccatggatgggaacctcgaatcagcagagattgctgcacgtgaaagtggtaaggtattccgttgcttacaaggggatggtggtttgctttgcggctcgcttacaggagtggctgggatggaagcagattcaatggtatgtttttgttagttttctgattatttcctggattatatatcttgcttgtattactggatgatgggatcacaaattcagtttcacttttggaaacgccgcctatgtgctatttttcttttctcttcaaatgttctaaagcttatttgaagctatgttccacttgtaggtcactctagagtaattgacctttctttctcttcttggatcttgttagatgtattttgacatttagaggctgtttatcttgatatcttgaaggccctcttatatttatactgactggaaaattgggttactttgtgtttcaaatgagttcatgagctacctccactgaaagagaatgatcgttggatttacgtgtttatattaactctttatcttcagttacttgcagaggctattaagaaaatatctggttcgttgacaagcgaaaatgatgttctttctgtggaagatgatgattccgatggccttgatgctactgagacaaacacttgcagtggtgatattccagagtgggctcaggttttggaacctgtgaaaaagcttccaacaaatgttgggactagaatcagaaagtgtgtctatgaagctttagagagaaatccaccagagtgggcaaagaagatattggagcattctatcagtaaagaaatatataaaggcaatgcatcaggaccaacaaaggttcaaaatctctgaaaccaattctcttccctcctgaaatactgtacttgcaattttaaagtatttcttgttttctcaaattcactttgtttttctgtctcttgttcttgcggtgatgtaatctcagtctgatgatgcatgctactttcttagactcacattaattctgagattagttatttccctcttactggacacagaaagctgtcctctcattgctagcggatattcgaggtggagacttggtgcagaggtctattaaaggaaccaaaaagcggacatatataagtgtatctgatgtcattatgaagaaatgccgtgctgtattgcgtggtgttgcagctgcagacgaggataaagtcctttgcactttactgggaagaaagttactgaattccagtgataatgatgatgacgggctcctgggatcacctgcaatggtttcgcgtcccttagacttcagaactattgatttgaggttggctgctggtgcgtatgacggatcaactgaagcttttcttgaagatgttcttgaggttggattttccctcttatgtctgatttttctttgtgcaattgatggtatgatgctttttgtgcgatttaacaattagtttctgaatgcttatactaaaactgctattcattttgggcatttcatgtttctgctgttagtttaacactgctggtttagatgcgtaagtgtaaagtatcacaagagccagatttatattaggaatacttttactttctctttatgtcatagaagtatcaggttaaacggttgaacgccagaatttttgctggctcatttgataactttagatttgaatgcatgcaacttgattttttatagatgacatgctaaatataactttctaatttgcagctgtggagtagtatacgtgttatgtatgcagatcagcccgattgtgtggacctggttgcaacattgtctgaaaaattcaagtcgttatacgaggctgaggtttgtcttctctctcctttttctgctatgctctgcacaatagatatattcattacttagtagcatcttgaagtggagacagtcgtttatattttggcacttttgtgaaataaatgtgttaagatttatcatttctgaaagttataggccgatcaaagaagcatctggagatgcccattaatgctatatgctatgctttagaagggttcttccttttgtctgcgtgtatgattttcattgtgttcgcctttcagaaattgtatgcatggtctcctttttctatgagaatagttgcagtatcggggtgctattattttctcaagtttcaagcctttatttatttgctggtataggttgtaccacttgttcagaaacttaaggactacaggaaattggaatgcctaagtgcagagatgaagaaggaaattaaggacatagttgtttcagtaaataagcttcccaaggccccgtgggatgagggggtatgtaaagtatgtggcgttgacaaagatgatgacagtgttctcttgtgtgatacatgcgatgctgagtatcacacatattgtttaaatccacctcttattagaattcctgatggaaattggtattgtccatcttgtgtcattgccaagcgcatggctcaagaggctttggaatcttacaaactagttaggcggcggaaaggtagaaagtatcagggggaactcacccgagcttctatggaactgactgctcacctggcagatgtgatggaagaaaaggactactgggagtttagtgctgaggaggtcagttttgaaacttgtctcccattttttgctcattcattcgaaatgtgtcaacttttcattcccaacatgattttatttcgtggtgattacttgtgcaagtgatccctttacctataaattcttacaatcttttggtgctgtttccattggtattatggttgaatttttccctattctgatgcagagaatcttgctgcttaagcttctatgcgatgaactgcttagttcatctcttgtccatcaacaccttgagcagtgtgccgaagcaataattgaaatgcagcagaagttacgctctctttcctcagaatggaaaaacgcaaaaatgcggcaagaattcctgacggctaaactggcaaaggttgaaccgagtattctgaaggaagtgggcgaaccacataattcaagctactttgcagaccaaatgggatgtgatccacaaccacaggagggcgttggagacggagttactcgtgatgatgagacttcctctactgcatatcttaacaagaatcaaggtaaatctccacttgaaaccgatactcaacccggagagtcgcatgttaatttcggtgagagcaaaatttcctccccggaaacaatatcatcccctgggaggcatgagctacctatagcagatacctctcctcttgtaacagataatctgcctgaaaaagatacctcggagaccttgcttaagtcagttggaaggaatcatgaaacacattcaccaaattccaatgcagtagaattgccgacagctcatgatgcatcttctcaggcttcccaagagttgcaggcttgtcagcaggatttgagtgccactagtaatgaaattcagaatcttcagcaatcaattagaagcatagaatcacagcttctaaagcaatctatacggagagattttctgggaaccgatgctagtggtcggttatattggggttgctgcttcccagatgaaaatcctcgtatattggttgatggaagcatatctttgcagaaacctgttcaagccgatttgataggttcaaaagtcccctctccgtttctccataccgttgaccatggaagactaaggctttcaccctggacgtattatgaaactgaaaccgagatcagtgagcttgtccaatggcttcatgatgatgatctgaaagaaagagacctgagagagtctattttgtggtggaaaaggttacgatatggagacgttcaaaaggaaaagaaacaagctcagaatttatctgctccggtatttgctacgggtcttgagaccaaggctgccatgtcaatggagaagagatatggtccatgcatcaaactggagatggaaaccttaaaaaaacgggggaagaagacaaaggttgcagagcgagagaaattgtgtagatgcgaatgcttggaatccattttgccatctatgattcactgcctcatatgccataaaacattcgcaagtgatgatgagtttgaggatcacactgagagtaagtgtattccttattcattagcaactgaagaaggcaaggacatctctgattcttcaaaagccaaagaaagtctgaaatccgattatcttaatgtaaagtctagtgccggcaaagatgtagctgaaatatccaatgtttctgaacttgattctgggttgataagatatcaagaagaagaatctatttccccataccattttgaggagatctgttccaagtttgtgacaaaggattgcaacagagatttggttaaagagatcggtctgatcagttcaaatggcattccaacatttcttccatcgtcatctactcatcttaacgactccgtgctcatctctgccaaatccaataagccagatggtggtgattcaggggatcaggtcatttttgctggtcctgaaaccaatgttgaaggcttaaattctgaatctaacatgtcattcgatagatctgtcacagacagtcacgggggtccactggataaaccaagtggactgggttttggcttctcagagcaaaagaataagaaatcttcaggtagtgggttgaaaagctgctgtgtggttccacaggctgctttgaaacgagtaactggcaaagctttgccgggtttcaggttcctgaaaaccaacttgcttgatatggatgtagcactgcctgaagaagctttaagaccatcgaaatcacatccaaaccgtagaagagcttggcgtgtatttgttaaatcgtcgcaaagtatatacgaggtttgttttaatccttaaccttttctgctctctatctatagaaacagataacaagctgtttttctaatatctacgcttttcgtatttatttcagttggttcaggcaacaattgtggtagaagatatgattaagacagagtacttgaaaaatgaatggtggtactggtcttctctttcagcggctgctaaaatctcgactctctcagcgttatccgtccgtatcttctccctcgacgctgctatcatttatgataaacccataactccatcaaatcctatcgatgaaacaaagccgatcatcagcttaccggaccaaaagtcacagccggtttcggattctcaagaaagaagcagcagagttagaagatctggcaagaaaaggaaagaacccgagggatcctagttaattattaaacccacgggaaaaagaaaacctcgtgagcccagccagggagaatgtgaaccggaaatatggatttattattccggtatagtcaaaagtggagccaatgtgtatgtggtagatataggcaatgtttcaatctatctggaaccggacctgtaagttccggatgttgagatccgttttggtggttcatcatcataagaggcctaagtcctgtttagatctttttcttggaatggaggttcaacaggtggatgagccaaggaaagtatgtgtacacatatatgtagaagactaactagtgtggaattaattagtatcaaagtcgctttttagacattagctgatgttagaacggaaacttcaattattctttataatctctctctttctctctagagaggctttctgaagaagatcaatctttttaacttcaaatcagaacactgcattgacttgatttcataaaagcatataatgcaactgataaaaataccgttgaacagcggaattattccacgagtcaacaattatcgtcaacatggaaacaacaagaagatgactcttgaacttaaataaacacacatttattatcagagtggttttctaaggccatccccagaaagccaatgattcaccgtgatgatcgtgcgacggtgaagtggtgggcacaaagacgtcggcgaaacagctccggtcattgtcatgatcactggcgttgctgttgtcttggatgggtacgatgcttgggaagtaagagtcacagctgtctagtagttgaggtgcgtcgtcgtctagtaccgcgctcccaacgctccctgaacttaaccggtcctcggttttgattgctgccgcattaatgtaaaccggatcaagttggtttggttcgggcacttgaccaggtggttcattagctgtctcttgtttgccctgaagcttttcggtcagggaagtaacctgtcgggttggaaagattctaactttaatcacaacggtcaacacaagcaacctcctcccataaaaagataattaaactcgttgattgatttgattccccaattttctttctttttctagtctctcctctaatttatatatatatgatgatggattctctctatcagcttgtgttgaaaaataggaaaagcatattctcttttcacttgatgctttttttatttttctcctttggaccaattaaggtaaatcattcaatttgtaatcttgttgagataaataatagtcccatgtataagtacctcggatctgagcttatcgttgtccatgacgatggagtcgtagttagaaagaagttggtcgtaagtggacttgagaagatcgtagtctctctcaagctgttttgttttccaacgagctcggcgattctgaaaccagacagccacttgccttggctgtagaccaagcttcttggcaagctgag

SEQ ID NO: 1263 - DNA, 22087 bp, Arabidopsis thaliana
ctattatttgtttagaatcattcaagcaatatgttttgtaaacgaccggttatgattttatgaatgcgtcaatggtggcacctagaagtagaatcaaagaatccatcattgattaagctttgcatgtcttcttaattacctatgacgatttagattcgaataagtaaaatagacactaccattcgcaaatggcccattagctcagttggttagagcgtcgtgctaataacgcgaaggtcgcaggttcgaaacctgcatgggccatgttttaacacctctacttttgatatttagtctctgatccctctattttgtgttttcttacattcacacccgttatcttttatttatttatgcttggtccaaccctgtctttggttttcttacattcatacccattatcttttatgttgatcttggggagtttatgtagtagggttttaaattaaagctccttcttctttggtattttgcctctggaaatcgaagcgggtaggactttttatttatttattgcatacacgtatttgtgattcctcgtcgagttacataaatcaatagcggaagtaattggatttgtgagtagagagacttaagaagaagaagaagaagaagaataccaaagcaatggaaacggatctgaatgattatactgttatcaaggaaggagaagctgagattctcatgcacaagaagaatcaagtcttcttcaataaagctcaggtttttccaaattctcttttatttttctttctcttctttgtaattgttggtgtttcttaagatagaggctgagataggttatctgaattggtgttctgttcgatttttattggctgctttgatttgtaattaaatgttgtagctttgttaagaccagtgaacattgatttgcaccaattagctcatggcttattcgcttgttctgtaacaagaatttggttgacctgttttaatcaaggaactgtcagtcattgttttaaagtttggatttttacgtcttcgagtaaccaaagtatcaaacttttttgatggattagccagtttcatagtaagttgctgagagaaatctatctttcactgagtgatatttgtgaaacttatccttcatactaccaatttaagtagctaacttccggtcatgatagtaatgtgtttgcttgaacctacatgggatctgagcgtgaacctgatctctttcccttcatgtctttatcgaatgattaggtgaacaatagagacatgtccattgctgttctaagggaatttctatcgaaacgcaagcaagagcatgaggctaagtcatctaaaagaactagaccagcttccaaagtgattgagaaggatgcttctgaagcttccaaggaagaaactcctagcgagaacggtatgaataatggtgatcacgaagtagcatctgaagatggaccaagctctgtatcaaaagaccctgctaagacaacagaacgatttgcacctagagaacccaagccaccaaaagttcttgaggtcttcctatattttttattcggtgtcttgcttcataccgcttattgtgatcttgcagttagataaattttgtttgcatacttatatttcaggctttgtcagcttctgggttacgggctctaagatatgcacgcgaaatagaaggaattggtcaggttgtggcgttggataatgatttaggtaaaaagtttcatcattttaatgaattagattagacgacctggaagttggaagtcttgattaatttgtttgtttcttgtagcttcccaataacaatatcctaatgttgttccttttttctcttaaaagcatcggtcgaagcttgccagagaaacataaagttcaatggctcagtggctatttcaaaggtggagtcacatcataccgatgctcgtgtccatatgcttacccaccctaaagaatttgatgtggtaagcatcttttatactcattattatgttcatttgaatattgctatagttgcttctgttaaactaattttggttaatgatattcttaggttgatcttgatccatatggatcaccatctattttccttgactcggctattcaatcagtcacggatggtggattgctaatgtgtacagcaactgacatggcagtgttatgtggtggtaacggtgaagtttgctattccaagtgagtgttttgtttttttgcacacctttctcaaccaccgattttgccttttggctaaaccagtctttaatctttaatatatcagatatggttcttacccattgagagcgaagtattgtcatgagatggctttgcggatcctccttgccagcatcgaggtttgtttatctttgtcattttaacgccaattctctcaggtttagattgatttcttatgttcttttccaccttttggttatgctttaatgcagagccatgcaaaccgctacaagcggtatattgttccggtgctatctgtgcaaatggatttctatgttcgtgtttttgtccgcgtttacacgtgagttttcattgtctaatcaaactcgtaacatctcagttattcagattctgcaaatttttttgttttgttttcgattcactgaaacctcaaagattaatgaaattttcagctcggcgagtgcaatgaagaacactccattgaagctctcttacgtatatcaatgcattggctgtgattcatttcatcttcaacctgttggaagatctctccctaaggtatatacatacacatgtgaaagttttaatacattttctatccactgcatcccttaggatgatagaaactttgaatatagccaatgattcttgttatggttctatgtgcgtcgatagtgtttgacatagttccctctttttgtaaaactcttgaactatcagtgaggtcacttccaaactaatttaaaatttctatcctgaaaccgcccttttttatagtttatcataacacattttgtttttggcagaacaacagtgtgaggtatctaccagcaattggtccggttgtgaagcaggattgcaaccactgtgggaagaaatataacatgggtggaccaatatggtctgctccaatgcatgatccagaatgggtgacttcgatattaaacagtgtgaaatccatgaaagacagatatcctgcttatgaccggatctctgctgtacttactacagtctccgaggcaagttgtgggatttttttttgttctgttttttcaataaaccattgaaaagtgagaaattgacttttatgtttcgatttaatttttttaggaattgctggatgttcctctgtttttgagtctgcataatctttgtgcgacactaaagtgtatttcaccatcagctgcaatgtttcgatcagcggttattaatgctaattaccgtatctctgggactcatgtgaatccgctcggcatgaaaactgatgctcctatggaggttatctgggacattatgcgctgctgggtaaactaagttgatgaatttgtaatgtgaccgtgtttcatcttaccaggtcttctttttgatggttttttcttgggtgatattgtaggtgaagaatcatcccataaaggcgcaatcgcctgaacaacccggtagtgtgatcttgtccaaagaaccatcacatgaggtcttttgctcgctttctctgaattgtttgaaactgaataatgttttttccaagcctgaatcttttcttttcgattctgtcttgtgtttggacaggttgatttttcgcgtcacattggttcgctgagcaaggcacaggcaaagaaagtagctcgttttctgccaaatccagagaagcattggggtccaaagcttagggctggtcgccagattacgagcaaacatgtatctcttattggtcatgaagcagtcaatggtcatcttagccaacaccatgaagaacttaaagaagaagatgaagaagcagagccagaagataatgtccaagacaaggttgatccaaaacgccagaagacagcaacagataatattacctcaacataataagacaaatcacaaaaagttttacaaaatagatcagattttgtctacagtcagatttgcctcctgatgaagaactctgttttgtctgttgtttcctatataatcatttttggtaatacttgagacttatgacccatttttgtgattccttctgttgtgatcttattagtttactcatctatagcttaaccgaaccaaacagtaatttagtaccatgaagaactaaaagaggcaaaagaagcaatgtataacaagatattgaaagtagataaccacttctgatcatcattaaatgaagcaatatcatagtacttgaacaaacaaaactacaactatacaaacgctgtaaacaatctatttgttaaatttacttttaatacaaaattgtttagcagtaacaccattggtcctcttcttctacttcaaccccacgcacgaaagaagaatcatcaaaaggtttcatttcactgtaaatcaaaccaagctcttcgtaaatctcttcccatctaggatgagccttatctccaacgagaaacacatgaagctcatcttttagctcaacccaactgcaaccaggctccttcttaagcttaaagcctctcatatttctcctcaaatctgaaaccttttcccacattcctgcatctgcgtatacatttgataaaagtgtataagctgaagagtcttgtggatccaatctcaacagggcagcagttgcttcttctgcaacctctacattgtttctatgtatcgtgcagactcctaacagggttctccatatgacatcgtctgcttcaaatggcatctctcgaataagctctaatgctctcttgacttttccggattttcctaatatatctaccatgttcgagtaatgcggtagctgaggatccaggccatagtctctcttcatcatatagaagtactcgagccctttgtcgatcagacccatgtgagcacaagctcggagtatcgatatgaaagtaacgtgatttggtttgatgttttcgagtatcattctctcaaacagttgtatagcttcctctcctttcccatgatgtgcatacccgcaaatcatggcgttccaggtcacgaaatctcttctcagcgacttctcaaacatcaatcttgaatcatggagatctccacatttcgagtacatgtcaacgagggtgctacagatatacacatcagattgcaattctttcttgatgacctgagcatgaatctgtttacctaatccagcggaagcaagattcgcacaggtatcaagaactgttgcataagtaaatttgtcaggagttatacccatctccatcatccgggtaaaaagcatctgagcatcctcgctttgttccttcattacatatccggaaataattgaattccatgaaacacacatttcctgcagtctcttattgtgcatcttttcaagctcttccattgttcccgagacattggctcgttgaaagaatcgactatgtatcttctccgcctcttctatcattccacactttgaatacatatcgatcagagagcatccgacagaggagtttgaagccattcctgatttgacaatgctggaatggatctccataccgtaacctaaagaaccaccagtgcaagctttcaatatgcttccaaaggtaaactcatcaggttcgatcctagaacggagcatcgagacaaaaagaaaaagcgtttcatatccttttccgttctgctcatgtgcagctataatcgcattccaagacacagcgtctcgtcttctcatctcatcgaatacacgaaaggcttcagccagagcttgacatttcccatacatgtcgatagcagcatttgcaacgcaaacatctagcgataagctgctttttatcgccaaaccgtaaatctgaagcccctctgaaagtcctttcaccaaggcacaagccctgaatactcctgataaacttatctcgtcgaaaccaagacccgatgacatgagtcggtgaaacaacagtagagctttgaaaccatgttcttcttgcgaataaccagtaatcattgcgttataagattgcctattaagattttctgagttgtcaaacaaaatttgagcatcttgcatattatcacactttgcgtacatgtccaatgtcgccgtcctcactataccatctgctgcaaaatctgacttcaaggcatgagcatgtaactgaccgcctaacctcaattcggataacgcagcacatgacctcaagacgctagcgtaaattgactggctcactccagcatttaccttttgcatctccttgaaaaacttcaaagcaagggacaacaagttattctgaacacaacctgcgattatagcactccacgagacagaattcttctctggtataccttgaaacactctaagagactcgacaaacctcttgccttttgcatacatatccaacaacgcactcgcagcaaccacatcagtatcacaacccactcgaacgacaatcccatgaatctgcattcctaaactggtatcctctaaaaaggaacaaactttaagaataattgcaaaagttctaccgtcaaactcaataccttctctccccatgtcaacgaaaacctcgatagatttcaaactctcgccgttttgcagatacccagaaagcattgagttccaagacacaacatctctcacaggcatcatattgaagaaagaattcgctttaaacatgtcattactcttcgagtaaccatttatcattttgttccaagaaacaacatctctcagcggcattttgtcgaacaccatagaagcagacacgaaatctcttgaatttgtgtagacctgcagcaaacagttcagtacgaatgtagtcggacgaaacccagatattatcatatgagcatgagcttgcttgcctagctctaacgctccttgcttcgcacattccttgaaaacaaacgaaaagttcgtcgtgctaactgagttcacttgattcagaaaatcagtgaaataagaaaagcttggaactctccggtatgaaattttctctgttagacaacgattgaatgaaaccactgatctggtcatatgcaataatctgagactctccgccatgagtcataacgaactgaaactcagtggtatctatggcgggattgaaacgattacaattgcttcggttcggttcactcggtttgaaaaatatataaaccgactgactaggcactagctatattaatcaagcggttaacacgccacggggaatccagtttggacttttactattctattaaataattaaaaagcattaccagatcaacaaggtcgttgtagtatagtggtaagtattcccgcctgtcacgcgggtgacccgggttcgatccccggcaacggcgtaattttttcatcgtttgtcttaatccacctgcaaatacacgtcatcatattatatcctttgtgtagacgaaatcatacgatttttccctctgaaatttcctttttccttttttgtcttttttttttttaattaattacttttctctgagacacagcaatggcgtcgacgaagcccgattccgcaatcaaccttgaagaagaggctgaaggcgacggtgtagccgtagacgatccgattttcataccggagaccacgaacttactcgtccgttactcgccattcgacgacagggacatcgattgcaatccttatttccctttcacaggcccgatttcagattctggatcaggttcttactcggattctgagcccgatcccaacagctgtcccatcgatttcttcgatcgagattcttccgatgttgacgtggctgagtacttggaatcaggagggctgaccgccggtgattataatatttggggcttttatgaccccaaggaagacgaggaagaggaggagatagttttggggacttccgggtcggatctgcaaccgggtgattcaggggagcaagggcttcgagtgaccggtatcgattcagattccgattgtgaagatggcgtgtttgattttatctctgaggatagtagcgggaataggggaaatgattcgggtcgggtcgaggttggtacgggtcttcctcctgtgtgggatcatctcttcggagagggaaccgtgttggctgatgaagaatgggaggaggtgcagaacgcgattaactggacagcttttagtggacccgaagatgaggacgaagaagatgaattgtcttcactatcaagggatgatgaagaagaagatcatgaactggactggcaggttttgttaactgttaacaatgttgttaattatatcgaacaagctgaaggaatcatgctaaaccctgatgatatcgatccggattattacctgtatctatctggtttggatgaatttgatgaaaatcatagtggacattatgatgctgatgctattcttgggcaaatgtttgatgacgagactggaatcaggggaaatcctccagcagccaaaagtgtaattcaggatcttccggttgtggagcttgctgtggaagagttagacaaagggaacaatgtttgtgcggtatgcaaagatgaaatgttagtggaggagaaagtaaggaggcttccttgtagtcatttctatcatggagagtgtatcataccttggttggggataaggaatacttgcccggtttgtcggtatgagctgcctactgatgatcttgagtatgaaagacataagagctcagaaaggggcgatactggtttggcaaggaacgtgttgccgggtagatatagttaattgaatatttgaagtgatctattcttcaagttaatagacatggtttcagaggcaagatccttgaaccactttgtttatggtaagcacttatcgtgaatgtgataatgtttaagttgtatatattccttttgttttgtgaaataaatcatgttaaactttgaacccttatcttgaagtgtttgtgaagttaatccatctttcatagttgttctcgttgaagatcaatcatggatttataactaagcttcttacttcattagttattgacaactcttaagctagttttgcatgatctggatagatctctcaaggtaacctttttgtaatgacttttattttacagaccctgaggtgctactttgttctctcagtgaaacttgtgcttgcattgttgcagaaattccagagtttcttacagattcgacggagtttgttgaactgtttaatttgatgttttgaattcagaacagcgtgccgtttttcgtttaattagattaggctttcatatggcccatatattaaacagcctgttgtaacaaagcccataaaagaagaaaaagaataaggggtgtgaaacataaaataaacgaaaataaagggtgtgaatgtgaaataaaaacaagtttggatttgtcaattgatcgcaccgacgcggaaatctttggtctcctcactcgtcagtcgtcaccatcctcgacattacattgtttttatttatttaattaatatgttagttacctctgcactaaattaaatgaatagttttatttgtatattttaggcaagatggattatatataatgattaaataaattaaggtgtgtattcttcactaaatgtttgagatctatccgtcacactccagaggttaaactcagtcatctgtctttggggaggacaagcaagaacctcaccgacgattccataccaaacaaattcccgatctggaaacaactgacctgtgaaggtgaagtgtatcgctggaaatggcggtggccttccgtggaggccggggaggcgtcggatccggccaatctaccggacttcgtagtttcttctcctaccggatctttatctccgctttgttctcttttctcttcctcgccactttctccgtcgttcttaactcctctcgtcatcagcctcatcaggatcatgtacgcatctctcaatctctgagctccttctttatttctctgcttttgattgattttgtaattcgaacaaatttagaaatgaatcggtggcaatttcattgaatctgagctttgatttttgctgtctggtttttagacattgccgagtatgggcaacgcatatatgcagaggacgtttttggctttgcaatcggatccattgaaaactaggttggatctgatacacaagcaagccattgatcatttgacactggtgaatgcgtatgctgcttacgctaggaagctaaagcttgatgcttctaagcagcttaagctcttcgaagatttggctatcaacttctcggatttgcagtcgaaacctggtttgaaatctgctgtgtctgataatggtaatgctcttgaggaggattcgtttaggcagcttgagaaagaagtgaaggataaggtgaagacagcgaggatgatgatcgttgagtctaaagagagttatgatacacagcttaaaatccagaagttgaaagatacaatctttgctgtccaagaacagttgacaaaggctaagaaaaacggtgcggttgctagcttgatttcagccaagtcggttcctaaaagtcttcattgtttggccatgaggcttgtaggagagaggatctctaatcctgagaagtacaaggatgctccacctgacccagccgcagaggatccaactctttaccactatgcgattttctctgataatgtcattgctgtgtctgttgtggtgagatcggttgtgatgaacgctgaggagccatggaagcatgtcttccatgtggtgacagatcggatgaatctcgcagccatgaaggtgtggtttaagatgcgtcctttggaccgtggtgcccatgttgagattaaatccgtggaggatttcaagttcttaaactcttcctatgcgccggtcttgaggcagcttgagtctgccaagttgcagaagttttactttgagaatcaagctgagaacgcaactaaagattcacataacctcaagttcaagaaccccaagtatctctcgatgttgaaccatctcagattttacttaccagagatgtatccgaagctgaataagattttgttcttggacgatgatgttgtggtgcagaaagacgtgactggtttatggaaaatcaacttggatggcaaggtgaatggagccgttgagacatgttttggttcttttcatcgatatggtcaatacttaaacttctctcatcctttgatcaaagagaactttaaccccagtgcctgtgcttgggcctttggaatgaacatattcgatctcaatgcctggagacgcgagaagtgcaccgatcaataccattactggcagaacctggtaagtccattgtttaactatgtaatgtatgattcttccttagtaacctagacatgtcaaagctcttttaggtacttatcttctgttggttcttatgttttccgagcagaatgaagacagaactctctggaaattgggaactctacctccgggattgatcacattctattcaaagacgaaatcattggacaaatcatggcatgtacttgggttaggctataacccgggagtgagcatggacgaaatcagaaatgcaggagtgattcattacaatggaaacatgaaaccgtggctagacattgcgatgaaccaatacaagtctctctggactaaatatgttgataacgaaatggagtttgtgcagatgtgcaattttggtctctaaagagagaacgatgaaaacaaacaaaccggaaagaggaaaaaatagggagaagaggtaacctcggatcgatgtgtttctgtctttctcggcattctttaactgatgatacgtttatctttatatagggttacaaaaaaaaagaagcattttgcttgttatttctgtcatagttttggtctttatttttattttgtaaactcttcacagcaatatgttctcccaagctacaatgtcttgttgtctttatttcatacttgtctgccttaagaatcatatagaagaaactctaaaggttttttttttttttttttttttgaaactctaaaggtttgttcttccctttctagaatgctgcataatacaggtaggaacgtataaagtgtaattgcaaaaggatttggtttggtgatgaattaggattccgttgaagtgagaattcactatttgggtttaccccggcttaaatcaaatgtgatgtgtaaaacgagtttggttttcaagttttcaaacaaaaacacacaaacacacggtatttgaggaaagactatatattttctctgtatgaaaatcaaattccaatgaccaatatgatgtcaagagaaaacaattcaagatccaacgactactaccacccacccttttcttacctaacgcaggagtggccaattttgacaatactttaacaacaaaaaaagggaaaaggagaaaaaaatattattactttggtagcagtggtgcgaatcagaccgttcatttgctatatatctgctacaaacaaacatcactaatctctgcaatttttactctcctccttcacgtcttttcctcttaattttttctaggaaaattctcaaatccatctccgcgatacgaacaggtttgtttctccgatcatactctctctctttttgttttttccccaatcaattttggtttggtatctgattgttccaatcacttttcgatataaatgatgtgtaccgaaatttcagaaaaaattatttaacttttatgtgatccagcatttttgtgtgattccgttgaaaattcccattatgttgtttagatcggtgttttaagtaatcgaatcttcgctcttgttgttagtgtatgccacgatcgtgatctttttttttttttgagatttgtcatgttgatttattgattctgtgttcgaagatcttggggatcttatttctggtttgtatcgttgcgtttatttgagatcaatcatgcatgaatctgttttgttttacatacatctttcttaaatttgtgatgtatttatttgtttggcagagagaagaagacttagaaaaatggctgttcaacctacaagaataggtctagctggacttgctgtgatgggtcagaacctagctctcaacattgcagagaaaggcttcccaatctctgtttacaacagaactacttccaaagttgatgagaccgtcgaacgagccaaaaaggaaggcaatcttcctctttacggcttccatgaccccgagtcttttgtcaagtccattcagaagccacgcgttattatcatgcttgttaaggctggttctcccgttgaccagaccatcaagaccctctctgcttatttggagaaaggtgactgtattgtcgatggtggtaatgaatggtatgagaacactgagaggagagaaaaagccgtggcggagaacggtttcctctaccttggaatgggagtttctggtggtgaagaaggtgctcgtaatggcccatctatgatgcctggaggctcttatgaagcctacaagaatatcgaagacattgttctcaaggttgctgctcaggttagggatagtggtccctgtgtgacttatatcggtaagggcgggtctggaaactttgtcaaaatggtccacaatgggatcgagtacggtgatatgcagctgattgcagaagcttatgacgtcctcaagtctgttggtaaattatcgaatgaggagcttcacagtgtcttctctgactggaacaaaggtgagcttgagagtttcttggtagagatcacagcagatattttcgggatcaaggacgataagggagatgggcatttggttgacaaggtcttggacaaaaccggcatgaaaggcacaggaaagtggaccgtgcagcaagctgctgagctatctgttcctgctcccaccattgaatcctctcttgatgcgaggttccttagcgggcttaaagatgaacgtgtgcaagcagctaaagtcttcaaggcaggtgggtttggagatatcttgaccgatcagaaagttgacaagaaacagctagtcgatgacgtgaggaaggctctttacgcatccaaaatctgcagctacgcacaaggcatgaaccttatccgtgccaagagcatagaaaaggggtggggattgaagctaggtgagttagctagaatctggaaaggaggctgcatcatcagagcaatcttcctagacaggatcaagcaagcttatgacaggaacgcagagctagctaacctcttggtggatccagagtttgcgaaagagataatcgagagacagtccgcgtggagaagagtcgtctgcttagctatcaactcgggtatcagcacaccgggtatgtctgcgagtctagcctactttgattcttacaggagagagagattgccggcaaatctagtccaagcacagagagactactttggtgctcatacatatgaaaggactgatgtggaaggatctttccacaccgagtggttcaagattgcaagacaatctaagatctgagatctctcatcctcttgtattcttcttctccttcaataataagttccacacagtatgtttctttcctcaatgtgtgagataccttggcttatttatgattgtagaactgagtttctcatctttgtgtttctttttcttaaaaagattaaaactgaagtctttggttataattttttacttttggtttcattgactcctttttatttgggtgtttatgcgatgggcttagtaatttggtcggcccatataaacttttccgacaaagtaagtagatacgtcatcattctgccattaaacgtcattgcaattatctcgtctccagcaaaacgggaaatcaaacttccgatgatcgtcgtctccccgttgggaataattcgttcgcagggagtaactctgttaccgaattctcgtacggcctgcgaaagttgaagactttaacaaaatatatttttacctttcgccaagtgttcgacgaattgcctcagcgacttcgtttcctcttgaacgactgaaactgatctcagcagctatggaggagaaagactgggaaggttctccgctgagtgaaaacgaagctggtttactatgctatgatgacgaagaatatcaatttggtggtccagctcccaaattacaattcaggtggagagacttgattcaggatatgattgtccgtgttaagctaattgttcttagttcttacaatcaatttctttctttttgtgcttgcaaattatagagtaggatcctccaaggctcgttggaatgctgaattaggatttaggaatggccgaagttgaggtcaaaaggggtaaactttggacgacaactggaattatccgtaccggaaaaacatattgcttcatagaagaggctctgtatgtggcaaacgaaacattacaagtttgtttttaaagattgcagtgtttactcaaatcacctgatgaagtttcttcctttttcgaattgtcttctttctgatgcaggtatttgagtgaaattggagagttgcagctcttgggtgatgaggatgacgtagtgatttcattgaaggacttgtatggggaaatagcggagggaaaatatggctgctgttgggaaaactacgaggtttatagatacttaaagggtcttggttacattctaggcagacatggagttccttggactacaaaatatgctgtgaatactacaccaagtgatgaagatgagtcactttgtgctgcagaatttttccaagacagagactctgttaccaaactcctgagtgatatgcatatctgtgatgcaagaccggtgtttgatgtgtatttgccaaacagccagttcaagaagtcttctcctggtgaaccgagctttgtcacttgcttctcggggtaagctgttttcgttacttcaaacgacaaaagcaaattttctcataacaagtcttagtcaatgtactctatcttttgtacagagactctccaccaagtaaagaagaaattaaagtcctgcaaaagtgcatagtttcaccattgatgttctgtcatatcgctcagggccgtgccactttcttttccttcaattccatagacctccttgtcttaccataaatgtgagaaaagaaaacggaatgctcttgtgccatcagacaaaggtgacaaaactgagtgactgagagtttgcatacacttggagtgacttggctgactcattgataaggtaatatgtacaactttatgttttctaccggcataataggaattgtaaagggatccaaaaatatgattgacaaaagcttccttgaatgagatttttaaggcatatgtttcttaattatctctctataactcactttgtgctacatcatgattttagtctctcaattttcttctttggtcatctgccattattatgtgaatgcaactgccaatatctttgatttgcaaccctgatctctaaacacgttaatctgataatctaagaagtagcttcagttagacacttttggatcagtggctcgatgaaaatccgcctgttttgtggtccatagtaagaggaatctatggcgctctagtggagtgtggcttgcttgagctctatgcaactgatgaaaagagtttttgctttttaaaaagtctggaagacgcttttaccatcccttctcaactttatggctgggactctttttaagttgatcaggaaaagtgcagtaacctttttggaaagggtcgtcactttgatacatttcacgtgaggtctcgatcccattactatatagtatatactgtattaactctcaactaggtcttatattagtttttattacttcttatatgtctgacggtttctatgattccacttagactatcactcacttttatataaatcttatgatgttataggaaaattgtatacgatgcagaatttcgtaatttgtcccactattgctacatttcatttcaagttacaaatttaggttgtgatgtaagctctttattttggttaagtaatcactgttttcagatctctcataacttaggaaataaatacagtacttttgctacacatataggttgtgatgtataattgagaagaaaaaaaaaataggttgtgatgtataataatgttgagctctgtgaacatttccagatgggaaacagtaaggcttggttaaatgtcgtgctttctttttcgttgctctatcatcctttactgtcagcacataccataaaaagtgagaaagtatagtcctttattccaaaaggtaaagagaaagaattatccttctttacttgaatttggcataggcatcaacatcctatgctagttgctggtgtatattagggttctcagtatcttcactatcttactcccacttggctgaatacgttaacttatgattcccgttaaccgaaaatgacaattaatgctgatttgcatgttggtttttggagtttcttaagtttgtgtggacaaagttgttctatgttatcagtttaattgtttaaattacaaatcatgttattctgaataatccttcctcagggaatgagttggcatatgtggaattgacctgcgatttacgtgttcttgtgatctggaaagtatcaagaaacagaagattctacagccagaaaataatcgaaaggtatttactttgaacctactaggcgttgtctttcttgtgaagtgacaacttgaaatccgcttttagttttctacttacagctactcatagtgatgcatatctctttcatgtggcaccaattcaattagatatgataggcactgttccatatgataagatttcaccaattcaattatgtagcgagatgttgcttaaacaactgcagctataggaacatatctgattaaactcgtactagtttgacaaaagtcacaaaactaaggacccatatgcagtaataacttgtagaaatccaaactagaagtaatttacagcatgcaatctagtctatcttcgccataggagtttagaaggaagggacaattccatatccagtctcagacattagcgatgttgagaagatttcttcagcctcagcttcagtttctatcctctttgcgaatctgcccttgatccgtggtcttatctctgcatatgcctttcttgaagcatatcttattgtcttgtcaaatttccttgtcttcttcttctctctgtatctcaggaccctagcctccctctccattggagtaagctgttgcaccacctgagtaggaggaccagatagttggtctatcgtctctttagtagttcttgggtgttggactgttatgtcacttgcagttgactctggcacaacactgatgtccattgatgaaacggatgcctaatgacagagacaaagacagtttcaatcttccgaggttataggagcaaagaatcaatgtatagcgaagcatacttgtgatgacacagcatgcatactgattattgtgaactaaagagctggcaagtgtataaaaagcttacgctatggtttaggtcctttaaggagttgttgttgtagtgagctcctgaggagaatccatagttgatacccaactgaaagttttgttggctttgttgcaggtgacttgttgattcttcaacttgaagcggcacaactccatctcctccaaagctcctctggtagtgagtgtactgattatcttcgaattggttgtccatgctggagctgtaatccacaagatcaaggtactcaacaccaaacaagaacccattattctgattaccgatgtttttccctggattagggagtaaccacgaagcaacctctcgatcatcctcatcgttatcagcatcagtctcacttggggccatggagctgcaagagtttgcagataatggaagaatcggaactcgctgatgacgtctagctagtgggtttgcggaatgaatctctgcatcacaagctgtacaaagagacgcagcgtctgctttacacaaaaacgcagctggggcagactcacatgactgacagacacgaacacgttcatggcgagaagcaacacggttggctgcgtgaactcgagcatcacaggtggtgcacaagtaggcagagtcggcttcacagtagacagtgcaggcggctgaacgacaagtgtcacatgctcgtgcccaagtaccactctcattactctcttctttcaacatttttataactaaagaagaaggtatgtgttttttaagcaatgattgttggcaaaaggagagattgtaattagaaaggagggaaggctaatgagactatatctaggtggtgagaggggaaagatagaatctttggagatatacacgtggcgcagagttagtggttgttaaaagtagttggatcatcttgtggctgtctgagttttgaacaaggtcatgaatcatcaaaaaagtttttttctcataaccttcacaaaggagaacaaatctagaccaagtaaatcttctgtaagtgaaaacatctcttcctattgtagctttctctgtaggacccgtgagctgacgtggataagattctcagagattgctatttacttttactgttttggtttttttttgaatcttttggtattttagttttttgcttttaagcaaagatggaaacttttcttattggaacatacatggtaagtaatcaggtagtgaccaaagattatacaaagtaatacataaaagtgaaactcattttggttttaaatgttgttttgcaggtggatgagaagaaaaagctgacatggcaaagtggtgaatctagagtgaccaatgagaatgtgacaaataagcctttagtgaagagattaggatgctcatgagccacaagttataatgttatatattagcttatatcaacatcacttccagttaccaagaaataaatctttttttttttgtgaattgtggagtaatgttgataagttgagtttttcagttgttcactgaaacaatattgccaaaattgtaatttaattttttgggaaattattagatcatgaaatgaatatttactccctttgttttggttttttacttatatcaacaaatattatatatataatatatctaaatcaactataactcatttcttgtttcaatttgatagtcaatcatgcataaatcatcattttacaacaacaacaacaacaacaaaaaaaaaacttggatgggctgtactctgtagtaacaagaagatattttggtaacttatggactggactgtatattcatagtttgtacaatgcaaaagcccattgggcttgaaagggtttctttgtttcaggactgttccgttcgattttgagtttgacataaatccgaaatttcaaaattccattattttgaatcaaagcaaagcttccccgagacgcacgatggttccgccattgctgaagctcgacttcacccagggtccaagagctggcgattctctagggtttaaacccggatccactatccgaattggtcgaatcgtccgtggtaatgaaatcgccatcaaagacgccggaatctccaccaagcacctccggatcgtttccgattccgagaactggataatccacgatcttggttcttccaacggcaccatattgaactctgacactatcgactcagatacgcccgtcaatcttagccatggagacgaaattaagcttggtgagtacacttccattttggtgaactttgggagtgatgttgttcaggcgccgcaggagcataagcttccgcccaggccaaggaggaacaacaagcggcttgctgcttcggatccggatccggatcctattgagtcggttcaggagaaaccaaagcgcacgcgtggatcgtcgaagcaagaggaaaatgaactgcccaagagtactagggcttcgaggaaaaagaatctggacgatatcgccgataaagaagaggaattggatgtggaaattgagaaggtggtcaaagctagggttgggaggcctcggaagaacgcaggcagtgcaattgcgaaggaagaagaagttgtggaggagaaaaaaagggttgggaggccccggaagaacgcaagtagtgcaattacggaggaagaagaagttgtggaggagaaaaaaggcaactctagggctcggagaggtaagaacagtgagattgtccagaaatcaatcaaattggaagttgaggatactcccaaggcagtggaaatctcagaggtgaaaagcaggaagagagtgacaaggagcaagcagatagaaaatgaatgttttggattggaggttaaagatgagaagagaactacaaggtctaccagaagcaagacgactgaaattggtggagagtcttttctggagttggagatggtcctgaaccaagcccggaaaagccgtgcaaagaggaagaaaatggatgaggagccatccaaggagactagaaatgatgatgccggagaagaggttttgaagaactgtcatgttgaagaagataaggaaaatgaagctcaggaaggttgcagtggaagaagtgatgacatatgtgatcaagaagatgagaaggaatgcgatggatctaagagggtagagcaggtggagattgagttaaggaagaaaagcacagtagaaggcctgaaatgcactgataaagaagatggagaaacagagaactcacaagatattgaaagagaaagagaaaatgaaaatgaaaaagaagctcaagaaggttgcagtgaaagaagtgataaagaatatgagagggttggtggtggggctaagagggtagagcaggtggagattgagttaaggaagaaaagcaccgtaggagaagatgacctgaactgtactgttagagaagatggagagacagaaaacttacaagaaattgaagaagagtgtcacgacgaggaaagtgactgcaaggtcgaggaggctggatttgcgacattagatgaggaaaaggttgggcagggatggaacaataagaaagtagagagggtagaagtatatttagaaaaaatgaaactaagagaatggtttgatgccatagaggttcaactgccaaaacagacaattgaagaaacagagaagatgattgagcccatgagaagtaagagtatgagagttcacaagca

SEQ ID NO: 1264 - DNA, 103904 bp, Arabidopsis thaliana
gaattctcgtacggcctgcgaaagttgaagactttaacaaaatatatttttacctttcgccaagtgttcgacgaattgcctcagcgacttcgtttcctcttgaacgactgaaactgatctcagcagctatggaggagaaagactgggaaggttctccgctgagtgaaaacgaagctggtttactatgctatgatgacgaagaatatcaatttggtggtccagctcccaaattacaattcaggtggagagacttgattcaggatatgattgtccgtgttaagctaattgttcttagttcttacaatcaatttctttctttttgtgcttgcaaattatagagtaggatcctccaaggctcgttggaatgctgaattaggatttaggaatggccgaagttgaggtcaaaaggggtaaactttggacgacaactggaattatccgtaccggaaaaacatattgcttcatagaagaggctctgtatgtggcaaacgaaacattacaagtttgtttttaaagattgcagtgtttactcaaatcacctgatgaagtttcttcctttttcgaattgtcttctttctgatgcaggtatttgagtgaaattggagagttgcagctcttgggtgatgaggatgacgtagtgatttcattgaaggacttgtatggggaaatagcggagggaaaatatggctgctgttgggaaaactacgaggtttatagatacttaaagggtcttggttacattctaggcagacatggagttccttggactacaaaatatgctgtgaatactacaccaagtgatgaagatgagtcactttgtgctgcagaatttttccaagacagagactctgttaccaaactcctgagtgatatgcatatctgtgatgcaagaccggtgtttgatgtgtatttgccaaacagccagttcaagaagtcttctcctggtgaaccgagctttgtcacttgcttctcggggtaagctgttttcgttacttcaaacgacaaaagcaaattttctcataacaagtcttagtcaatgtactctatcttttgtacagagactctccaccaagtaaagaagaaattaaagtcctgcaaaagtgcatagtttcaccattgatgttctgtcatatcgctcagggccgtgccactttcttttccttcaattccatagacctccttgtcttaccataaatgtgagaaaagaaaacggaatgctcttgtgccatcagacaaaggtgacaaaactgagtgactgagagtttgcatacacttggagtgacttggctgactcattgataaggtaatatgtacaactttatgttttctaccggcataataggaattgtaaagggatccaaaaatatgattgacaaaagcttccttgaatgagatttttaaggcatatgtttcttaattatctctctataactcactttgtgctacatcatgattttagtctctcaattttcttctttggtcatctgccattattatgtgaatgcaactgccaatatctttgatttgcaaccctgatctctaaacacgttaatctgataatctaagaagtagcttcagttagacacttttggatcagtggctcgatgaaaatccgcctgttttgtggtccatagtaagaggaatctatggcgctctagtggagtgtggcttgcttgagctctatgcaactgatgaaaagagtttttgctttttaaaaagtctggaagacgcttttaccatcccttctcaactttatggctgggactctttttaagttgatcaggaaaagtgcagtaacctttttggaaagggtcgtcactttgatacatttcacgtgaggtctcgatcccattactatatagtatatactgtattaactctcaactaggtcttatattagtttttattacttcttatatgtctgacggtttctatgattccacttagactatcactcacttttatataaatcttatgatgttataggaaaattgtatacgatgcagaatttcgtaatttgtcccactattgctacatttcatttcaagttacaaatttaggttgtgatgtaagctctttattttggttaagtaatcactgttttcagatctctcataacttaggaaataaatacagtacttttgctacacatataggttgtgatgtataattgagaagaaaaaaaaaataggttgtgatgtataataatgttgagctctgtgaacatttccagatgggaaacagtaaggcttggttaaatgtcgtgctttctttttcgttgctctatcatcctttactgtcagcacataccataaaaagtgagaaagtatagtcctttattccaaaaggtaaagagaaagaattatccttctttacttgaatttggcataggcatcaacatcctatgctagttgctggtgtatattagggttctcagtatcttcactatcttactcccacttggctgaatacgttaacttatgattcccgttaaccgaaaatgacaattaatgctgatttgcatgttggtttttggagtttcttaagtttgtgtggacaaagttgttctatgttatcagtttaattgtttaaattacaaatcatgttattctgaataatccttcctcagggaatgagttggcatatgtggaattgacctgcgatttacgtgttcttgtgatctggaaagtatcaagaaacagaagattctacagccagaaaataatcgaaaggtatttactttgaacctactaggcgttgtctttcttgtgaagtgacaacttgaaatccgcttttagttttctacttacagctactcatagtgatgcatatctctttcatgtggcaccaattcaattagatatgataggcactgttccatatgataagatttcaccaattcaattatgtagcgagatgttgcttaaacaactgcagctataggaacatatctgattaaactcgtactagtttgacaaaagtcacaaaactaaggacccatatgcagtaataacttgtagaaatccaaactagaagtaatttacagcatgcaatctagtctatcttcgccataggagtttagaaggaagggacaattccatatccagtctcagacattagcgatgttgagaagatttcttcagcctcagcttcagtttctatcctctttgcgaatctgcccttgatccgtggtcttatctctgcatatgcctttcttgaagcatatcttattgtcttgtcaaatttccttgtcttcttcttctctctgtatctcaggaccctagcctccctctccattggagtaagctgttgcaccacctgagtaggaggaccagatagttggtctatcgtctctttagtagttcttgggtgttggactgttatgtcacttgcagttgactctggcacaacactgatgtccattgatgaaacggatgcctaatgacagagacaaagacagtttcaatcttccgaggttataggagcaaagaatcaatgtatagcgaagcatacttgtgatgacacagcatgcatactgattattgtgaactaaagagctggcaagtgtataaaaagcttacgctatggtttaggtcctttaaggagttgttgttgtagtgagctcctgaggagaatccatagttgatacccaactgaaagttttgttggctttgttgcaggtgacttgttgattcttcaacttgaagcggcacaactccatctcctccaaagctcctctggtagtgagtgtactgattatcttcgaattggttgtccatgctggagctgtaatccacaagatcaaggtactcaacaccaaacaagaacccattattctgattaccgatgtttttccctggattagggagtaaccacgaagcaacctctcgatcatcctcatcgttatcagcatcagtctcacttggggccatggagctgcaagagtttgcagataatggaagaatcggaactcgctgatgacgtctagctagtgggtttgcggaatgaatctctgcatcacaagctgtacaaagagacgcagcgtctgctttacacaaaaacgcagctggggcagactcacatgactgacagacacgaacacgttcatggcgagaagcaacacggttggctgcgtgaactcgagcatcacaggtggtgcacaagtaggcagagtcggcttcacagtagacagtgcaggcggctgaacgacaagtgtcacatgctcgtgcccaagtaccactctcattactctcttctttcaacatttttataactaaagaagaaggtatgtgttttttaagcaatgattgttggcaaaaggagagattgtaattagaaaggagggaaggctaatgagactatatctaggtggtgagaggggaaagatagaatctttggagatatacacgtggcgcagagttagtggttgttaaaagtagttggatcatcttgtggctgtctgagttttgaacaaggtcatgaatcatcaaaaaagtttttttctcataaccttcacaaaggagaacaaatctagaccaagtaaatcttctgtaagtgaaaacatctcttcctattgtagctttctctgtaggacccgtgagctgacgtggataagattctcagagattgctatttacttttactgttttggtttttttttgaatcttttggtattttagttttttgcttttaagcaaagatggaaacttttcttattggaacatacatggtaagtaatcaggtagtgaccaaagattatacaaagtaatacataaaagtgaaactcattttggttttaaatgttgttttgcaggtggatgagaagaaaaagctgacatggcaaagtggtgaatctagagtgaccaatgagaatgtgacaaataagcctttagtgaagagattaggatgctcatgagccacaagttataatgttatatattagcttatatcaacatcacttccagttaccaagaaataaatctttttttttttgtgaattgtggagtaatgttgataagttgagtttttcagttgttcactgaaacaatattgccaaaattgtaatttaattttttgggaaattattagatcatgaaatgaatatttactccctttgttttggttttttacttatatcaacaaatattatatatataatatatctaaatcaactataactcatttcttgtttcaatttgatagtcaatcatgcataaatcatcattttacaacaacaacaacaacaacaaaaaaaaaacttggatgggctgtactctgtagtaacaagaagatattttggtaacttatggactggactgtatattcatagtttgtacaatgcaaaagcccattgggcttgaaagggtttctttgtttcaggactgttccgttcgattttgagtttgacataaatccgaaatttcaaaattccattattttgaatcaaagcaaagcttccccgagacgcacgatggttccgccattgctgaagctcgacttcacccagggtccaagagctggcgattctctagggtttaaacccggatccactatccgaattggtcgaatcgtccgtggtaatgaaatcgccatcaaagacgccggaatctccaccaagcacctccggatcgtttccgattccgagaactggataatccacgatcttggttcttccaacggcaccatattgaactctgacactatcgactcagatacgcccgtcaatcttagccatggagacgaaattaagcttggtgagtacacttccattttggtgaactttgggagtgatgttgttcaggcgccgcaggagcataagcttccgcccaggccaaggaggaacaacaagcggcttgctgcttcggatccggatccggatcctattgagtcggttcaggagaaaccaaagcgcacgcgtggatcgtcgaagcaagaggaaaatgaactgcccaagagtactagggcttcgaggaaaaagaatctggacgatatcgccgataaagaagaggaattggatgtggaaattgagaaggtggtcaaagctagggttgggaggcctcggaagaacgcaggcagtgcaattgcgaaggaagaagaagttgtggaggagaaaaaaagggttgggaggccccggaagaacgcaagtagtgcaattacggaggaagaagaagttgtggaggagaaaaaaggcaactctagggctcggagaggtaagaacagtgagattgtccagaaatcaatcaaattggaagttgaggatactcccaaggcagtggaaatctcagaggtgaaaagcaggaagagagtgacaaggagcaagcagatagaaaatgaatgttttggattggaggttaaagatgagaagagaactacaaggtctaccagaagcaagacgactgaaattggtggagagtcttttctggagttggagatggtcctgaaccaagcccggaaaagccgtgcaaagaggaagaaaatggatgaggagccatccaaggagactagaaatgatgatgccggagaagaggttttgaagaactgtcatgttgaagaagataaggaaaatgaagctcaggaaggttgcagtggaagaagtgatgacatatgtgatcaagaagatgagaaggaatgcgatggatctaagagggtagagcaggtggagattgagttaaggaagaaaagcacagtagaaggcctgaaatgcactgataaagaagatggagaaacagagaactcacaagatattgaaagagaaagagaaaatgaaaatgaaaaagaagctcaagaaggttgcagtgaaagaagtgataaagaatatgagagggttggtggtggggctaagagggtagagcaggtggagattgagttaaggaagaaaagcaccgtaggagaagatgacctgaactgtactgttagagaagatggagagacagaaaacttacaagaaattgaagaagagtgtcacgacgaggaaagtgactgcaaggtcgaggaggctggatttgcgacattagatgaggaaaaggttgggcagggatggaacaataagaaagtagagagggtagaagtatatttagaaaaaatgaaactaagagaatggtttgatgccatagaggttcaactgccaaaacagacaattgaagaaacagagaagatgattgagcccatgagaagtaagagtatgagagttcacaagcatattgcagagcaaaaggaaaagggcgactaagtactaagttgatttgatcccattttgctagcttcatgatatgttctaacttatacctgggaatactttgatctcattgttaagttgctaccggcttagtgtgatttcttcaggtatggtagtaatcttgttagaaaaaattgaatgacaaaagcttcctagaaagcatctgtatctattactcgctttgtgcacaatgtagatcatggttttgtgtttatgactttgttggaaccactagttttttggagtttctctattattatgtcactgcaactaccaatatatcttcagttttacgcttttggatcagtgatcgatgaaattcattcattttgtggggcaactcatgtggcttgcttaagctctatgcatatcaacatgtgagagttgctacaaatcgaaatatatacaaattgatgaagaagatgaaaacacagaacagcaaacaacaaacaacaaacaacaataacaaataaattgacaatcaagaagctacaagaaccgtatcgaagctttagttttcctgttcaaaaagggctgaccctgccagccagtttcagcaagaactctggaacaagccgtttcctcggtggcgcaacagcatcgtttctcaatgcgtcactgtcatcggcgtgtatcatagagactatatgatcaaatagctcatctttaccgcctctcagaggatccttgcaatgcagtttgtaatgtgtttagacaacattgagctatgtatgtagaaaatgatctttaatggttgtttgcttacctgaagaaataggtcggtatgagttttacccttgtacataactagctcagctttcacttcagcagcttgaagagcatctgtaaaagttttgctgcaaaagaaagaacacttttctgttttaggaagaggactaaaccaaataacaaactgtcgaatgcttgatttcatatatgtagtaagggtgagctaaccttgcttcaggtggaattgaataatctgcggatccatgaaagagtataatatgaggtaagagggctgcagcttttcttacattcaggtctttcaatcttacttcaggggagaattgtttaaaggactcttctccttccattatgctgcaaattagtgaaaaaggagagtcataagtcacggtttacatggtattgaaattacaattgatttaggttcggtttatggtattgaaattaaaaatgattttggttcggtttacattggtttgagaagaagaaaaaacaaaaaagtcacgcgatgtgtttttcagagaggaatgcgtcgattcaaaaagtcatgatttggaaaggggtacacccacagaagtgctctcactcgctcaacgcgcacaaagtgcgagtgggtatgaaatacagccttctgattggcttagaaactgaaaaaaaaatgaaatagtatacatgttgctagctcctcttattatttattttttgcgtattctctcaatctgatgaaagttgttgcttttttagatacaattgattctatccaaggttttgggttatttggaagatgccaagttagattgatcagatggtttaccttaggaaaattgaacgatacaagcctcggttgtggaagtgttcaaccagattaaagagattgtacctgttcaagtttacaaatggtgagtagattctgaattactggataagaaaccctttgaaaaacgttttaagcttcatagtgtcaccaagtttagtaaattaccctccagataaaccaaagtaagctttaatctgagatacactccatgagatgctctcccctcttgattctttaatagcttgttcaaagagagcacaagaagagatatgtgcaccagccgattgccccatcagatagattctacacacgcaagaagacactggttcaatcacaagatcccatggaagatagaaacaaaaaccaagttgatgagctccaacctgttaggatcacctccaaatgcagagatgttattgcagacaaatgagattccttgagctgcatcacttaccatatcactaattgtcccctgaggaaagtttctgaaccaaagacaggggattgcttggtcaatgcattggatacaggcatatgattaacaaagataaattcccaaatagctccaagctgatatagatttgatagaatccaggacaagtaacactggtaagaaattgactactttgcttacctgtaatctagacatgccacaattatgtccctttctgctagctgtagtcccaagagagaaccccaagctttgtaactaaaaggataggcaagtatgaaactattgagtgtgcgacttttatcttgtgaaagaagatgtatccacaaaggacgctagtgtattattatcaaagttaaacacgatacgaggcccacgaattgcttacccgataatccaagctccaccagtaacgaaaactacaaccggcttcaggccatcactcgttggcggtatgtacaaatccagcctgccagaataatcgaataaaatgtactaaataccaatcattgaagaaggcaagattgcagagactgagatacctattccttggatgacctccataaactatactcctcctgacttgagatgagaaaaaataaagatatgcaactgcacaaggaaatagcaaaagctttgttagtgtacaaaaaacagcttgttaataagacagagcaaagaagatggggtaaccttgaaggaaaccaggcataaggagcattgcataacaagcaagagcaagtaatcttgtgatccaccggtaacctaccctgaacaaaaacttacaacaataaaacaaaactttccttacagagattccgacaaaaaaattgaaacatcatcacatgtcctaagattattaattaccggaaaactcatttagttatcataaaactgtggtaagaataattcatcgagaagactaattgtgagctctagaaacaggacatgagatacgtctcggctaaaaacaaataaacgatgccatgagaggaatgaaatttacccgagatatccaagaaggttgaagctaagtcgagtaatgagatacgtctcggcagctgcatggcctatgtcgcgaccgaacgactgctgccggcaaattcgaggcgaaccgtcctcagaagaattcccggagactcttctacgaacatgttccggtgaagataatctgttggagccgtgaagcagctccatttcctcggaattcgctgaccaagcctctctgttttcagacatcggacggcatcgttccggagacaactgcatctccgccgtgaaagtagtcggagaaagattggatctcgaattttgtatcctcctcctcctattcgtgtcttgtgcttttataattgatcggttcttgttttttttgtttcaattttcaaatatttgaaaagctttcactcatgtgcggctctctctctttttcacagaggaatgtcaaaacgacgtcgtattccggtcctcttctctaccaatttttttccttcctaatgagtattattaatgtgaataagttacagtattctgatttggtttctttaatctagtagtgattacgtactttgaagagttctttttcttattttgtgtattaaacagcagtttaaagggtcccgctccatatattaaattgtgattagaattgcgttcgaacacaatacgctattggtggtttgatgtctcgacactcgtatttcgtatagttgtgcatagacgccacgtggtattgcttgctggtactagactttgggaacgtgttcggtgatttaagcggtggcacgcgcaccaatgaagggaatatgaatcaatgattaagataccttattcccaaatttggtttatctaaataatactcctctcccccccccaatgtacattattttagatttccttttttcgaacaaaaacactcatccacatgtgtaaacgactcacaaccaatcaactataatttctttaaataatcaccctttcaatatataataattttacacaatgaaaccgattttctagggccagatgatattttagatgatttttatttttgagcaaaagttctacaatcactcatggaatcagatattataaaatttagaacattttcatcggtaatttctcacataattttttattgactaaaaaatataaaataataataaagtatgagagagataagagagagattgagaattgtttttatgcagagaaattttagagtaatgattgagagactatatgtatatgtatgtgtttataattggacagaaactaaatcataataaaatattattattattatttttttagaaacttttgaagtatctcaccaatgaaaatggcaaggtggaaactggaaaggcaattagtcacatataactaaactagaaaccaaaagtaataagagatttttatttcagcgatagccaaaggaaaacgttaaaagagaagaagaatctactttacgctgaatatgaaattaacatggattgttgaaagctatttaatcaatcttctggtttttcaaaagggtttcaaaagtcacctctgcattttgtttctttttatcacctgaaccaccatctctgaacggcactgaccggagtattcaagaaaggagcgtaacgttggataatcggagtcaccgtcctccctattctgctccacgtgctctggtggtaaccagctgttaccggtgcttgatacatcagcttcaatagctgccaccaaaataacaaaactcagttcatgagaacaactctcaagatccaaccaacaatcctgcaaacaacctagtagatctttgttttaggaagaatatgaggaaaaggtttttgaacttgacagattttataacaagaacacaagatttttaaccaaaaaaaaacaaaacacagttctcattactatcctgatggtcttagcccatgtaacactttcagtgacagaagatcatcaaagcaacaaaaaaggtgttattacggaaatgattcttcctatatgttcacttggatcaaattaaacaaagaaaacaggggttctacttgggaatgttgagccatcacaaagaactgatgactacaaccaaaagatgatacgtacctgccagtacatgaacgtctgtataatgttacgttgccatctgcagtaagtaaaatgacaattttgttcagataagtgaaaccagctaatgcaaagctgggaacttagtgagaatataaacttaagtgcgaaaataaactattatcgcttctaacaggttcaaagagcttacgagagcagagagataatcagaaggaagccaatggctatctcagcctgcgatgacaagatgttgagggtagtagtgtttgactccacccacacacaagggtcttccaagtactttctgataaccattacagaacaagacacatgtacaacataagcatcagtaagaatccacacatggaacctactactacattcaaacctgctaatcagctcgatgcacctacctgtatatagtggaccgaccaaagttacgcctcaagaacttggctacttgttcaagtgcccggcacaagatgggaatcaaagcaactgcaacagattgataatgagactagtcataagaatgtacgtgatttgaagacattcacaaaagagttttcaataaattcttacacttgagacagagatgtgaagtgacgaatgtaaggcagtagatgaagtagatgaaatcctttgctgccacaattgattgaaaataaacttgcagcccttgcatattccatgcccttggcctctgcagattataaaattacaattcataagtaacaaaaatttcgcattgcatgatcactagagagaaagaaaacatgaaattcacatggcgtaccccgtataaggagtataaggaatatagagatgagcatgcagttcccatgaaagatagacgataagccctatttgagaggttctttggtattagaggtagcactgccagcacagctataacaaaaacctgcaaaaatgtaatggatttagagacatgaaacgggagataagttacgtgaagcattccagacaaaaaagcatttgtcacatctagttcatgtctaagtacacaacaaagattcagcaagacaggagaacataaagacagacaatacactatgcaccatctcattactgtccgtgaagttaaggagtgaacagcagattgcaacaacaatcccaactcacagggctaacaagagctagatctttttattaaacttgtgcaataagaggaagaaactgcaactgaaaaactttatcttacccaagcattgactgaaaactgaatcgtctgctcatcccagcgcattgaacttggggttgcaccagtcgtagcagatggcccagaggttcgaggaaccgatcctgaggcacacaattaggtaagtttttggtagtaataagaaaagctcatttgagttcaagaatatatcagacaaagaaagttgacctgagttccgtgaacgaacttgttcatttgcattagaagatgcagttgaagatgcagatgtagcagttggcctggcagattgtgaagacgaagatgaagtcgacataggctccacaacaagatcaggatcctgcaaaaaagaaggacatggcaagcaccctagatttagaaacaaatccagattacatcttcatagggaagagcaaagatgaacaacacgaaggcttcacatattataaacaggacctaacgaatattcaatgaaaagccctaccctccgcttaataacctaatcacgaggagattcggacccaaggactaagcaatttagcagaaagaacatcaacaaccacacttgtaaaacctaagattcaaagtccacactaaatccccaaatcagtagcgcacacaacacaaagtcaaactcgaaactcaaagtaatgaagaaaatggataagcaaattcaagagtagggaagatagtagtaagtacgatgtagcgttggtagaatttgcgcttgaaatggtcgacgacctcgggacgagaagccatgtgaggagggatgaggatattggaccagtaatcggcccatcgagcgtcgttttcgtagtcgaaggcagccgccgcaattttcttcaaccgctgggaatcttcgccgccttccgccatggatgagatcgccggagagagagatttggattcgactttttttgtatgggttttgtttctttggtccacttttcctatactttacttactactagtatctgtggacttttgcaagagcgacgacgttttggcaatcagttgtttatgatatttaatataaaaataactacaactttgcaaaagactggaaactttgagggtttgtatgcaatttatccaaagaaagaaaatgaacaaaacagagcattgggaaagaaaccctaaatcgtgagaacagagaaggactagcgtgcgaagaacaagcagaatatgacacagttatatctagctcaatcactgttttcagcattatgttctatcttgttaaaagctttaaaaagtcttgtattatttgtcgtgtataatgttgtttatcgtacaagttaactgaacagagagattacttaaatacagacagtccactatgcgtaaactaagttatcattagctgtttctatatcgtagcatctataaaaaaacatcatcatcattatcttcaccaatatcaatccaacgatcgaaacctgaaaagaatcaaaactaaaaagatgtctgcccttcggctaagaaacgcaaacactccggctccggagctcgacgagttatccgatcagacaccgtcagaatcccgggtgctcaagagacagatgtcaatgtctcagcgagccatgtcaaacaccctgacgtcagcagccaatctctcaaacctactcccaacgggaacactcctcgcgtttcaactcctaacgccggttttcacttcaaacggcgtttgcgaccacgcaacgcgtttcctaaccgccgttctccttttcctcttagccgcgtcttgcttcgtcagctcctttaccgatagcgttaaagccgacgatggaactatctacttcggtttcgtaacgttcaaaggcatgtgggtcgttgactatcctgacccgtccgggttaggtttacccgatttagccaaatatcggatgcggttcgttgattggatccacgctacgttgtcggttttagtgtttggagcggttgcgttgagagacaagtatataactgattgcttttatccgtcgccggaggcagagacgaaacatgtcttggacattgttccggtgggtgttggggttatgtgtagccttttgtttatggtttttccggcgagacgccacggaattggatatcttgttaccggtagcgtagatcgccgatgatttataattaaaaccaatttagaaacggtagcgtttgcatggtgggttgactattttcgtttgttttcttgtttgtaaagttgtataatttgtatatatacgttatgaccattattctttttattaaactaataaattttaattttgtgtcaaatatatataattttcctaattcaaatagactttatttatttgaattctaaaatcattgcatggactttttgatgtaaaatacattaatgtatgtacggttgacatgttacttggaaaacgttgactattttacttcatttgtaccataaacttatattagatccatatcattaaatattcaatgtgttaattaagatctgaaattacttaaaagcttatatctgattatgaaaaccgtgccaaaaagggaagagatctttctaaataccacatcgtaaccaaacatactcgtatataattacaaatgaacaaaaagggtttaactgagaaaatttagattctacgtactagtattttaatctctttaaatctctatttttcaacatgtctagtaaaaaatcgttccatgaatcaattggacctggcaaacaccaatgtacacaatcattatacaagataactttatcttctcgtttatgtccgaatctgctcggatgtccatctggtcttaacaacatcatctgtgtgacatctagtaatctcaaatttaatccgtcatttctgtttttgtctctgtttgcaatgcgaaattcatcgagttgaatgctgtgtgtctctagattcataccatctaactctgtctcattgctcctatataaacacaaaagaaacccaaaggaatatatagacgtttctattaggatgtgacgaatgaaaactcaaacaacaacaaaaaaaacacaaaactcataatattaaagtattctagaagaaactaatattttagaaaatgtcggatgaacaatgtatacctatatggtcgcgttttcaagcaatttccacctttgtcccattctccaccttcgaaatgtgaaggagcaaatgtcctcagaaacacttctcctttaaaattctctaatccaagaattgtcttgaatgttgttctcaatgctcttctatacgcgaaatgtgccccgacatttctgactccgggaatgtagcaatacaaacatcctatccttttttgtttgtcgaaaaggaagagtggtcggaaaaaccattgtccagatgagatgattatgtaatcgaactcaccgatttgggaagcccaagtagggtcaggttcgtcgaggtagagattgtagaatgaattaggacctgtcggaccggtttccgtttcttcagcgcgaaccaaatgtgttgtccaaaatgtggcgatcgtgaagttgtacgttttgtatttccatcgttggaaattaaactcctgttgtgagtcaccctcaggatgttccacctgaaattaatatctaaaccaaggttacttttgcatcaagtaatgtattaaacgagtaagtattgtcataaaataaataaaaaagttggataagcattgagagaattggtacccgagagagtaggcagatcaaagactgaacgtggtttctgctaacggagtcaccaacgaacgccattcttgttcctctaactatttccagaaactcgtaaggatcaaacagagggagatcacattctttaggtttccatctccatttcatgaaacctaaatcaggtcttccatacttgatgcagttttggtgttcgtgtatcgccctgcatgtcgtgtttgtgtagtacggggctttagggtttgggatccactcgccggagaatatatcgcatttacgttttctctttttccggcggtgctctttcttaggagttacttgatgatgaccattcgatgatgagatggatagacgatcattgttatgcaaagatgatgacttgggatcatgatatgtgtcgtcgtaatcattatcatacgacgatggttctgaatcttctgtcttataactatctgatgatgatgatgaatggttatacctagatggagaagatattgccgacgacgatgatgaattcgataaatgtttgtatgttgatgttgaataatagagaggataaccaaaaaagagataaaggattggagctatcgtaagtagaataagaggaaatatcactagtcctattcgtaactttgtcgcaggaagttccatctccttcttccgagaaagtatcatttaaaaacagaaaaagaatagttttgggatttctgttttatgttcaatggatgagagagatgtttggaagaatttcgattattggattagcatcaaacaaggttaccaattgattgggacattgctaaaaaaaaaaaacgaatgagtcgtttgatatatatatatatatatatatatatagtgaagtagaatgttataaaatattagataggttaactatcatatctttctgattgatatacacgattttaaggcagataaggatattgtgtagtagtttgtagttaggattatactgtagatcatatattttagaaattttgtttagcatttattcgagattttagatattatatttcaaagtgtatgcctttaattagataccaaatatgtcgaatggcttaggattacttctctttaagtataagaagatcgttttaaaagagcaatttaggttaataatatatctaagagatttgtcaaattggaaggtactacgaaccaaaaagcaattgactttgcaatgtaaacacacaaaaaaacgtacatttccaaaaatttcagatacaaagaaacttggtatcaatggatttgctctctaaccggtctgtcttggtttggtttagctgagagtttgataacctaacggtccttgtaaaccgtcttgatctggtccgtttcttctagccaaagatggcatccatgggaacatcttgctgagttcatttcctaacgtccttggcctcgcttccttatcattgatcccgaacttcgctctctctatagcttccattatatcttcccgtgccaccgcttctccgcctgaaaacaatcaagaaatcgctagtgtctgttaagccaaaaaccgcagcttcatcccaaaagatcaaacctgggaagcaaccagatcgaataactacttaaatcaagaaagggctgttaaaagatcacttaaagactgacctctacgagcagcaagcaatgcagcttcattgacaatattggcgagatcagcacctacaaatccgggagttaaagaagcaaccagatcacatatgagaaatgcatcttcttctaaaggaacgtctctcagatgtatggccaagattttccgacggccttcttggtctggttctgcaaccaaaacttttctagagaaccttccaggccgacaaagagccgagtctaacgcttctggtcggttagttgctgcaattacaatgactttcgtgtctgactcgaatccatccatctcagtaagcaactacaaaggaagtatatcagcaatggagtctacatggttaaaagggtactaaatgttgattctttacctggtttaacgtctggtcacgttcatcgttgaaactcctaccgcgttttcctccaaccgcatcaagctcatcaatgaatataatggaaggtgagtttttccttgctgcattgaaaagatctctgattcgcgctgcgcctcttccaacaaacaattcaacaaactcactagcggagacagagaaaaatggaactcccgcttctccagctacagcccgagccaacaaggttttaccggtccctggtggaccgaccaaaagcacacctctcggtaatcttgctcctagttttttgtagtttatacttccttgaagacatgagactatctacaaagaaaaacagaacacatggaggttggacttcaaacttaattctataaacgttgcatttacgtatctttttacctccacgagctcgtctttagcagaatcaacaccctcaacatcatcgaagccaacagtgggatttttagaccgtcgtttcttcgcagggctgttagatgctgagagttgccgataaagaagccacataagaggtgtcaaaggaatccacagagagatgattgttatcaaagtagttctcattgacatcaatgcggattgaggagctgaactataagtaatgcctttctctctcattaaactaagaagaaacttctcatcatgatcgacttttcttgtcacatacttccacacaggaggcaaagctcgaacctttcgcggagtatcgtctttcgtaacagcttctgtcactgtgccgccatcaatttggattgccggatcttctaaagtttcagacttgtgaacatcatcaacaacctcaacattctcatcagtgttgtaatagattcgacgtgagccttcttcgagcaaaacctttgaaacagaaccacctcgaagattcgtaacgaaatctgagtaaggaacaatggatggggacggaacagcagttaacctcaagaacaaataacacagtccaaagattaaagccacaccggtggacaagatcactcttttgagattctttttcaaaaaatatcgaaaatcttccattgatgctctgaaatcaaatctgccaagtctcattctcactaatcgtaatctaggtcgaagcctaagagaaaaccttcttctcttccctttgtttctaccattttcaccaatacgagtctccttatctccgtaatcaccagtcacaagtcgcttaatctcgctattacaagaaaatctattacgagaatcgccatgaactctaataacccctaatctggtttcaccaatttccataaacccaccaagtctcctgcaactaaacgattgagtcctgattctagagacacaaacattaagctcactactcctcgaagacacctttctattaaatttctccggagaataacctccattgaatctaaatcgattgctacaaagaacattgaaagtagccatggattctctatcctggaatccgaatcatgcgttgatcattcttgtgcaaaaatcctaagaaaaccgaccaagcgcaagagtagacgaacgtgtcatacaagtgaagaagattggaattagaaaggctttcgtcttcaagctgatgactctgttaaattgaaaggataagaagagttcgcaaaagctcttttttggttgacagataaaaaacaaaacacagaacaggaaaaactgtatgaataagcattgggcattataaatcgagtcatggcctcatgggccttttagctattgggctatctttcattttgggcttattttaaaaaataggttactgatttttttgaattggtataattaatttgacgcctatatatatatatatacccaattaaattgttttgttcctaaaactttatgaatcataaattcataatcgtcgtgataaagcctctaattacccaaaatcgtgctcaatttagaaaatagaatcttttagttgtcaccaaacttagcaagttggcataaccaccatttaatcataataatactctctcgacggcgtcgtttcgtgctggcttcacttgaattattatttttctggctggactcatattttctccggcaaggaaaaaagaaaaacatcactttcttcaagcggatgaaaaattcaaagattgagtcaccaccaccatagtaatatacgcgtatgagttcccagatgtgatctccatccaacgttgtatttctttcgttttggttatcttcttcggttccatcgaattccaacaattcccatcgaggaatttggttacgaatcttttgatctgactaaacctaggtgagttttaatttctcctggattttttacgatcacgtttctgctgattatgattactggttacagtttttggacgatcgacgttactagatttaggattttactttgagaacctgtttatactttgatggtataaatttcactattgggatatattggtctatgattgtgtcattagggagcttgatcacaaggagactgaaaccaatgctaggaggagtctcttcaggttagtagaatgagtagaaaaagaacggaaaatggcagtgaatcaggaccagccacttctcatgttcctgtggatagattcgggtttctcaagcaagaacatgccaattcgcctgagcgttttagcaagtctaaaactacatcatccactgatcatgacaggtatgtcctgagggagcgaataattttaaaagaatatgattgagagagtgagagtgtgtttttgttgttggctatctatagagaggagagaaaggtgagaaaatggaggaagatgattggggttggagggagtgattggaagcattatgttaggagaaaacctaatgttgtcagaaggcgtatacgaaaagggatccctgattgcttacgaggtcttgtttggcagttaatctcaggaagtcgagaccttttgcttatgaatcctggtgtttatgaggtaatcttcgccgtttatatccttacattgtttcttctctgagtcatattctgatcatctatcgattttcctatgaagcaattggtgatttatgaaacatctgcatcagagcttgatatcattcgagacatatcccgtactttcccatcacatgttttctttcagaagagacatggacctgggcaaagatccttgtacaatgtccttaaggcatactcagtttatgacagagatgtcggatatgttcaggtctatcctctagatatttcccttgtttcccatttttctttcttttagtatgggactaagattcatgattctaatatctgcaggggatggggtttatagccggtttgttgcttctctatatgagcgaagaagatgccttctggttattagttgcattacttaaaggagctgttcatgctccaatggaaggactgtatcatgtgagtcttttaattattagaagattgcaagaaaatgttgtatagttgaatgaaacaaaaagagtattttctgcgtgagttagagtttgtgaccacgttttaaaaaagttctctgtagattaagtttataacgattctggtgagagtttttcgtcattgattatgaatcaactatccaatttaaaaggctactgtatagttcgttccttgatttaacaaggtaatgtctttgccgcacatttcatctatttcttaagagtcagtggtttgtgtgtaatgtaggcagggcttccccttgtacagcaatacctgtttcagttagaaagcttggtaaaagagctaattccgaagctcggagaacattttactcaagaaatgattaatccgagtatgtatgcaagtcaatggttcatcaccgtcttctcatactcatttcctttccctttggctctacggatatgggatgtgtttctctccgaggtaactaaatgcgcatccttaaaatctctttaacgtttgttgtgatcaaagtttcattctgttatcttctatggtcattgtttcttaagggtgttaaaatcgtgttcaaagtgggcttagcattgctcaagtattgccaagatgagttggtgagtgaggtttatttacgagctgtaagttaatttcgcaaaaccaacctttttaaaaaaattaactctgcaggtaaagttaccgtttgagaaactaatacatgctctgaaaactttcccggaagacgcaatgaatccggataccttgcttccattggcttactctatcaaggttctctttcgttttcgaaaagttaatgttctggtaaaatttccatgataactcgggagagatatgaaagaatcagattctcgatatcgacatgattaacttgatagataatttaatcttacttgtagtgattaattgagggcattgatgttgttaaatctgatggtatacttgaaaaacgctctcagctttcttgaataatcaacaactgtgtttttttgtttgttcatggcaggtatcaaagcgtttggaagaactgacactggagtatcagaagactaatgccaaaccggttcaaccgtaggaaatccggttggcaataacctgaaccagaagttggattcgaattcgttttctcatcttatcttttcttgttggaatatattcttttttcatcatattgtcaagttgggtgggaatttcttatcagaagctctctgattgtttttagcaatttcgtggaaaagaagaaggcatgctccagctgatgtatagatagagagagagaccagtgttcctagagagatatcactaatgtgaaaagtaaatcatattgtttaaaggtatttttattctttaaggttcatggtaccaaactagtccaaaatctcagaattttaaatacgacttatggttgaacaaaaaagatttggaataaataattacacactggtcaatagtgattggttataattttgatacattttatttgttgatttttgacaaatggtggacatgagtcatgagtgagtcacggggaggcccaattttgtcatgtagtggagcagttgagagcctttgagaaatagaatttgattcttttaggccccacggctacgctaccgtgacagctcgcctcgagttatccgcttcaacggcacacgtatcttctaaacacgtgtcaatctttgattggttaatatagcgtgttggcccatctctgttttatattttgttgttccgcaaaagataatgtcaaaaaataataaagaaacaaatctctaaaattaaaataatttctacttgcggcgaaaggaaaaagcaaatttgttaaaatagttggggctatttatctgcggtcaggaatggagatgctcgcacctaccgattccaacgtaagtaaatggttgaagggtaatttgggtaaaaacctcggaacggcaaattggaaataatcaacggctcagatagcttcacgcgatataaacgctaaggtataaggtcaaatacgtaattgtcagggagcataaccctagtacttatataaaggcactctttctacctttcttttcctcctcacgaacgcatctcattgcttcatcattaccaaatcatcaacttaatcgtttctctcaaatttagggttttctcttttctcgaaagtcttgcggttttctgaatcatctctatctggtgagtctcttttttgaattgtagatctgcgttttctctctgtagatctgttccgtcgttgaggataatgttttttaatcggtgaattctgggtttttttcaggtttgagggtttcgtttgatatctggagaaaggggtttctggaaacaaggagttcataattcgcgatcttgatctatcgatcttcatttatatatgtaagtatctctcacgattgacgtcgttcttcgattgattcattagcctagctaggttagatagacatcgttcttatcgtcctaggttttggtataagagattgatattcgcatgcatggttaggttgacttatacctgaaaccaacgacttggtttcgatttttgttttgttacatgtatgattgcctattgtcttaggctttgtttttagttatggatctgctataataattggtttctactcatcattcgagatatacaattgaaaattgaatggttcttatggtttatagattcgtattgtcctgataaacattgttgtgtgatcttttgaatacctggtatttttatttttcatctgatctttttcctttggatttgttttgtctaatacagaaaagcgtgaatgagattatgatggagtcgaaaggtggtaaaaagaagtccagcagtagtagttccttattttacgaagctcccctcggttacagcattgaagacgttcgtccaaacggtggaatcaagaaattcaaatcttctgtctactcaaacgtgagtttcctctataatgctatatctgatttcttcaatctctatggtatccattatgtagtctcttcttaactatgttttgctttttgttgcagtgctccaagaggccatcctgagtaccagcgtgcaccgatcttcataatatagttatagctttctttactttccagtttataattttcttctttcaaagctccttttctgctggttcccggatccaatcgttctctcctcctactacaagtcctgtcgctcacacaacaaggcgagatggccttatctgcaatcggtttcgaaggttacgagaaacggctcgaggtgactttctttgagccaagcatctttcaagactccaagggactgggactccgtgctctgaccaagtcccagcttgatgaaattcttacacctgctgcatgcacgatcgtttcatctctctccaacgatcaattggactcttacgtactctctgagtccagcttctttgtctacccctacaaagtcatcatcaagacttgcggtaccactaagctcctcctctctatcccaccacttctaaagctggctggtgagctctctctgagtgtcaagtctgtgaagtacactcgcggctccttcctctgccccggaggccagccttttcctcaccgcagcttctctgaagaagtctctgttcttgatgggcactttactcagctgggcttgaacagcgtagcctacttgatgggcaatgatgatgagactaagaaatggcatgtctatgctgcctctgcccaggactccagcaactgcaacaacaatgtctacactctcgagatgtgcatgactggtctggacagagagaaagctgctgtcttctacaaggatgaagctgacaagactgggtcaatgactgataactctggaatcagaaagatccttcccaagtctgagatctgcgactttgaattcgagccctgcggctactctatgaactcaattgaaggggatgcaatctccacgatccatgtgacccctgaagatgggtttagctacgctagcttcgaagctgtgggttacgacttcaacacccttgaccttagccagctggtgacaagggttctctcttgcttcgagcccaagcaattctctgtagctgtgcactcgagcgttggagcgaactcatacaagccagagattactgtagacttggaagactatgggtgcagagagaggacatttgagtctctaggagaagagagtggaacagtgatgtatcagacgtttgagaagcttggtaagtactgtggatcgcctagatctaccttgaagtgtgaatggagcagcaacaatagctgcagcagcgaggacgagaaggacgagggaatctagcagaatttttcttcctaataactattttcgagctttctgtttttgttctttctttttaaaaaacttattaagttcttatgaataatgacttgtgaagtttgagttcgtctccttcacaagcaagttgtattggtgttttctactttatgaatatgggttttatatacctaaagacttgttatgttattattcttaaatgttgctgctatgatgattactattatcgatttttactattatatttgttttttttaacgattcgttgaaaaataaacgagattgacactaatgtagcaaaatgtgcaatattatcttcaaaacattacaaaattcagttgtcttaatctttttatttccgatgacaaattatggttacgtaaatagtactatattaaaaaaaaaagaaaaaaaaagacgaaaataaaacaaaaagggagaatttgagtattaaaccaaaaaaaaagggagaagtggacttttgatcaaaagaagagaacaacttgcatgagtaaattagttttagagctgactatttaaaattttaagaactaaaaagaaagtggtagtataatttaacaaaaggatgatgactcatatgaataatagtaggcaaaaaaaacttcaaaaccacaatttcttgttttcacttagaaccttattctgccataattacgtttagttaaattaagaaaaaattgcttaaaacgacagtacaagaagaaggaaacattttctttcactcaaaatcctattatcgcgcaacagaggagtctaagtgaaataataccgtgtcgtttgcggatcagaaatcgagagaaccacgtatgtgtcttttatgtcctggtcaaacggttatccaacacgtggatcccaaaactagccaccgactgcagcaagtttctcgaaccgatgcacgtgtcctcgacacgtggagactcccaagcacgtctctgggttataaatagcaacccaatgctccaatcattttccatcatcaaacacaaaacaatcaatcaaaaacataaaattcaaagtgtaagcaaaaccagaacgagagaaaatggacaacaagcaaaacgcgagctaccaagccggtcaagccactggccagactaaggtctctctctctctctttcttttgttacacatttcgtatcaatttgttgaaatatatgtaaaagatctctacatttctaaattcatatagttttcccgcaaatacttacggattacgatagggtgttctttttagacaaggttgatctaataatgtataatgttaaacttatgtgaatataggagaaggccggtggaatgatggacaaggccaaggatgctgctgcttcagctcaagactccttgcaacaggttcagttttgattctttcatttcattttgctcccttgtagtaaaaccataatattgaacttttaaatcaaattgtgaattgtagactggacaacaaatgaaggagaaggcgcaaggagctgctgatgtcgtcaaggacaagaccggcatgaacaaaagccactaagcaagcaccttggacttcttttctaattaattcccctcttcgacttgtgtttaataaatttggggttttaattctcattcctgctactttctgatgttgtttccttgcgtccatttggatctttatgtaatcttatctatctagttaataaaagtatgctttttaatatcatgaatgtggaagaaaaaagggagtgggtttcagtgttcaagtataaagtaacaactaacaacttcaaagaatattagatcaatgaaagtaagtatcaaacaatgtatatatcttatagtgttagtttggaaattttatccaaaatgaagataatttggaacgttagatgaagttttgttcctcaaataactttggaaccttcagttttttatatatcattggaaatttagtgagaaaacatgattggatcaattctcttactaaaacatttcaagagtataaggaattattgattgagcacaaaaagacatggtcatattttcctaatcgctgtggaggataaaattatctaaataaaaaaatgttgtggctaaaatgaaaattacaaaaagttggaggatgacagcttaaaaatactcgaccttccgtcttggtcagaggtttagtctaaagccctaaacatttcctctctctcttgcgccattgctgctccatcgttcccattcgtaaaaatccaaactttttgttcaaaatcaagccaaactctagtgttgttgtagcttagatagacattaaggatgaggtatcaatggcgatcgcttcttttccggagctaccgttcgtctcctcgtccatttctttctcatcactcgcggttccaggtaatctccaattcgactcgatctttctcttctttcctccacgaacgttttggagtgcaacaaagacagtgtctttttgccttgcgatcgccattggcgagctctgttagccgacgcttttcatctgagtctgcgatagaagagaaacttcctgctgagactgttgtgattgatgtttttagcagattgaatggtaaggatgagattacgaaagagctggattcgaatgatgttgtgattagccatgaattagcattgagagttctgagggaacttgaatcaagccctgatgttgcggggaggtttttcaaatggggtttggaggcttatcctcaaaaactttcttccaagagttataacacgatgctgcgtatttttggtgttaatggattagttgatgagttttggaggttggttgatgatatgaagaagaaagggcatggtgtttcagctaatgttagggacagagtcggtgacaagtttaagaaagatggactagaaaatgatttggagaggctgaaagagctatttgcttcaggttctatggataactctgttgacaaggtttgcaatagggtgtgtaagattgtgatgaaggaagtgtggggtgctgatgtagagaaacagctaagggatttgaagctcgagtttaaaagtgatgtggtaaagatggttttggaaaaacttgacgtggatccgaggaaagctttgttgttctttaggtggattgatgagtctggaagttttaaacatgatgagaagacgtataatgctatggccagggttttagggaaagagaagtttcttgataggtttcagcacatgatagaagaaattaggagtgctggttacgagatggaaatggagacttatgttagggtttcagcaaggttctgtcagactaaaatgattaaagaagctgttgagttgtttgagtttgcaatggcaggtagcattagcaacacacccaccccacactgctgcagtttactgctcaagaaaattgtcactgcaaagaaattggacatggacttatttacaagaactttgaaagcttatactgggaatggcaacgttgtgccggatgttatgctgcaacatgtcctcaagtctttgagaagcgttgataggtttggacagagcaacgaggtgttgaaagcgatgaacgaaggtggatatgttcctagcggtgatttgcagagtgtgattgcatcaggacttagtcgtaagggcaagaaagatgaagcaaacgaacttgtgaactttatggaagcttctggaaaccatttagatgataaagcaatggcatctttagttgaagggcactgtgatgctaaagatctcgaagaagcttcagagtgtttcaagaagatgattgggaaagagggagtctcttatgcaggttatgcatttgagaagttggtacttgcttattgcaacagttttcaggcaagagatgtatacaagcttttcagtgagctagtgaaacaaaatcagttgaaaccttggcacagtacatacaaaattatggtgaggaatctgttgatgaagaaggtagcaagagatggtgggtttgaagaagctttgagtcttctacctatgatgagaaatcacgggttccctcctttcgtggacccgttcatggattacttatcgaatagtggaacaagcgcagaggctttcgcttttctgaaggctgtgacttcaaagaagtttccatctaattcaatggttctgcgtgtattcgaagctatgttgaagtctgcaaggcatagtgaagctcaggatttactgtctatgtccccaagttatatccgtcgcaatgcagaagttctagaacttttcaataccatgaaacctgaaaaatgttctttagagaaacctttgcctgctcctgctcaaattgaagcttaattcattatatgttgttttcttttgtttctggacgtggtgattcaaaaaggacaatcacttactcgactctaatcgctataattttcttcatatagcggcgatgtgggacttttgaagattgttagtagcttaaatgggcttatttagaaaaaggcctctgcctcttttccatcgtaagccagtttacattactaatctttccccaacttaagattttatcatttggtcttgtgggctttttagcaaaaggcctatttatcaatcttgttgtctatgttgtctcttagctttgttttttctctattgacctttaatccaaagagtttacagaattcattagtactctaaagatttggtattttgtttcttataaagtacacattatgtatttacatatcggacaaaataaacacatatacatatgtgtatcgtaataaataaattaatcatgcgaacaaaggagcatcatcacacatcttctaatgatgtagatcctccccttttgttctttcagatatttcccgagtcttctactttgggatttcttctcctttctcttcaagctcatgatgctttccatatccagttgtgtccctaagaaaccagttgatataacaatgattgtatcggaaatactaaaaagttggtgagactttacaccacgacgaatccctcgaaaaaacttggtctagattgtttccgagcaggaatcttctatgatattaactattaattaagagagtgtgatattgtgaagaataagagaactttggaagataagtgatttaatggagaagatacttgttcgagtgagtttttatagggagaagttattgtctgcattctacagtaacttaataaacaattaataataggtatacattggacccttaaatttatctctaatcaaccatataaatgattatattgttcgaggaaattattatcatttgtatgtggtttagtcacgtcaccaaactctatataacaatgtgaaaatccaccaacaaagatacatttgtcggccatttggttgcataacatattcttttatccactatcctaataagtgataaaagtaatcattttaattaataaaaatggtattatatatcgaactaaaagcaagtcttgtaaagttcttcaaatttaattacggcctcttaagatttgagtaactttttcgttcgaaaagactaatattttgggattgatagtatactatatttattttctttgttggtgaacacattgaccaaattagtacaactagagccattttgcttcaaatgaaatgaacatatcccataaaatgtggatacattgagtcatttttactcgcaaataaaaacatgaccattttataacatttgatagtttatctatgctaaaattagctggcaaaacttatataaataaattaacttgttatataacgttctggtatatacaaaaaactaagtaacttataaaagtaaacttcttagagtgcggatgcatataaaattgaaaaccgaagttatcagagatcaatatatagtttcgtatgaatctcatagtcgccaaaagtgcataaatgcgcaagtggatttgatttcctcaccgtaaacacaaaatgccaaagatgatatgatatgtatataggacttcatcgaagctaacataactggaacaagattatatttttaattacttgaaatttgcgattatgagcttacataaaagttaatattatggccaaaacataatcccacatgtcttttctcgtgttccatcaccaaattagccgtaacttgaacctggcccttgcttcttaaaaattatttttgcctaactactgtattatattagcgcatcaattcttggaaattgtttttgtctccccgaatatattatatcccgattttccctatgccatgcttcaagagtagaacattttgaacttatcattgttatatgcatgtcaatatttttttggttatatgttcaactacacaaacacatactacgtacttgtacatttttatattaccaaaaatagatatatgatatgcgtattagcatagaggacaccactcttgaactcttgttccctcactttccatttagttatttataaatttagaggtaagataacaaactaaaattgaaaggaagaaaaatatatacaaaaaaaagcaatcagaagaaccaatgtacagtagtatgctgcacgtgaaattcgcatgggtatgggttactgtttggcataacctagacaaccttcgttctcttgtcccctaagtactgatacagactatacagtagtattatttcattattagaaaccattcatgataaaaatttaccatatgatatagcttaattaacaatgaacttaaacacaattaagaatcattaacccgtatcttggtcttggatgactcaaaagatagtgttcgtaattaaaaactgttccggtgcaacgcatcgagaaccagtttcgacttcgtaatcttggtttactaatcatttgaattaaggttgattggtttcttgctaatgaagcatccaatatcttggagctagtaatctaatcaagatccttacacatacaaacatgaaacattaatgtattatatatgttcacaattgaaacttttgaagctgtggatttgggggaaaacttataacactggaggtaattgtgaacactgaacagtctttagttatgggcctattcttttagtccatcaagggggttatgggctatggattgggtccttgaaagtctaagtgtaaccaactgctatttaaccaacgcgcatcagttgcgcgtgtcgctaaaatgtatggactaaaagcgctgtttcttaccaaaacactttttctttaatttctcagcgcgtgaaacagggatgaacagtttggttttgtattttcttgtacctttttttctaatctattttcgcattatcaaaaagggtgaattgcaaaactaaccattttggataaaataaaaaaaaaacagagaagagatagcaacagccattaaatgaaccaaaatctccatgttacaccactgtcacaagtgatgcctacatttgcatgcactctttgggccactgtaatcatgagttctctaaatgcaggtgaatcattcttgtgaaatcaaaataagcaatacaatctgtcttccttaccgtcaaattttataaaatattaataaatattattttgaaattttcacatatgagagcttttaattttctgatctgaaaatccttttttcagtcaatttaaaatacagtgagaaatagccaaacatgttaaatcaatcattcttgtcaagataatcaatttcattattattaactgtcactatacaaaattaaaaacatgaaaaagaaaccagaactaatcgatcataacctttcgagaaaacaatggaacatgccaagtgaatttgtttcctatatatggattacacccaaaaaaacaaaagacaaaaaactaaaactttattgtgaggtgtctctaatatatatgtcagtcatccaattaagattcaacatatactatcttacaaactttcgagataacttatttgaaaatacccaatataatgaaacaaatttaaagatgacaaaagtactacaaaaagtcaatattttaaagaataaaaaaaaactcaaccatcccttttaaattcatatatgtacatttcttccctctctccatcatccttagctttaccttggctctttattttaatttccaatggttttgcgtggcgaagagcttgagtttaatctaagagaatgggcacgacaaggccatttaactcgcgaagatcaaagttctagaaggttctctgcctcttgtatccgaagcttccgagaagaccacaagtcttgtacaacaaacgtcaccatctctagtactgcctcttctccgggttactccctcaaaggtaatagcctcttttgatgctaattacttcttagaaaaacgttttgaaaattgaatttttgcgacagatgagatcgatccatcaaattattccttcagtagtgcactcaagggtaagtctcttccaatccttttgttttgtttagcttttcagttttcatgattctcaactcaaagattgaatcttttgagaattttgacctatatgaatctaagtatatgctaatttcaatgactaatcaataaatctgatggtacgtcgtatagtatagaaaaatgtagcaaaaaaagacatttgtgccaaaatcattacgtttcgataaccttttcttgaaatttgcatcaacagctacgtcattatattacacttgattagtttgtttatattcattgataacaataaaaagaagctctgttatgattatgaactacaacagagaaaggatataataacctttttgtttggtctttcgtttgatttgcttacacagcattgcaagcaaaatcagtgtacaagaagaattgggattggttgaaaccagaaggagttgagctaaactcgaaatggaacgaagcagagaagtatatatgcaatcctttatctggtgaagttcctttggagtgtttgtcttctaaaaccctaaattcaagatctttcagaaacttatccaccaagcatgctccactcatgattttaccttctaattataatctcaacattccaagaacggttaatcctaaagttagaatcattcatgaggatcctagatctcccgatcctgttctaattcaaggtgattagtaatgatttcataaaggtagtttttttttttttttttttttgtaactaaaaaagagtttggggctggtttatagcagataagaaagttgtggggtctaaacgagatgtcgtgagtgcacagggaaatgttagtgcagcaaagacgacgccgatcatggagagattaacgaaaagacaggtgggagctgatgattcgcctgttgagtatgcactaaagttgaaagctcaacaagaggtacattatatacgattttgctctaataattcttggttttagcatattgtgaaaatgggtaaaaatcaaattatttttttcgttaaagaaaaaatcaaattttttccctttcgaaataattcggtttgaaagtatatagttttgccttttgaaacaatattcttgaaatattttattaaaataatctttatcatattaaacatattattaaatatatgacagtactcgttacgtataagttatgtatactagatatattaatgtttgaactaaattttgtaaggacatattactcattagttaaggccctatgagaaccatatattaacttctaacaatgattatcaaattttggtacgattttgcattgggccattcaaaatatttgaaatcatgcaaattacgtacgtaataattaattgcataaaactttgaactcgtttgtgcaattaaactctttcacaaaacaagagcaaacaccaatacataaatgtgcagtgtataatgttttttttaatcatagaagagacagcgataagactccacgttttgtttgtttatatacaaaatattgtatccttgttaagacgtgatactagtatccatcatagaaaacaaaacagtatcatccaacttcgatattacaattatttcatgagaaatcttcattggaccccatattatgattttgtgtagtttagattgaaaaggctacttaaatatgtgcacgcttgtatatttatatatcactggttgaacaattcaaccaatattttttgtttttagaaactatataaatttgataactagtgattatctacctgattagttactatggttttgggttttgaaggatgtgaagttagaagaaaatgagcaaaatatgatgacaaaagaaattcaagaagaaaagaaagagaagaagaagagaagaggaagtgggttttcctcatggataaggaaaatgcaaagacaaccaagaaaatccaaatgcatatttctcatttgtcttcctcatcttatcaaagcttcttgagattcaaaccaatcattttgggatattggttacacaatattggagcaatgtatgcaagatcatatgccaatttctatccttttttgcttgtatatttatatatataatatggattttcctgatcatagagttttttattgaacttattaatgtttttactggcacatgatacaattttttttaattgatttaaaagattgtaaaacacaaacttttgttcaaggttttcaacaaactaaaatgtctacatctcctgatcaaaattattggaaatttttttccctagaaatcaaaattattattttttctaaagattatttgtagggaaaaagtaaatttgaaataagcatgttttccctctttctttgtatagatacactcttcttttgccttccttagtaaaaatctattgatatcttctcttctcaagttcttcagtgaccagtgagattgagtgtcaaatatcatcggacttccattctacaatggcaagagtgtggcggccaccgcaagcaatcgatttagctgaccattttccttcttcttcttcgtctgtgtgattaaagcttccttcaggcggaggaatctttataggcaactccaatggctgtcctgttgttactttccttccataaccaagtctaccatgatctcctctaccaaactgatcgaaaagagaaacataatcacaaggatgtttcaaactaaacctgaaagcagtttttatggtttcaaggactgaccgagaagattctgccatctcttgtcaaagcaactgaatgtgttccgccacaagaaacctgaattttttggaaagaaagagaactcaagattcttaaatgctttacatgaatgatattctcttcagcaaagaatagagatctctcattgaagcttaacgctttaaaacctgaattatatcttcttcagctagaagattaactttctgtggaaccattttgctgctcttgtcattgtcaccaagcccgagtcttccatgttctcctcttccccaaccatacacctaagaattagaagaccaaacacataatataataacggaaaaaggatctagcacacagtgagaatgagaaggaaagaaaacatttttgagcgtaagatgattctaacctctcctttatcagttagagccgttgaatgccatccacccgcagcaatatcgacctgcagatgcgtgtaacgaaggacaaattgtcaaagcttataatcagaaccactcttcaaaggtttaataagtagaaagggaatcaagaaaagggaaatgaagcagaaccaaagtgagatcatcgaggccttggactggaacaggatgagatgttggctgggtgtcaccggttccaagttgtccgtattcgttattaccccatgccaataatctcccatcttcttcaagagccagattatgaaatgctccaacagcaataagacggacattttcaagaccttgaactcttacaggaacagatatttgttttctgcaatttagaggaaaccaaaccaaacatattagtaatagccttggaagttagaacgcacaaaatgtatactattgctttgagtttaatggttcattatacatgtcaccgggaggccacggttgaccccaagtccacacatgaccttcgcgtgtaagaaccaccgagtgagtaccacctgcagctaccttttaagaagtttagacctcgaatgaattatccatagatcaccatttagaattagaagacgagcaagtatacctgtctgactgtaagtttgggggcacaacgcttagggatcacaatatctcttcgtacgggcctacccatctcgtcttttaaaggctcttcaccacattgtccatattcattcccacctatgtgcattccataataaattttcaatatgattcaccaagcaaatcagatagagtatgaaaaggcattctcttaccccacgcatatgctcggccttgatcatcaacagctaaacaatgccaaccaccaattgctgcctatcatccattacaaaagaacacattcaaaggtagaaccagtagttcaatatgatattctatagaaaccataatggatcagtagaaagaaagatcaaacctgagtgatcttgacattggcaagggccttgactcgactagggatgttctctgtttttgtttctggttggtgtcctaatgtacctctttgattccaaccccatgtaaacatctgagatcagttcaaagaagccgaaacataacttagcgaaatagaggttttaaatcttatttgtgaatttaaacctttaatttagctatcaaactactgaaataatgaccaattccatgataacacaaacaaaacctgttcaagaaaacaactttgagctataggctagcttctaatcaagaatctcaactaagagacttttcccacaagataagaagacacagagcttcattggttatgattaataagccaaactatgtgttttttggttccttcaaattttacaagaacttataaaaccaaactaaaacaggtctctcaaattttacaagaacttataaaatcatgtccccaaatgcaaagagaccaatcaaaacaagacaaatctcattatcatgatatttcggatagtaccgtgccatcatcgcaaatggcgagggagttacggctaccagagacaacggagcgaacagagtaaggctcgagagcttcaacgacgcaagcccattccttttcttcgttggtaccaattcctagttgcccatcttctccagagcccctggaaaacagacaaaagatggtaagagagtttaacaagagtaagtgaaaaatcgaaactttgataagtagatagaagagaggtgaagagtattcgaccaggctatgattgaagtagctgtaaccattagacacagagaaagagagaggagagagaggagagagagaaggtgaatgcacagagagacaagcgcaaaagcaaagcagtgggattcgagggggatggtaataataggaatagcgatgtgtttatatgttaagtgtatgtgtttaattatatttaattcatattattcctaattactcaatacattgatttccgtatattcgtatttctataaacatgctcaaaatatttactgataatgtgtgtttggagttatttttaagtttacagcagattactattttgaataaaaaaacttcttatacaaatgtacacatggaaaacatgaataaaaaaatggaacaatagaaaaaggataatctgtcaaaagaagaagaagagaggaataaataaggaaaagagaaataaatgaaatgtagggaaagagacttatgtgttgaattgtctacaaaaagattttaagagtttaaagcttttcttttccctgtatcagattttttttttttttttggctcaacatcaactttcatttaccaaatgattacatccaattaaaggtacataacattcccctctatcaaattggacccaaatgcaatggtttgatctagtatcaccctgaaacactatcggatccagcgctacctgatcgaggaaccattgcatttttaaaccacaatgagatagataatactctacaaatcagaatattatcatctctttgaccacctacagagactctaagcgacacgagaacaactactaaaacggaagagaccaaaacctagtctggagacaaccaaacatttaaccattgaagaaaagtggaaggcacaatcgttgctttggtttccacgcttttctctctcacttgaaggcgatttcttcttctcagatctagatctttaggttcagttgctcttcactctccggacgtagctgttcaacgtcggtccaggagtgagtctttgcgttctctccgtcaacggtggtgtggcgatttccctccgatgtggttgtggctcaagttctggcggaagaggaacctgcagcgtttgtctcacgtttatggacgtcgtgagtgcttcgggtcctccggctcatccgtcggtcttgagctgcgcccacggcggaagttggagggcatctggtgggagtgttgtttgcttggtggttaactgcagatcctcaggatcttagagggcggttgtgagttacggatctgaaggcttcggttgagccaccttcctttagatttgtcacaattttgcatccatcgagccggttgaaacgcaatagctctgggatttcggatctgtaccggtttgggaaggaagggttaccgtccagtgtatcggattgcttcttcagaatccggtgccgtcgatgtgcttgttggggagactagctttctgggagtcttgtggtgggttggtgcgccggtggggttgattcgaggacgaaaaccggtctctttcgtcggagtttctcgagcatcggttgcggcctcgaaactgtagggcttgagcccgccggatctaatgctccggtctctctgctagcttccatcaacaagcggcgatcttccttctttgccgacatgttttccgatttgctaattttgtaactggatttgatgttgtttttgttgcggcccaaggtcatttgggatgaggattaataatatttaaaaaaaaaaaaaaaaaaaaaaaaaaaaaaaccctagtctgaagtacaaagtaaatccatactattagtccctattgatcagaatgtaatccatgtcccaatagcattaccgcccggaggcgcatcatcagaaaggctcaatatccccggctttcgttgttccggtcttaaaccaaaagcggaccatatatccgactgacccgaccaatgatacaagattgaagattctttaaaaatgggttaacacaaattctgttgcgttaagcaaaaatcagaataccctaataagaactaagtaaataatacactgattatgataatttatgacgagttgaatggaaagcaataattcaaagttttgtttcttcacttcctaaatactaacaagcaacgaagcaggaaccaaagactcaaacagctttaataacccaataaaaaaaaaagggaacagagatttttggagaaaatcaaataaagatctttctctctgcttctacaaatcccctaatcatatcatatgtttttggaaaatccataccatacatacttagaaatgtctctccctctctctctggtcactgccctgtctcagctggtttcccctcttccggctcatgttttgacgcctccttgatctcatcaccgcccgcctcatcctaaaaatcagcaacacaatcagcgtttgagagaaatttctgagtaaaagaagcttagactgcatatataagagtttatagggaaaagcaaaaggaggaagacaaaggtgtacattgatgtcagagttccaaagggtcagattgtcacggagaagttgcattatcaacgtactgtctttgtatgattcttctcctaatgtatccagctcagaaatggcctcatcaaaagcctgtcaaaacaattgagagaatatcattaagcaatttggtgctggaataagtgttacaaagtctggaagcatcataacatcccgtatgacaaaatacaaacctgttttgcgagactgcaggcacgatcaggtgagttgagaatctcgtagtagaagacagagaagttaagagcaagtcccagtctaatcggatgagtaggagctaaatcagcaagtgcaatatcctacattagaagaaaaacacacataagcattcatcatgacagctcctttactggtctcaagcagcaaaataagatagatagatgttgaaacttaaagagtttacctgagctgacttgtaagcaaccagagtgctctcagcagcttctttcctctcagctccagtcttaaactcagcaaggtacctgtggtaatctcctttcattttgaggtaaaagactttggactcggccaaagatgcagtgggaacaaggtgagaatccagaagattgagtattccatcacagattttgctgagttcagtttcgatctttcctctgtagtccttgataatggaaacatgatcatcgtttcctctgctttcttccttctgttcaatggaagatatgatcctccaggaagctctcctagcaccaatgacgttcttgtaagcaacagacaagaggtttctctcttcgacagtaagctcatcggtgtcaacagtctttgcaactttctccatgaactcaaccatttcctcataacgttcagcttgctcagctaacttggctaagtacacattctcttcccgagaagacgacatcttatgttatcacacactcttttagatcctgttttcaaaaattcatttcaaacttcatcaacatcacagtagcttggctatatcaacattattcccaacaaaacaaaagaaacaacagataaatcgtcgagaccaacaaatcaagacaaaacgaacactataccgatagatacacctagaaacctagaatctatcaaaatcattcgagattttgccagatctccagataacaacgaacacagagaagattaagtccacaaaacgaaacgaaaacatgaacgagcaacagagagacgatttcgtcgaactatgagcaaaagagagactagatccgtagcttaccgagaggattttggaattagggatttgtcgaattcgaaggtcgagacgcgaaatgagggggaagtgagaaattaggggaaaaaaaaggaagaagagatgggctttgattttcagagaaagtaaagagaaaaataaggcccagtaatagtatgacaagtgtctaacggtgttgacccgttaaagactttaatgatcgtggaaaataaataatttaattgggccttgactccgttactagaaaaataaaaatcaattaaagtatgccgtgcattgttgttgatttgacttttaattgcgtttgtttacacataaatctggttccattttcttaaaattctgaaatctttatcttgttctgttttcgctagaaaccacaatcaaaacattcatcatgtttgtttgatacaaaagatagaaaaaaaagatacattcaaaattatctaagacaacaaaggataacgagtaaaaaataaatagtattcatatgctaatactcaaaacacgaaagggaaagtaagaaaaaattgaaaacaaaagatagtcttgttttaagtaggcttcctcatatttcttcctgcacgaatcacttcatccactaatagcaactgcgaagcaatcaccggcctgcaatacaataccaaacaaccgttttaacaacctgaactcaaccgcaactgaattaaaagactccattatacaaatttccatttggttctgcacataccctgaattgataagttggcgtttcaccgagtaattgtcgaaaatgccggcaagctgagggtcgacgggttctccatcctgtaggtctagtcccacgatgtttcctttgtcatgctcactctgtatatacatcgaaactcagtagataaacacaaacataattttacttggagcataatcgatagtggcagaagaggaaaatacaagaataataccgttagagaaatgataacgtcttgagtgtcaagcccagcattttcagcaagcgtcttaggcactacgagaagggcattagcaaaagcttcaacaccgagttgagcgcgctgcaatttgcccacaatttacattagcaaccggaaaaaaacaagaattggtattggagcaaaggaatattgctttctactcaccccttgaacggttttcttgacttcattgattaagtgttgtcttgctgcaacttcaaaagctccagctccctacagaaagaaacagatgtcaataaaccacatgcgcccaaaaccaaaacaatcacactgatatagcaatggatttgatctttgtggagaagaaggtacttactaatacgacacactcatcttctagggtattcttaactgatcttaaaccatcacggacagcgtccttaatttgagcaatagtgtggtcattaggccctataaagaaaaccaaatcataatcatagataatcaatgaccacacatatgaagataagcaaaattgatcttcaaaacttagctggcaagagatagaagtttgggcatttgtaccttttatgaggatagtacatgaatgaggattcttcacttgctcaacaaatgtgtacttctcctctccaagaacgtgctcatatacaagtccagcccaaccaagacaatcaggggtcaagtcatcgacagagttcacagcttctccaccacatgccaaaaccaaacgttccatgttcctcctctttgcccttctaagggcgattatctggagatacatatatacatatataaggaacagaaagataattctcttgtaacaacttgtagacacaagaaacagagcacaagacaaaaaaaaacaagcttggtggaagatccaggcatttaagagattctaggtgaatactcttagtggataaccttttctctatttggttaaaatttcagttcacttgatttcacaatcttcgtctacattttttcatgcttttctcacaatcagatgccggaaaaaaatacaaagccaatcatagcttaccccttctctagcaagaagatccaatgacgggggatcaatacccttttgatttaggataacaaagctgttatcattaccagcacaaacctgcatcagaaaaagaaaatataaataaatatctgaaagaataatataaataaatatctgaaagaatacagcatatagcttggaggtagtagtttcaaactcaccttgttcttcagctcaataattttctgaactctttcatcaacggaacgtcgctcagcagtaaccatggcttccctctgctccgcattcgagtagaagaatcctgcattaatttcactgatatatagacaaagttaggctacacaatcactaatacacgggagaattcttctaagttatagtctttcatatctattcaattaatcaaccagagatttgtcttatgtacctcttctcgtactctaatgacacattgcaagtcaggatgtgacaattctccgcacgtcgcttcatgtcagggtgtctcgaaccatgatcaagaacaagcccctcaacctattacaagagaaataatccatgttacattcacaccgagtgcattaagatgatatatttgattcacgaccactaccagtaaaaagattttaatcacatacacaagtcattttaatagagtaaattccgactgaagaaatttactgtaaaacaaaggcgtaccaatcgtgtgtcaacatcaaatttatggcgcatgtgcataatctcaaccataaacagatcaataggttcctgaggcttccgaatgcagagaacctgttgaatgagggaagtagctaattagaagacaaacggcttgcaaaccaaaattgatccatagattagttctcatatatgtgaaaaagcaagatgatattcaatgagagctatcagtaaacttaccgaattaacaacaatatcagtcagttgatcagctaagccttcatacagctaagtaagccagaaaaaaaagaccgtcagcaagcgaagagaagagttggtgataacaaaaaagatataaatatcagcaaacaaagaataccttagttcttagcgttgtcctggcaaccattttcagaatctctttatcaggctcatcacccataaccacaggtgtcttgaaagtgtcgagaaactggagagtggctctttttgcaatctcgaaaccatcaactaagacacgtggatgcattcctgagacatagtaaacctttcataaggaccatttctcactgagattaaccaaaacatgacaaggtagctgaagaagaaaagtattatatgttagccatgacaaacagatacagaaaatgaatggcatcagatccaactgattatctagaacagacatagcgaagcataaaactaccctactcaaagtataatgcagagaaaagctagtttggctaaccttcatcgatgcaacgctccgactgtttcataagctcaccaatgaagatgacagtagaagtagtaccatcaccacttatgtcatcctgagcaacagctgtcctggcaatcatgatggctgttggattttgaatttgctgaaaagataagcaagtaagcactgtaagcaaccggtttagtgtcattcattagagcaggatagtcacattaccagtcccagtctaaagatttgtgtctattatttctatcacaatcttgaaaaacagcctaacctaaacctaactagggtttaacatgacttcgaccagaacctaccaaattccatttctgaaaacaaacaaataggcacaaccctagcgttttacaaacaagcttattgacaaaattcacaagtaagaagaaacattaagctagattattctaaccaatcaacaagatctaccattttttccataccaaaaaaagaagatctacaaatttttgtttctttatcggacttaccatttccttcaaaagcgtgttgccatccttggtaagcttgatatctccggaaccaccaacaagcctacacaccggagtgatcgataaaatggcatgaaaattcagtaacaagtgaagagacgaataaacaatagatagatccagcaagagtgaagagacttacatcttgatagttcccttaggaccgagattcgacttgagtacatcttgtaaacccttagcggcgttgatggtcatatgaagcgcggccgatttgttgagcacctcagcattaggattcagtacacgcacagacattttcgatgctgagagatcaaaagaaactggaaagaggagtggggcttttagggcttttcttctctgggagcttctctctcttttatttctctttcaaatttctgagttctgtcaagtgagggctcggaggacgatgtgagggaaaagaagcctcgtaaagttccatcgaacgatgtcgttttgtcagatgtggagaactctacttgggccatagacttcggattttacaagttttgggcttctgggatataagacttttccacaaaatagtccaacgaagaccaaagtcactttttgttgtgtattcgcatacatacaaaagaaacgattataagattatcgagttttccttttttttttaaaaaaaattatttataatttaataattttactatttaggcacatacagaaataatacctgtccccaattcaacaaaaataactggaacaagatattttgtaaggactaacgacaatacaaagaaagaacacatgacaaacttcattttaaactgagaactgagccatgaacatggacaaagtgacgaggtcatggatttggcatcccacacatatatagctaaaacatatggaccaatgcgaaagatagagagtaggtaaagtaatctgaagaagcttattcctcgaattcatgcatgtgatctagaagatagtttgcagccaactcttcattcttgttgcacgcaaagaacacttccaacaccaatgctctctcaaatcccatcgcttcaagctgtatttatcaatgtgaaaccgagttcatcgattataaagagtgatacaaactttctttttcagaggaaagatcaaagttctagaagtaaaaaaaaaaaaaaaagagagaaaataaggaacagacccgttcaatggcttcacgttcctcatgtgtgacttgaatcgcctgtggctgtggcattcccgccgccatttggccaaggaggttgccactgaattacacaatgcacaacaaattatccaagcacagaataactatttaggtaatcaaaatcctcccaacgttttgctgttgatatatatgttacatatgaatcattaattcataatcgtaaagtcatcatatgcatacctttctccccctccttcaacgggttcattgattaagcgtaagaagtcagcttggtggtcttgaatcaaccgcatcaagtttgggttctgttttcccagttcctgaagcatgggctgaagaaaaaacgcaaggacaaaattatttgaaacaatatttaatgaaaaccgacagtgatttcagttcttctgtgaattagaacaacatacctgcagaacttgagggtttgcttgcaccattgctcgcagagcttggaactaatatatacaaaaatagtatttatgtttcacattgatgtctgataaactctgtaagcaagtgtacgagaaaagaaaaaaacagcttatacctgttggctgttgcgcaagaagtcaagtgttccagcaccaggatttcctccaacatttggcaagccctgtcagagataaagagcagattttagctgcacacccatctataatcaagagtttaaatgaaccaaatctgctttctatctcaaggtgtattacctgtgggaagagatctaacggatttgcattaggaccacttgcgggtgctgctgcaggttgttgagtctgtgctggaggatttgcaggctgtccggcactagctggaggacgggcaactggtggaacttcagcttgctcagggatcccctaagacatgaatttcggtgtttaaatatgtattctctcacttagtaggtagccaatcataataaaaaggaaatctattctcggcatagtgattgattagtgaccaaaatctgcctcttaagttgcatgacggtacgaaaatagagagaaaataattgaactcacagtataaagatattccacagctctttcagggttgttaaatgcagcacgaagtgcaaggacaacagtctcacgatcccaggttcctccacccatgtcaagaatctgctgaatggtactctctaaattacttccagcggctagatttgatgctgcttgtccgtaaacatcaccttgacttctattttaatcaaaacaaataggaaacagaataagagtaggtcaatttctgagctgcgcagaagactgaaacgagatgctaaccccacaggagctgagtctggtgcaggagtgcttgatgatatagtagcaggtacaggttcaggtataggggtagtcacagtttcagttgcagctacaggtgcaggtgtcggtgtcggtgcaggtggtggtggacgtgttggtgcaggtgccactggtctgcacagttttcaaattgggggcaaaatattgaaattagttgtagaatgtagccacagttttttcagatagattctaggaatttttcaaacagagagtacttgtctcgaaaactcacgctgatacagaagctggagtctgaggggaaattgaaggctgtgatgttgagggaggtatcgacttggcctaaaccaacaccaaagttagatcattcaacaaacaagaaaatacatagaagcatttgacactttcgtttcattagttgcagaggcaagaagtttttccaaaaatcccaagttgcagcatctgagcctttataatgatgtcataacaacagaaccaactcacctgcgatgtgccagcagatgcactagatgctgcagctgaagcaggtttactctattacatgtttagcaccagagagcataaatcagaatcgggtaatcaaagagctaaacagaaaacaacagaattacttatttattccccagatccaaaacgtaccttgttcatcataatgacaataaaactgttctcagcaactttgttttcctcaatagttgtctcatctttaagcactttaccttggtgaataagcatctgttttgcagcaggatacacatctgcgccctgcacactctctatgttcttcttcacatcaacaacctgaaattagataaattaccagcacaagtccaagaaaatagtcaagcgcattgaaaaataaaaatgtcagttacaactacaagactacaactatcagaaatgcattcacaaaaaaaaaagagatgataacaggatggaagtataaaatccaaacgaaatcttttaaaatggaaatgttgttgcacaactctcagttcagtgacagactgtaaattccccaattggaaaacacttaggagaagcagaaggttaatggatccaaacatagtagtaacaaacacacttcaaatgcaaatgaaatgagctcattcccactacaagcagtgaaattactaaaaaagatggccaaacaaacccatagacaaagattgctgaattgtttaaattctctttagaaacctccaaattaccacattccacttataagaactagctctcagatcacgaaagaacagagaaacctctaaaatcgaccaaatcaaatactcgatcgagaaacttaattgagaaaaccgactctaccgagagaacaataaactcgatcgagaaacctcctcggatacgtaattcaacagtctcaattgacaagtaaggaaactatctgtagaaattcgcataccgaatcctcgggttttacttcgatctcgaagtgagtccccttgagagttttcacaaatatcttcatcttctctcaccgtcgaaattctcttcccagtgaccgattactcaggctaaaatcccgttctgattgatcaccgccggcaaataaattcgggaaagagagtaggtaggcgaagaaggtactacagaatctggcccctacctttgcgttccctcgatatctccactggatcacacccgaagcacatggcttgtgctttcaactctgccaggtcagccgccattatcctattaaaatatgccacgtggtattgacaatttccttaatacagtcgtgaaaggataggcccaaaatatcacttattaaatgatagcagataggcccataatatttagaaataaatcaactttctttttataaattttttgcttttattcgttaaaaaatagataatatctcagccaattcttgaattaatctctgtaaataattttgtacatatactctattcttttgtcacaaatggaaagtgaacattaaagggggaaatagagaactatatattaaaaaaaagttaccggctcgacttgaagatcatcagagccgagccgaatagagctgatgggggcaaaacttctgagtatagctaaaacggagcttagagcataagctcagtcttacacgtgctctccttctgacacgtgccaaacacgccgatccttctcttcttaacaggtaccacatgatacgcacgtgacaccggttcgagccttaaagttaggtcaagctttatctcgccggagcccttcacagccggaggcgagaatgccaaaacctcagagacattgctctcggattccttgctctctccttcatgagcagccactatttcagactgatgactcaacgacgaatcgtgactagcctcgtcagactttccctccgattccgcctgtatcgcgacggtggagacccgcttagcacggcgagttttcgcaagtttcaaatcggttgagccagtagccgcggcggcagagttatcatccttggagatatgtcggatgtcgtagatcttaagaggcggaccttggccgatcgtcgcagcgtctgtggcgatctctttgaccggttctcctttcatcacagcctccacggcgtcttgacaaagctgccaattccccgaccacaacaaacccaccgaaccatagatcggattcacaatcctcccacaagcttcgtgcaacaacgatcggaaaatccctgcaaaaatatttgatctaattaggttcaaaaaatgacctaagacgaaacggcatcgttggaaagtataattcaaaactgccatcaaaaggttaaaagaaaaaccactaaccaggacgaaggtgattgggaccggcgttgatgaggttcatgagtccagcacggccatagaacttggcgagaaagacagttgcgttagcttgcgcttcaggcgatttgatccaagccaaacacggccttatactacaatcctcactacaccctttccgaagaactctgcatccattacagctcatccgcatctttggtttcgattatcttacaagtaccaacaactttgatcgtacaaaatacaaacaaacgatttggaactctttgactctgttgtgaaagttatttctgagattttgtgggaggtgttaatgaagattcactgattatataagaaagacgatagctttaaaggattgtgtgcgtgtaagaagcccctggatttttgggggaagcggagagagattataaaaccaagggaagaaggcagaagacaaagaaaacaagataagaagagctgtttttctctaaagacaagggttgttttgtcttttaattacaaaatccttcctttattttcccagaaccgccgctgtttttcttcaccctgattcaaggttttgcttcttgtgtttcttccccaagttatgtttttgtccccactctatccaatgcgcgtgtcatacacgtgacatatcaagttaccattttttaattactagtgaatagtctataaattctggattatacaatctaattcgttctaaaacgatttaatatggttgttgattaaagtatctgaccaattcagagtatctatggagtaggattttggttaaattgtcttaaatgtgtttgaagagactgtgataagacacgtggcctccacgctcgcgagtaagaaatttggtcgaatcgccacgtaagtcatccagatgggatttgagtcatttgaggagcatttggaagaactggggcccacacttagctcctggttttctggaaaagaatctgttttaacaatactgctttcaactatgtccaaaactattgactggtttctggttttatggtttccggtttttgatcttttcttcttctctccctgtgggcggatctttgtgactctctctgttagccgacgctttcgtaaaaaacgtaatcttaaatcatcttttacttaataaattttatctttaatcacctttagattaattcttattttccccaccttatagtttaatccagacaaccaaaactcagctttgatattctttcttacgtaatccacttaaatttaactttgtaccagattacattacaatattgtgagacccattttgtagcacatttgatttgagtttagtggattctgttatgtatcctcttattattataagggaagtacaaattgaattttgtctaatttgatcttaatttttatttcaaatttggattttgttctttgttattcaaaatcattaagggtaatttggtcttaacaatcttctaaactttatatgattcgattaaatctaaaccgttcaataaaattaattcccttcaatctaaaccgttcaacaaaaataaataaataacaagcaaaaaaaatttaatcacattttaacacattcttcttatcactaaataacaacaaaaaaaatccaaattattttttagttatgtttgattaaaaaatttatatttataagtttaggatatcaaatttactcaaatatttagtataaaaaccaaataaaccgattgcccgcggtaaaccgtgagttaaatccttgttttctattaaaaaaacatgtacatttaacaacaaaccacgtagcaaaaagacaaaaatgtagcgtttcatacatcaattcatattcatgtctttggttcaaaatttaatgagttgtaaaaaataattaactagtatttccgattggtattatgattctactgcaattcatatccatgggtttggttcaaaatttactaagttctaaacgacattaactagtcaaatactatttccattcatttaatgcgtccatgagattagtgttcttgttcacgacaatattgaaggaatcttcgttcgttgaatagaccgtacgtaattcgtaagtgtcaagttacgtagtcaacgctgatggctccgtttcattcgcattattttccgtttcgtttctcttgtccattccagagagacaagacaattagaatctctaaagacggaagcttgttcgaataatacaaagcattttgaatttatcaagattacaatttacaaagacttgagaatctccaaaaaagaagaatggttattatacacagaaaagagaacaacactcccaaattggtttaatatgttacaacgagacttcagaaataagaagttaacacataaagtctcgaccttacctcttaattacggtagatacatatatatacacaacattgaacctcatcataatcacagaaaactgcggtaaaagcttgagcgatcgttaatcttccttttcctcttcttctgcaaaactatatatacttcttcaaaaaatggagtctttgagtctggattttatgtacactttgtgaatcctctttgttccttcttcttctttctaggccatggcagggatacttgagtttgggcggtccctgttcaagcaatcaaacccttctactctaacagttgctggtttcaccccaaacttcattctaccacaaccacttttaacacgagatgcagatgggagaagaggggagagtgagggtgagacagtgttgagtttctcatctccaaagcgtgcatcttgagctaacgggtttgctgctcggctagggggagacccaaggaaaaatgggggtgatctagatgatactgattcctagagaaagaagaagacaagaaatagatctcaatacacaaaatgtggacagtagctttacagtttcaacaaaagatcaatctttatatgctactatatagctaagaattgattcaatgtgcaaaccaacttatagaaagcagaacaagaatcatatatggagaattgctttggaagtcacaaagataggtaaaccacttgaagcaactatgtaacttagctttgatttctatacagggaactccaatttcaacgaatatgttcaaacaaaggaagacaagtgaaatgcaatagaaattgcttcaatgcaacatttttgaaacagagtgaaaagaaaagacaaacctttctacgaaatatgtccaaaagatcttccccggctttagaatcacatacatcatcagctcctgaaagactgtcaatccccaaaacaaagcaaatcaagactttgttaaacaaaaacaacaatatgatgttttgtggacaaagataataaaggaagaaactttatacctaaaatgtaatctaaagggacgaataacgttgtttgcacgacggggcttagggcaaacaacagagtccactggatgagaatagataggaacaaatcctctcgattcttcacgagacaagaatgcattctgctgaaggctacaatgattcatcttttatccacagaagaacacctaatctgtgcatcaagtgaaaaaattaggttttaaaagaaaaaagaagtgaaagatgtgtaatttaagaccccaatggataagaaatcggatttacttggtaaaatctgaacaaatttgccctaaattcgtccagagtcccgttgaatttgagagaattgacaaaaactcgtttggtgatcatatcgaaattcaaagagagagatggatataaaaagggtgtttagaagcagaaatgccaactaatacattgactaaaagaaaccaatttcacagaaatagatatcaaagaatacacaaagtattgacgatactaaaaacagaaatttttcacaagactaaagaagatgaaacaagataaaaaaaattataaaccttagatctgtaacaaactgtttacaaggtagataaattccgccattaacggaccttaaagaaagagggagagagaaacaaacctgattgttcaagacgaaacagcggcgataagggtgagggaaagagaagaagaaacagagcggctatgtaatgaatgcactttataaaaatgtgaagtaaggtcggtttttgtgtactaaaaacgatatcgttttatgagatgataattatcgcctatattctatggagttatttaatgggctagtcccaggaagagtatacattgggcccattggttttaacggcccattttaagtatgattagatctagaccgtccaaaatagggatctcaaaaaaccctaaatatttaaagctttccttcaccagcattgtattgcctccctggaacaccgaagctctggattaacctattttcaccttctaaggttcttcgtcgttcttattggtacgcttcaaaagccttcctttctctgtagctttagttaaaatccaagaaatgggtgtttttgttggaggctaatcgacgtttttgtaattgctctctctctcagtttttttggagaaatatattagctttagtgagaggtgtagttcagggattacaattagtttgatctgcttaattttgtgatcattggactaataaaaaacttcctgtagggtttataagctctcttgctttgatgcacttattaatgtggttaatgtctcttatttggaaaattagatggttgagttgcatatagctcgcataatttagctgaggtaactgagtatttcggttttgtgaacttaattatcagtaaattgggaatttcagtgaatgccagacctaatttctgggaaattgatcaaatttgtggatttagttacaagttgaaataccgtttgctatgtcacaatctaaaaaatgataggctaatttttgtgtcttttatcttgttactgttgtagatctgtgaagatgtattcgggtcagaacaagatccacaaggataagggtgttgcaccaacagagtttgaagagcaagttactcaggttattgtcgttgctgtctatgagtgtttctttttgttttattggttgcttatcgattagaatgttgttttcttcttatttacaggctttgtttgacttggagaacaccaaccaggagttgaaaagcgagttgaaagatctctacattaaccaagctgtgtatgtactttgttttctcgcttggaaggattttcattatggttcccttactgaactatctcctttttctattctgtgtagtcagatggatatttctggcaaccgcaaagctgttgtgatctacgttccattcaggctgaggaaagctttccgcaagattcatcttcgtctggtcagagagcttgagaagaagttcagtggaaaagatgtgatctttgttgctaccagaagaatcatgcgcccaccaaagaaaggctcagctgttcagagaccacgcaacagaactcttacttctgtccatgaagccatgctcgaggatgtcgcttaccctgctgagattgtaggaaagagaaccagataccgtcttgatggcaccaagatcatgaaggtaaaaacgtttacaaattcattaatctttgccccgtgcttaaaactgttttataacatgtctcattcctttttaactttgggcaggtatttttggatagtaagctaaagaacgacactgagtacaagctggagacaatggtgggtgtgtacaggaaacttacagggaaagatgtagttttcgagtacccagtcatagaagcttgaagagatgaatgtttgtttcattcttttttgtcggatagagagcttttgattctgtttgggagtaaaactctttgcaaagattttgttatttcagcatttcgcaatctcttcttcaaagttcgatttatcgatacaattcttttttcctactagcattcatagtttcaaaaacaaaagtttcaaataattccaggttaaatttataatttttgagcacaaaagtggtttgacacttgcattaaaaaatcgtacaataactgaaaaagcaaacatttgtgtactgtgtagttttgactatagaggaaacaaaaacctactgttgattcctgctctgtacaacttcaagtcagatgaagacctcaagtgaatctcggtatctgcaggaacaaataaaacatctcccattgaaatcccatcggctgatgcttctgtagacattcttccttcaccttggagtacaagcagaagagaagggcctggaacagagggaaacaccgtcgaggctccactgggaagatcacacagatcaacttcaaactcttcgaaaggcggcaggtatcttgttatgtatggtcgaatccttgttcccttcaggatttccggatatccctgaaagtcagaaataagaccttagtaaccaatcttttgtaagtcttggagtacactttgagtttggtttagatctttaccagtttataagagagcattgaacaaagtgtttgaatatccagaggcttggaagtgaggccagctcgtactacattgtctgaagtcgccatgacctcaaggcactcaccgaataagtatgcgtggggctcgtttgcaccaagatacaaggcttcgccaggattgagcttcacatagttgaagaagaatgcagatatcactccaatatcatttggatattgcttctctagcttcaaaaccagccgttccttgtctgtcaattggcgttcctgtgtatattgagaaggtttcagcagtgccattcacaaggcaatttagagaaggaatcatctgaaaaaacaatcgaaattagatgactgacctgactctccatatgcagtcggcgttttaatttggatacaattttctttgttgtatcggcgtcagcagacattagcagggtgaagattgttcggacaacagatttcactttttcctcatcatgttcagtgatacagaaaacttggtttgcttcttcactcccaacaagttcttcaatctccggaatagctcgaatgacactcttaagctcctgtaacattattacaagaagaaacataaatccttcaattctgaaatataagctaacaatcctaaaagtttggaaactgaataacatacataagagacttcatagagctattctccaaaaccaaattgtttctaaagttttggtaatatatccagagaaaaaacgaggaaagagcgagtcatgtgcaacaacaccatgaaccaacataaatacttgttcagcgaatccaatctcaaaccttaggctcaaacttatagcaatagagaaggagacactgcagtcatttactactcatggaatttggactacttgtcaaaattgggaagctaggtgggccattgcataggttcatctcttatgttaaaaaaacaaaaaaaagtaagatatgataaagtatagtgataagatagcaatgtgatacctgaagaggtataaagccacagagagcctcgaattgagtataggccaaagccatctctggtttgtgattgtcgtctttataaagattaggatgagctttgtgcattttctttgctaatttcttatctggatgtgcttgaatcgacaacggccttgccaccgacaacacctaccaaatattttacaaaatttaatcacatttctgcaacacacaacataaaagtacatattcaactccaaatcagacgaaatgatcaaaatcaattcattgaactatgtatagatgtttgtaccttgaacagaaaggggagatcgcaaccccatttctccaaaaccctatttccaagagatttagggttttcggtgatccaggatctaagggtcacgccattggatccatcagcatcctccaagtaactcggaccagactcgtgagtccccatccatagctcggcgtaaggtcgtgtaggatcgatctcgtaatctgaattcgccgcataaaccctgtaaacgagtgaatccgatccaattttgccccaatcgtaatccttaacagagcatctcaatcggcgaagccgtcgtcgatccgcttcacaaccgccattagcctttacgacagtagcgatctccattacaccaaaaaactcacgattacgaatctaaatccgtttctcggaggtaaaaacaaaatatctcaagcataagctaagcgcccatgtcaatggaagactcaaagcttttctctttacccccgaatcgtggatttttttatgttttataaacagaggaaggtatgattgtaaaatcaaaagtatgggggtcaaaagttggaataaaatataaatgtagggttgcgatgtttaacttaagaaagtgcaaaagtgacagatgttcaaagaaatcacgtgttttgccgacggtattaacgtccgtccgttggttgtgggccgtttgctagctgtccacgtggactctaatgatgactcactctcacgtctttaaattattttgtactagtgtaaactaaaccgacaaaatgtaccaatataaaatgttctaaacgttctcattttattacgataattccaaattcactcttttatcaataaatatatctaatgtaagaaatgataaactataatttaaaaacatgaaaaatctattcagaccaataaatcttcatttttgtagtgttgtaaacgtcatacatccgacatcaaacagtaactaaataacagaattggaattttcaaattgtttaatatttatttaaaaaaatctgtttgaattacggataaaataattgaaatattgaatatttcttaataagttttataatcttaattggctattttaaaatatttggtttgggttttacattttgggccaaatgttattagcccattaaaataaaaagggtccaacgccgtttgttttgttctgacggcgcgtgactgtcgtcccattccacgtgcgggcacgtcatcttatatactaccaagtacaactgtacaaggaccaaacaaccagcatcttttgtctcccgtcggaatctaaatcaactcctacttctttctctctttctttttgcaactcccccttaacttttagatttttacaaatttcaaccctataaaaaaattatgacacacccttacccatatgaatcacacttactcataggcacatgatattctctttgtcatactctccactaaatctcaaaattttgagatttgttgttatagacaattcatgtattctattgtttaacttatttcagttcaaccaaaattttcattaattcgaatattaaaaaaaaaaaactagtaacaggccattccaaagagtctgttatcaaaatgtgttttggtactattatgttgaatatttcccacctttcattttcattcataaacttggtgacgtggatttattttgatatacaagtaaaaggttcaatttgtaaatataacaaaatattgggagctatttcgataaaaccaaaacaatgggccaagaattaaaaatttaccatgaacatgagagagtgagagaagaagatcgatcaatcaatcatcaaactctctgtgtgccacatgcattactactgttgacttgttcaataaaggtaaagtaagatcaatccggcgaatcttctttcgttttccggcaccgatctcggtggatctccgattcacatggcggcggataatgcttatctgatgcagtttgttgacgaaacctctttttacaaccgaatcgttctgagtcatcttttgccggcgaatctatgggaacccttacctcattttctccagacatggctccgaaattacctcgccggaaccctactatacttcatctccggtttcctctggtgcttctacatctattaccttaaaatcaacgtttaccttcccaaaggtctcgactttcacttttgtattcactattgcttaatcgctttctatgttatcgatttttcaatttaaaggaagagggtttcttcgtgtactgtacagtaatttggatttgatgtggatagttcatgtttgcatttattgattatttgtgcatattctccatctaagggattgaacagttagtggcttatataagtttttgtgcaaccaatgagaagtcgtacatctttgaagttgaattttctacttgccatttaagtccacttaaattgtttgttgaagtgattgtctactttcagacacattctttttctgcttctctgagactctgtcttagtttgaaatcttttttggtctgttttgcttcagatgcaattcctacaataaaggctatgcgtttgcaaatgtttgtggcaatgaaggctatgccatggtacactcttcttccaactgtctccgagagtatgattgaacgtggttggaccaaatgttttgctagcataggcgaattcggctggattctgtattttgtttacatcgccatctatcttgttttcgttgagtttggtatttattggatgcacagagagcttcatgacattaagcctctctataagtatctccatgccacccatcatatctacaacaagcagaatacactctctccatttgccggtaagtgttttcagtttgttcttctttagttcttgtaaaagattggtagcatttagtttcttaccagaaaagactttgtcagcagctgcttgtactccaaatcacattttgcattccttatccataaagtaaccagaaaggctagaattatataaatgtcagctgcattacttcacatatgtcagagagacttctgacttaaccagagtttagatctttgtgtttctcttctggtctcggactgattggaaatgacgagaagttcttttatctacttccctggagtgtatcttggttaatccaaggatgtgacatctaatattacttgtaacttccttacgtttttgtttacagggcttgcatttcacccagtagacgggatacttcaggctgtaccgcatgtgatagcgctgtttatagtgccaattcatttcacaactcatataggtcttttgttcatggaagcgatatggacggcgaacatccatgactgcatccatggcaacatctggccagtaatgggtgcaggataccatacgatacaccacacgacatacaagcataactatggtcattataccatatggatggattggatgtttggctctcttagggatcctctcttagaagaagatgacaacaaagacagcttcaagaaagcagagtgagaatgcccacttgggttttgttcttctgttttgtcttgtgttgttgttgttcaaagtttcagcctttcttgttctttttcttcttcttcttattcatgtgtctctctcaacctttccaattatattgttacaaacatttgctgtctagtttaaaacatgtaaatgtttgatgatctttgcaagactccatttttgtttaaggtaaaccttgaatctcatagattgtcgattgttggtatttccattttcaggtacggttctgtagactgtagtcttgctgaccagtccggcttaaccacccaaatttcaaagatctacaacaatcaaaatgctggctggcccaatatatagatgggccagttaatccgtctagctttactctttagacctaccttagacagttagacacctgctaattaatgagtttcctttttcttgttcagcaagttacctgtgttacttgagagttgagttaatggtagtaaacgcaatttaacccttataagtttaatcgtattcaacgaatgacccagagactttaaataaatccatcgtaaccctccacttcaaaattctttttaaaaagtagcaaatcatttaaatattgtaagtttgcttcattcgaaattgtagctacagatctcaaagctcctcctgttggccatatctctctctaacaaacgcatagtaacacttgaccacagtttgacttctcggcggtttcatggcggcgactatggcagattataatgatcagatcgtcaatgagacctctttttacaaccgaatggttctgagtcaccttttgccggtgaatctatgggaacctttaccacatttcctccagacatggctccggaactacctcgccggaaacatactctacttcatctccggcttcctctggtgcttctacatctattaccttaaactcaacgtttacgtccccaaaggttacttttttcaatttcgatgttctgttttgaaacctttcttttgttgattccttcgattgtatcgcctgatagattgtgttatacgttaaccttttttcttactgttactttcagttcttgtcttctacttctcatttaattagttttaaagtttaatatttttggctaatccacattttttaagttgaatcttccatgaaatttgagctcaaaatataccatgaaattgaaatttgtggttcttagttctatttcttgcttggtttcttctatttttgtggttagaatccattcctacgagaaaggcaatgcttttgcaaatatacgtggcaatgaaggctatgccttggtacactcttcttccagctgtctctgagtatatgatcgagcatggttggaccaaatgttactctacacttgaccatttcaactggttcctctgtttcctctacatagctctctatcttgttttagttgagtttatgatttattgggttcacaaagagcttcatgacattaaatttctctataagcatctccatgctacccatcatatgtacaacaagcaaaacacactctctccatttgccggtatgtcaaagctatatgttctcaatctaaattcaagagcttgtatcaatggtgacttctttacttgatgtttttcgggttttcagggctcgcattccatccgctggacgggatacttcaggctataccgcacgtgatagcgctgtttatagtgccgattcatctcataacacatctgagtcttttgtttttggaagggatatggacagcaagcatccatgattgcatacatggtaacatctggcctataatgggtgcaggataccataccatacaccatacaacatacaagcataactatggtcattataccatatggatggactggatgtttggctctcttatggttcctttagcagaaaaagacagtttcaaggagaaagaaaagtgagaatgttcaatgctcacatgtattcttcatatgttgctcttctcgtgactcttattaaaacctttctaatcactttgttggaattaaaaacatgactgcataatttgatgcaaagtttcagacttttattgctaaaaatctctgatgattattaacctcaattatataattgctggatgaagagtttcaaatttggactaaatctgaagggtttaataggtcagttgcggtgtcagttttaccacagaccacagtaatctttgaatcttccaaacttgtaaaataaataattatactcatatggtaggtgaggttgctcaagatatgatgacatgtaagaggcaaagtttcctcttttgtcggttaaggttaagaatttgaatagcaagaacaaatcaaagtttgaaaacataagaatttacgaaaattaaagacctaaaatttattattatctgaaacgtgtagacgcatactctctctttcatccgccatggaagtataagacaccttttttcgcaaccccacacttttttctttttggctaagcatcaaacaattcaaaaggccgagtcgattctaattcagatataaaagaattctcctttttgcttcttttttttcacacgaagcaaatcgactagagtctggtaaattttcttctgtaattcatttataaaaaaatcttcttttgcatatccatgggggaataattataaaggtcgttactttccacatgggttttttttttggtagatatagcgaaacatttatattgcccactcccacttgtttgtgttgattagattgtccctaggagtcactgttatcgctctttcaattactgtaatgttgaatttgggtttcatctactaactaagatgaagtttcttgtctctttctgtctccctctttcttaattcctctctacttttcggttaattgctcctcttcagctaactttggggctttaaagtgataggatggctcgcttcagttttccttgttttccaaattttgggggttttaatcaggtttgttgattcttgtcaatgattttttttcgaaaagatttataatttggtgggttttacttgaatctctctactttagatttgatgtgttccttcaaggtcttgtttggttttatccaggtccaagtaattaggtgaagtttgcctctctctttttttggatctcattggtctgcaatagtctcaattaaaccttctagtttgcatattaccagttgagtgactcttggttccagattcgtttttggtggtcatagtcgcgagtaagaatctcttttgaatattctctgttattctctttttgtggttgtgtggttcgacttctttgcagataagtgatatcttttggtgtgaatcttataaaacttttgtttccagcttgattaattgaacatgcgactagttattatattaggtggttgatatagaagaaagggctttcagatcttacaaaagcaaatacttacggcagatttagcttaccaataattaagtttagttagcttagcaggaaccttttgctccttttattcagtttatgcaggcatgttttagttgcatccatacattattagattggcttgaattaacacaaacatcatgtttttagccttacatatagccgcagttctataccaaaccaatcaaatcttgtgttatttcaatctaaattgcatctgcaatcaaatcgataatttgcatgttcaatcgagtaaagtgcatttggtcaggacattttaggactggtttttccttaatcttgttaattgactattacggggtggtattctttgtctttccctgttaaacttattgcatgtaagagagtgtgatttcttgggatgatcttaggctgtgacaaatcgggggcctgagatttcagaaactgctgataattgggtctcaccatctgacattccactcatagaacctaatagtaaagaggtacccctaattgtttttgtcttcttggcgagtctagtctatatcaaaacctaatcttgtgttgcaacgagtaccataacttagacatcaagtttccataaatttcctgtttttacacaattttggtcgttattgatgagttgaatctaggatagcactgtgatgcagcaggtaaatttttgtagagaactcaatattatactacgaatagcttttctaatgagtccatgaaactattctgacccacaacagcgatctcttactgattctttacttttcacacactaccaagtacctttcttacttagattgttggcttttccatcattgtgtctgcattgaaatataaagatataaaaggaaaattatttgattatggtgtattttatgcctctaagcagcacaggatgagagaggcacagctaggcggtcacactctgaggtcccatggaatgactgttgcaaggactcacatgcatgattggatcattctcgtgttacttgttattctcgagtgtgtactccttataatccacccattttatcgctttgttggtaaagatatgatgactgatctaagttacccgttaaagagtaacaccgtaccaatttggtctgtcccggtaagcttccattaagacaacttctaagttctaacattggccttagacgtttttcacaatataaattacatttcttttctttggaatgacaggtatatgcgatgctgttacctttggtaatcttcatctttatctacttccgtcgaagagatgtttatgatcttcatcacgcggtgctaggttagaaacttagaatttctgaaggagagtaccgtttgcttcaaaatgtcttctttcgcatatataattaacagtaaagttggcctttcttgatgtgcaggtctcttatactctgttctggtgacagcagtacttaccgatgcaataaagaatgcagttggtcgaccacgtcctgacttcttctggcgttgttttccagatggcaaagctgtacatgtttcaatgagtttttacttatctcgttttaaatcttgttctgcctcttgaatctcgattttgcttatcagctttatgatagccttggagatgttatatgccatggtgataaaagcgtcataagggaaggtcacaaaagctttccaagtggacacacgtcatgtaagaccaagttactggtttataattcagaactagaaagaagcaaaagagtaaaaactgtggggttgaattgtttttgcagggtctttttcgggtctcggatttctttcgctttacttatcgggaaagattcaagcatttgacggtaaaggccacgttgcaaagctatgcatagtcatactccctttgctatttgcagctcttgtcggcatttcccgtgttgatgactattggcatcattggcaagacgtctttgcaggaggcttgctaggtttgttttcactctctagtcacaaaggtcaaaactttttccctttaaacatcattcaaaacttataccattgtctgaaaccgcaggtcttgcgatctctacaatctgttatcttcaatttttcccgccaccatatcacaccgaaggtgcaaacgaactgtggattcattttatggtttgctgaaaagaagtattatttttattgtgaattgatcgaaaaaggtttgatatatttttaggttggggaccatatgcttacttccaagtgttggaggctgcgagagtgcaaggagcagcgaatggagcagtgcagcagccgccgccccaagttaacaacggtgaagaagaagacggtgggtttatgggtttacatttggtggataatccgactatgaggagagaagaggatgtagaaactggtagaggctgagatgaagaaactctgaagctggtttggttacttgttaggacactttctcttgttcttttgattctttgttggacaactttagtagatttctctaagataactaatagagtcgtttggttttggttttggtttaaatggatgaccggttttatggttccggtattggtggttaaagtttatgtttttcaaaaaagttcactggataaatgtagctttattttcaatattttaaggattgaaatcggatttgaacttaatcgaaactcgtagtcaacttaaacacaagaaaaaatgatatctaaactatctttgtgctttgttacaaaacaaaaactacatcttttacaactataatcaatgtgtatattcgtatccaaatagtatgatatttttgtgtgcgttgtttattcatacacttgtggactttaccctacacagaattttgagatcatttttggtttgaaacttgaaaaaatgtgtagatagtttactagttagtactactgttgttgttgggtcacaatcaaaacacgaagaaatttataatatatatatataaaaaatcaaggatgctttttaaaaatattcttttgtatttgtttctgtatgggtgttgaatacttccaactctctaattaagtattgcatttatgtttcgtgttcttttctaatattgcaagttttgtaacgtttgattttctagctattacatattcaacttggtagataatagacacgacacgagtaagccaactttcttgatcaagccgatttgttttttacaaacggcatgcgttaccaaactttattatgtaccaaaaacgatccgttaagaatataaaaacctaaacataccatccttgtgatgttttgtttattgtaaaaccaaacaaatgtgttttcatgtgaattatgtacatttaaaattataacaaaatttatgatcttttgtatgtataacatgaaatatttgaacgccaatgcaaacggaaagaaattatattatttgcgttgagatttatgtctttgcgattacgtttaatagatctttaagactaactaacccaaattaatataagtaataaggactcgtcatatatatttatcatataagaataataataaattataagagctggctagggggtgacatgtttaacactccatcttttgtcaactcactatatactcctctctcctcctaacacagaggcacaagggcaagaagaaaagagagagatagagatatataaatgaagatggctcttctcttgaactcgacgataacggtggctatgaagcagaatccgctggtcgcggtatcttttccgcggactacttgcttgggatctagtttttctcctcctcgtcttcttcgagtttcgtgtgttgccacaaaccctaggtgagttttatctttttagatcttcaattcgtttccttgatcaagttttttctttttcttttttctttttttcatttggctttatactggttaatttcgttgtatatgtttaactcattggttatatttaactatttgtctaattggcaaatcctttcaaaaccaaatcgaaacggtacaaaactgatcaaaaagttagtaatttttttccatatagaaaaatggcactgaatagtgaaagtgaacaacattgaacttagaaatacttcaaattaatctatagaattgattgtgttataagaaaatcctacaatcatttgcactcaaacggaaaaatcgcatgaagtcaggtaaactcattgggttttaaatacttgcatattaacttatgttatactattacaataagacacgaacctgatatgaaaataacaattttcttacaatgaaaatgttatagcaagacgagtgaagaaacagacaagaaaaagtttcgacccatcaaagaagtaccaaaccaagtgacccacacaataacacaagagaaactggagatcttcaaatcaatggagaattgggcccaagaaaacttattatcttacctcaaacccgtcgaagcttcctggcaaccacaagactttttgccggaaaccaacgacgaagaccgattctacgaacaagtaaaagagctaagagatcgaacaaaagagatccctgacgattactttgtagttcttgtcggagatatgatcaccgaagaagctttaccaacttatcaaactactttgaacactctcgacggcgtaaaagacgagaccggtggtagtctaacgccgtgggcggtttgggttcgagcatggacggcggaggaaaatcgacacggtgatttgttgaataagtatctttacttatcaggtcgtgttgacatgcgacatgttgaaaagactattcaatatcttatcggatccggcatggtacgttgcactcccataaatatatgtacgcttaaaatgtaaattataatttcttgaggatcaaattgataatgtttataattatttttcaggactccaaatttgagaacaatccctataatggcttcatctatacttcttttcaagagagagccactttcatctcccatggcaacacggcgaagctagccacaacctacggcgacacaactctcgccaaaatctgcggaacaatcgcggcggatgagaagcggcatgagacggcgtatacacggatcgtcgagaagcttttcgagatcgatcccgatggtaccgtacaagctctagcgagtatgatgaggaagcgaatcacgatgccggctcatctgatgcacgacggtcgcgacgacgatctgttcgatcattacgctgcggtggcgcagagaatcggagtttataccgcgacggattacgcagggattttggagtttttgttgcggcggtgggaggtggagaagttagggatgggtttgtccggcgaaggaaggagagcacaggattatctgtgtaccttgccgcagaggatcaggaggttagaggaaagagctaacgatagagtcaaacttgcgtcaaagtcaaaaccttctgtttccttcagctggatttatgggagagaagttgaactataaaacgacacatgttgttgtgttctgtactagactctaaaaggttaatgcgagcttatgggccttagagcatgtccattgcagggaccttacaagttttttaagagaattctaatggaaagaagcaaaaaaaaaaaaaaaaattgtctaattaaccaaggtgcgaaccttgaataaggtatttttgggtgagtaaggttcgctgacgtggcactatatcattggaggaccaataaaacaaaacaagttttttttcttttttctttctctcctctctcttggtttcgtatagagtttctaggctttggtttatgttcaaatttgtgtttgatctgttggtttttaagataaaaatgtgaccattttgctgcttattcacttctcattagcattacaacggattggtgacacaaaataattggttctaggtttatgtttatgctcttttgtttgctcatttagttgatgttatcaaataattggttctcggtacgtgctttcatttaagttcatgacagtgtcttgagctggagatagattattctatgtttttcctttggtgacaatttcattaatagacctctcatcttggactttagtttcctcttgtaagccttttgatttgtattctttttctcttttttttttgcttttatgtcatcatatatgtttacaatttgtaatattttctaataacttttaagttttatcaaataaattattttaaaaatatttttgctttttaaagaaattttcataaggactccaccattggataacaaaaaatttagagactcaacaaaaactctaaactttaaaattaccaaaatatattattaaaaaatgttaaggattttttataaggattcaatcaatgggcatgctcttagtaatgtaatgaagaaagtaattaataataaaacgctaaatgatctgttcgtttgagtgaaaaactgggttataactaccatgcggcccacgggcttgtaaaataagcaaagaaatatctgagtggcatagacgtaattaaaagagtatctgagggatattatagagaataaaaacgttgtatattaaatcgaaagtttcttctgcacattctcttatttcgcagtctcatagcatagatataatcaaaagtttttcgttcattgatcatcttcgattgattgagtttgttggataagaaaagaatggcggtggctatggatcggatagttaatccccgtcatcgtacgtctatcgtccttgtcaagttaggggatccagatctttgtttatagtgtgtgcgttgttttttattcatacacttgtggactttgccctaaacagaattttgaaatcatttttgggtcaaaactcgaaaaaatgtgtagatagttttattgtggtgcttgttgttgggtaaaactacgaagacatatttttattttattttcatccaaaagccaaaaacacataaggatttgttttagtacgtattattattattattttttatttttttctgtatgggagttaattgttgaatacttccaactctctaatgaagtaattgcatttaagtttcttattcttttcttgtattcttatttcataaagaatgtcattttaaaattttaattttgttttataaaaattattgttttttattttcaatgcagttgtaaagatcaaatatcttttttttatctctactatttaaactaattaatgaaaaaaagagagtattatttagtatattaatagcaggtacaaatgaaatttgtttgctttccttaatttgcgtgaaaataatagaatgacattctttgtgaaacatataaatattgaaagttttgtaaaatttgattttcatagccatttccaacttgatggaaaaagtacattactttctaaatttatgtgaaaaatggtaaaatgacactctttgtaaaaacatatagaatttcgaaagttttgttacgtttgattttcacagccatttttcaacttggtgaaaaagacaagacacgagtaagccaactttctcgatcaagccgatttgttttttacaaatgtcattctttttcaataaaaagcattcaagattattaaagtaatattcattgggctacttccagaatatgctcatataaaatccatcagaatccagtccaattacaccaatctgatcaaaaatccgatcaaaaccgagggacatagagaccagaaaacccgattgaacccgtctttcaaagaagcatcgattgaaactttattatataccagaaacgatccgttaagaatatagaaacctaaccataccatcaatgcgatgttttgtttagtgtaaaaccgaataattgtgtatccatatgaattatatatatatatatatatataaaattataacaaatttatgatcgactgtatataaaaatacaatatttaaatggcaatgcaaacggcaaggaattatattatttgcgtagacaattttatataattaaaattgtaagaaatttatgatcgaatgtatataaaaacaatatttcaagggcaatgcaaacggcaagaagttatattatttgcgtagagattttctgtctttgcgataacatgtttaatagatctttaagtctatgacaactcgtcatattgatcatagaagaataaataattacaactggctaggggtaacatgtataacactctatcttttgtcaactcactcactatatacatatatactcttctctcctcctaacgcagaggcacaagggcaataagaaaagagagagatagataaatgacgatgatggctctgctcttgaactcgacgatgactgtggctatgaagcagaatcccgcgaccgcggtatcttttatgcagactacttgtttgggatctagtttttctcctcctcgtcatcttcaagtttcgtgtgttgccactaacccgaggcgagtttttttctttttagatcttcaattcttcgcgttgatctcaatgtattgttaataactttttcactcattgggttttatatacttgcatattaacatatgttctataaattacaataagacacgaacctgatcaaaataacagtgttcttaattaacgatgaaaatgttacagcaagacgtttcgacccatcaaagaagtatcaaaccaagtgacacacacaataacacaagagaaactggagatcttcaaatcaatggagaattgggcccaagaaaacttattatcttacctcaaacccgtcgaaacttcatggcaaccacaagactttttgccagaaaccaaagacgaagaccgattctacgaacaagtgaaagagctaagagatcgaacaaaagagatccctgacgattactttgtagttcttgtcggagatatgatcaccgaagaagcattaccgacttatcaaacggttatgaacactctcgacggagccaaagacgagaccggtgttagtctaacaccgtgggcggtttggcttagagcatggacggcggaggaaaatcgacacggtgatttgttgaataagtacctttacttatcaggtcgtgttgatacgcgacatgttgaaaagactattcaatatcttatcggatccggcatggtacgttctttttggtattggccaaattgttacactcccataaatataggtgtgctcaaaatgtaaattataatttctttgggaccatattgacaagtttataattatttttcaggacaccaaatatgagaacaatccctacaacggctacatctacacttcttttcaagagagagcaacttttatctcccacgccaacacggcgaagctagccacgacatacggcgacacaactctcgccaaaatctgtggaacaatcgcggcggatgagaagcggcacgagatggcgtatacgcggatcgtcgagaagctattcgagattgatcccgatggtaccgtacaagctctagcgagtatgatgaggaagcgaatcacgatgccggctcagctgatgcacgacggtcgcgatgacaatctgttcgatcattacgctgctgtggcgcagagaatcggagtgtataccgcgacggattacgcagggattttggagtttttgttgcggcggtgggaggtggagaagttagggatgggtttgtccggtgaaggaaggagagcacaggattatctgtgtaccttgccgcagaggatcaggaggttagaggaaagagctgacgatagagtcaaacgtgcgtcaaagtctaaaccttctgtttcgttcagctggatttacgggagagaagttgaactctaaacgacaatggttgttgcgtttcactgtattagactcttaaacgttatgggccttactaatgtaatatgggaagtaaatgtaataaagaaacgctaaaagatcttgcgttttagtgaaacactgggttataactaccatatggcccatgggcttgaaaattaagcaaagaaaatatctgagtggcatagacgtaattaaaagagtagctgagggatattgtagagaagaaaaaagttgtatattaatgtccccttggctcgatcatcacgcccaaagtttcttcttcaccttgtctcttttcacagtctcacacagcatagaaataatcgaaagatttctttttaaaatctgggatttgttttttttgttcattgatcattttcgattgttagagaagaatcaaatggcgatggctatggatcggatcgtcttctccccttcatcttacgtctatcgtccttgtcaagctaggggatccagatcttccagagtttccatggcttctacgattcgctctgcgactacgtgagttttaatctctctatttccaattcgtgagcttatttttctttaatgctttgaatttgttctgatctggagtttggtttgagtatcgatgataaacctctgggctttggttgatccagtttcttattttcatcaatttgattcccaatgcactctcattgtgtgtagttacgagttatatgatcacatgtattagtttctggtttgtgaaatgaggaatttgcttcatttgtgtttaaaaaatctttcatttttactggttttctgatttatctgggagatttctttagatcaaagaatcttgattttttttattttttatttatttgaaaagctatccttacatgcaaaggacaatctttgtctctatgttaaattttgataatctcttcaactttcccaaacgcatgcatgaattgttttgtgtttatgactttctttttacttggttgttgacccataagactactatgctaaatcattacttcgttcatttattctcttgtttgattattatgttaagaaagcttgttggtgtagtagctgcttagactttttctaaagctttatttggttttaattacagagaggttacgaatggaaggaaactgtatatccctcccagagaggtgcatgtccaagtcaaacattcaatgccgccacaaaagttagagatctttaagtctttagaaggatgggctgatgaaaccctgttgacttatttaaaacctgttgagaaatcgtggcagcctaccgattttcttcccgaacctgagtcggaaggattctatgaccaagtcaaggagctaagggaaaggtgcaaggaacttcctgatgactattttgtggtgcttgttggggatatgatcactgaagaagcacttcctacttaccagaccatgttgaacacattggatggtgttagggatgagacaggagctagtcctactccttgggctatatggaccagggcttggactgctgaggagaatagacatggggatctccttaacaagtatctttatctgtctggtcgggtagacatgaggcagattgaaaagactattcagtacctgattggttctggaatggtaagctctgctaactttcttttttgctttaacccataatctcctaaagttgcatttgcgctttaggaagtgactggggatggggatacaatcgttacatgcttgtttgaattgattgttaaaattccataggtaggggaacagaagaggaataagttggaaccatttatcagttttacttttttggaacttatcttgtcatttcttagtatggcttatattgacttcacaatgactatctgcaaatcttcatgttagcaacatacgcattttttatgtttcaagttctgaagatagaattggagtgctgcttagctgccacattaatcactttacggatttccattgtgtaaagtttgtattcctaatattcaatgtaagattgatcgatttgtcttatgtccttaggatccaaaaactgaaaacaacccttacttgggtttcatctacacatcatttcaagaaagagcgaccttcatctcccatggaaacactgccagactggcgaaagatcgtggagatttgaaacttgcgcagatatgcgggaccattgctgctgatgagaggcgtcatgagactgcttacaccaagattgtagagaagctctttgaaattgaccctgatggcacgatcttgggcctggctgatatgatgaagaaaaagatatcaatgcctgcacatttaatgtatgatggccaagatgataacctgtttgagcacttctcaaccgttgcccagaggctcggtgtctacactgccaaggactatgctgatattctggagtttcttgttgaacggtggaatgtggagactttgacagacctttctagtgaaggacacagggcccaggtaaattacctccatgaaacttcttgtgatgaaacctccaagtttatgaatacttataacaatcttgtagtagtttttggtcatgaatactatattagatatactgttttgtgtttttgatgatctgatcgggacctaaacttgaattctgactctatcatttcctttgacaggactttgtctgcggactacctgcaagaatccgtaaaattgaagagagagctcaaggaagagccaaagaagctgccaaaaacataccattcagctggatatttggtcgaaatatcagggcttaagaagtttactacacaattctctttccaattatcccaagtaagtcataaaggtcttcaccaaccatttcaccaatgaaggaccagtttttaagaccacgaaagttcatttgaatgtgttttgttttatacggaacattgtagataaagttatgtggttaggttatgtttcttgtttgaatcagtcaagaccaaagaaaatgtgtttgagtgttcttagatattgtatggtttaccaagaacaagacttaagattttcctttacctttttgattctctttttgttgtatcagtctaaagaatgttctctcttaaataaagagtggtttggcaataatgttctagagaacttgggtacacatattccttgaatatcatcaattaaaattttcttatgcaagacatatagaatcatcaacaaagtaatcaaccaattcaattcttcaatacatataaaccaaaccctgaaacacagatcaaactaacatttgatacaacctctcttctcttaaacaaaatcattacaagaagtgaatttttcttcaaacttggaacgcccatggggaatttttgagagtctcttcactctgaaccttaccagtccttttcatagcaactccattgttatcaccatcgacataagcgtagtacttcaagaaaaaggcgagaacaagaacgatccactcaaggcaaaagattacaacacagagcccaccagctagtttcaagatcatagacgcttctttctcacggacgtaagagttaaggctctcgaggaaattcgaagtgttggtaaagatgagaacagagactgagccttggaaaatggcggtaaggacagttgcgatcatgtgagctgcgtaccaccggttcttaccataagatgcggctgcacagcctgagacggcggctgcgatcgtggtggcgtgaaggaggatgaggaagaaaccgcagagtgaagggattagacggagagagagagtgaggaagatgcagcttgacgatgcaccgaggaggacgtagtttgcagtgaggaagagtttatgtgtgtagtaatgagattcttggatcgattcttgtggttgaggaattaaacccatgacgatgttggaggtttctgattcgggttgcagaaaattttggattttgagattgcgaagaagaaaggaagatagcttgcgaattgtgattgggtgagttatgaatttgggtttatgtagagagcgatttaaacggtctgattttccaaatatgaccgttgaggctttacagaagtgaaggacagatcaccgacagagtgagttgttgttgtgtgtgtaacggctagtgttttttgctattcctttgttccagaacaagactggcaagcccaatgggccaagttgggttcttgtttgtccgagacaaggatatttttatcctgaacacggatatgttatccttacgaagcaaatataagtttatgtcttgtgtgttttcgtctgcttaaattgaaccgactcattccaaccgaactaattatttgatgaacaaaaaaaacgaattgtgaatctttaattcggttcacacagtttattcaagatgaaacttgaaggccgtttcaataccattgaaacagagtaaagtcttgatgaaaccataactgcaaataggacaaaaactgtttcttcttctcttctttactctcagattgaaagaagaagaatgattcgatccaagatcttgagctgcttctaaaatttaagaaccatgttacctaaaaaaccaattttttcatctacagagcaacacaggtttgacgaaactcgatgggtcatcaatgtccaaaaatctctcgatgcagagctcgaagaacacgatctcgaagaagtcacagtcagcattttcaatgttcctaaagcattaatgtgtagccatccagattcatacacacctcaccgagtttcgatcggaccttatcactgtctaaaaccagagcttcacgaaatggagaggtataaactaatgatcgcgagaaaaattcgaaatcaatataactctttcaggtttcatgatcttgtagagaaattacaatccatggagattaagattcgagcttgttatcataagtatatcgggtttaacggagagactctgttgtggataatggcggtagattcatcgttcttgatcgagtttcttaagatttacagttttagaaaggtggagactttgattaacagagttggtcataacgagattcttagagatataatgatgatcgagaaccaaatcccacttttcgttttgaggaaaacactcgagtttcagcttgaatcgactgaatcagctgatgatctactgctctctgttcttacgggtctatgcaaagatctctctcctctcgttatcaaattcgacgatgatcagattttgaaggctcagtttcaagagtgtaatcatatcttagacttcttgtatcagatgatcgttccgagaatcgaagaagaagagctagaagaagatgacgaagaaaacagagcagacgaaaatggcggaaacagagcaattaggtttatggatgagattaagcatcaattcaaaagggttttcgcgtctcgacctgcggatttaatcttgagattcccgtggagaatcatatcgaatcttcctggattcatggctctgaaactttcagctgattatctcttcacaagacaagaaaacgaagcaacaacaacgagacaagaatcggtttcgattcttgatatcgaaaagcctcctcttgtggaagaacttacaatcccatcagtctccgatctccacaaagccggagttagattcaaaccaacagcacacggtaacatttcaacggtaactttcgattcaaactctggccaattctacctccctgtaataaacctagacatcaacacagaaacagtccttcggaaccttgtcgcttacgaagctacgaacacttcaggaccattagtattcactcgttacacagagctaataaacggaataatagattcggaagaagacgttaggttgcttagagaacaaggcgttcttgtgagccgtctcaagagtgatcaagaagctgcagagatgtggaatggtatgagcaaatctgtgaggttgaccaaagttggttttttggataagactatcgaggatgttaaccgttattataccggacggtggaaagtgaagatcggaagattggttgaggtttatgtttatggttcttggcagattctagcgtttttggcggcggttttgttgttgatgttggtttcgttgcaattgttctctttggtttttagctccttccttcggtttagagccggttagttgagagattcgagttcgttcgctatggttttgtgttatttctatttcacctggtttggtttgatttggtttatgttgaaccatattgaaattactgtgcttttgtgaaacattttgtaacaaaaagtccttcatttgattcattgcaattaagaattaattactgtatctccttaaagatccgaactttgcgagacagagagagagtagggttttgggtttagaatcaggaactgctgttgaagatagtctctgagtgagagagatagtagaaatgttgagatcctttctctgtagatcgcaaaatgcgtctcggaatctcgctgttactcgaatctcgaagaagaagacccagacgactcattcgcttacctctctttcgagattttcatatctcgagtcgtctggaaatgcttctgttcgaaacatcaggttcttctccacgagccctcctacggaagagaacccagtctcgttacctgccgatgagatcccaatctcgtcagccgcagagcttacccttgaagaatcggttgcttccgctttgggattttcagaaagtggcgattatggtggtacttccgtggaagctgttggtgaagatggagattcagagattgttgcaatagaaaacgaggtttaccaatttgatgacgaaaagctggaatctgtactgtctttgttacggagtgatgaagaatccttggagtttggtcttaatgcgcttaatgtcgatttacacttagattttgtggtaagagtgtttgaatccccaggaatttcaggtaagaatttgattaggtttttgaagtgggcaactcagaatgaagagattactgttaccacctcgcttgtagaatctcttcttgtagcaattgctagtgatacacgtagaatggatgcttatggtttgtgggatttggttaaggagataggtgagaaagagagttgtggtgttttgaatttggagatattgaatgaactgattgccttgtttgggaaacttggtaaatccaaagctgcttttgatgtgtttagtaagaccgaagagtttgggtttactccgaatgcgaaaacatattatttgacactggaggcgctttgtaagcggtcgtttatggattgggcatgttctgtatgtgagaaaatgcttaagagtggtgtgttatcggagggagaacagatgggtaacatcataacttggttttgtaaggaagggaaggccgaagaggcttattcggtttatgaattggcaaagacgaaagagaaatctttgcctcctagatttgtggctactctgataactgcactctgcaagaatgatgggactatcacgtttgctcaggagatgttgggtgatttatctggagaagctagacgacgtgggataaaaccattttctgatgttatccatagtttatgcagaatgagaaatgttaaagacgctaaagctttgcttttagatatgatttctaaagggcctgctcctgggaatgcggtttttaatttggttgtccatgcttgttcgaaaactggagatctggatgaagcaaaagaagttttaaagttgatggagagtagaggtttgaaaccagatgtgtacacatacactgtcatcattagcggttatgctaaaggagggatgatggatgaagctcaagagattctcgcagaggcgaaaaagaaacataagaagcttagtcctgtgacatatcacgcactcatccgaggctattgcaagattgaagaatatgacgaagctctgaaactcttgaacgaaatggatcgtttcggggtgcagcctaatgctgatgagtacaataagctgatacaatcattttgcctcaaagctctggattgggaaaaagcagaggtgctgtttgaggagatgaagcagaaaggcttgcacttgaatgcgatcagtcaggggcttataagggcagttaaagagatggaatctgaagccaaggtaacggaagatggcaacttacttgctgaagcatagaattggatccgatacttatcattgttctaacaatgtggactagctgttgaagatgttatttcttggtttgaaatcccagaagatacctggtttgttcttttgttactggaattatcttttgtattcttccagcatttgccaataagccttcacttgggttcaatttcttttagcttttgatttaagaagtgaatcagtttaccatggtcaatttttcggtttgcatttgattttctttaaaatgacatgttttgattttagctcagttgagaaaagttataaaccattagtgattcaacgttagttcataacaaaatacgtaataaaatgagtacagatttgttatgaaaaaaaatcaggaaattctaacgaccactttattcttcttgcctgctgatagaacaagacctctcccttcaacaatatcctcttcgtccactctcttattctcatcatcaactctctcattgttcatataaaacccaccttgcttcaacattctcctcgcagcagatttgctctcaaacaaacctgcagaaaccgatagatccacaatcgataaacccgacactcgatcaataggcagtgagcaagaaggtatatcctctgctattctctcaatcaagttccaatcaagctttgtctcagcacctggtcttaaagcttctgttgctttaatggcttctttcaaaccctcttcgccatgtacgaatctggttacttcttcagcgagtttgatttgtgcggtgttgggaacatagccgggtttgctcatttgatcttccaagatctttatctcatccaagctcagaaatgttaatgtctttaagaagcgtatcacatcaacgtctggaactgaaaagaagtactgatagaacttataaggcgataacatcgaaggagatagccagattgctccatcttctgatttcccgaatttcgttccatcgtttttcagtaggagaggaaatgttagcccgtaagccgcttcttctgcttggagaatcttcctgatcaaatcagttccagctgttatattcccccattgatcactgccacctatctgaacattgatcccttcgttcttgaacaggtgaagaaaatcataggcttgcaacaactgataagtgaactcggtgtagctcataccttgctctgattctaatctcttcttcacactctcctttgccatcatagtaccaaccctagcaaacctaccgactttgttcagaaagtcgagcattgtcatatctttccaccagtcatagttattaaaaatcacgtaagagccaccgggactcggattactacctagaatcttgataatgatttttgtaatccccgcaatatttttctccagtgtatcagcgtcaagctcaggtctttctaagcttttaccagatgggtcaccaacccgtcccgtggcaccaccaattaaaccaacggcttgatgtccacatctttggaaccaagaaagcacaatgataccaagtagattacccaagtgtaaactctcagccgttggatcaaacccacagtagacccttaaaggagctactttaggatcagaacaagctgacctgagattctcgcttgtgattgactcgaggagacctctttcttcaagtatatcgactacattagggcgaaaaacagcttgattctctgtctcaggagatgaagtagaatgaattgaacacttaacagaagagaacagagtagtagtagaagtggaaaaaaggtgaggaacttggacccttctgaagaaagttgcagatgatttctcaggaaagacgagtaaagaagcgacacgcaagggagataagaaggttctggaacaaataggcaaaatactccttgaggcaaacgttattcctgttgcatatgccataaattttatatgctggaacctttcttgaatagccaagctggtaactacaactgcaaatcaatcagaaacaccaaatagctgaaaaaacgataaataaccgacctttatcgtgtaaaactgtaaacaaacatataccagtaaatgcacaagttgacctgataggaaaaaaaaactagcctcgtgtactacaggtcatatattttatcaaagaatgattccaaacccaaaaactctcaggcagacaatttcacaaacaccttatgggcattgtctcatattgtccccatagaaccgtgaacaagtcaatctccagaaatgggaacttcaaacagaactatagagggaatcctataattctacaccaagttatgaaggaatctcccaccattgcatcgaaacagacccagagaagctaactacttggagataacaatcccaacttcagcgacattacaacacacctaagtggatacccaattaaactttgaggaagaagaagaagatgatgaagtgaaagagcttacttgttcacagcttcaagaatggaatttgttttcgacctttgctttgctttttccacagatcaattgcttcagattagccgaaaccgagattgaacctaaagtctccggtttattttaataaccggtatctgttcaatttgaatcggttaagatggaaaaccgagatccataaacccagttcatgtaataatctctttcgggtttgctttacggcccgtgttgtttttatattgtaaaccactttacggcccgttaaaagcaaactgggctccttccctatatacacaaacaaaattaattgatgcaaatttgtgtgtaacatcgaatgtgaagaattcgaatatatagctatataagtagactgattttaaaactacaaatgcatgtacaatttcaaatatgacataaaaattggttgaaaaaggaaaataatctatacttgaaactttgactaatttatatacaataggcatgcatacagctcatatatttgactaattatatataaaaatcagaaccagctttatgattacatatttacatattcctttttaacattcacatttcatatttattgttttatatccttatattcctaaaattctgattatatatacacacaaaataagaaacaagaatatatctaatttttactaattattttatcttacattttttcaataccaattttgacttcgaaaccggctgtacttttacatatatacatatccttttgacatttcacattttatatattccattgttttatatccttgtattcctaaaatactgatttgggatttcatacctgttaaaaaaaaaatatatatatatatattttttaattatcttaccttacttacttttttttttttaccttacttactttttgttgacttattgtctcatatatttttaataattattttaacacttatttccatttcatttcatttggttactctcacaactactataaattaatttatataaaatttatttttcacaagattatatttgtgaattatctaacaaacattaattagatgatgaaaaatcaatttacgtaaaacaaaaataaaatccagaaaatcaaagctttgtttacctaatcctaggtcctagcgaaattgactgattgtttccgaggatgaaacgatgtgtggttcacggattaagtattaagtaagacatttgtgggtatatgtgtgtgtagtgtgactgtgtaagtgaggtctttttttgtttttttacagcatgtaaaatgtgtggttcagattgaagattcatagagaagctagaatttgtggaaactagtaggaacaaattaactcctctaaaagaattagaaaatctacgatctaaaacctcacctccttcaaaggtttgatcaaaactatattaatcagaaataccaagaaatttttaaaacaacacattcaacttaagctttcacaaatacaatgattcattttacttaaatacaccgtcgacgtattggactgaactcaaatcaaagtctttatttaatagataaacatacacttacataatgtaagttacattacacgacacagaatactcattttataaatatcataagagtacacatgatcattatcgatacactagcatgagcttaattattcaatatccaacgggatacgttcactgagtcgacggtgggaggaatggtaacggaggaaacctaaatccagggaaactgggaatagttaccggaggtaatggcgggaacggtaatggaagaccgggaatagttactggaggtaatggcgggaacggtaatggaagaccgggaatacctcctcctgatggagggaatggaaacggaagtctaaaaccaggcgaaccgggaataccgggaatacttcctcctccaggtgatgacgggaatggaaacggaagcctaaagccaggggaaccaggaataccgggaagaccaggaataccaggaataccgggaataccgggattacctccaggtgatgacgggaatggaaacggaagcctaaagccaggagaaccgggaataccgggattacctccaggtgatgacgggaatggaaacggaagtctaaagccaggagaaccgggaataggtgatgttggaggtgatgactgcaaactggagaacggatcagatacaaaggctaggttgttggcttcgttggtggtggtggttacgactctatcaaccggcttcgcatcggcatcgttgagagggcgagctacagttgtttctggtgtgaggtggaagatcaagaatagtattagggctaaagtggtcgctaaagatgccattgtgtggaaatgtttttgtctgttagtagcaggtgtttagtgcttgtttatataggcgcctatatttaggttggctccatctttatttttgttataatttaattataaggaaattttcaaaaaatatatacacattataagaagttttaatctctctatggacatgacaaccaattttgggttaatgttgactattttttacaaatttataatacattctataatatatatcaaagaataagctagtttaggaattaaacaagccaaattcgttttgctagcctgtgttcatttctggataaactttgtaaggctcaagaaagaccttgacagcaaggttttgttctgtccttagtcaaactattgggcctaagatatgcctgttttcttcgtttggtttcaatcctaatgttttaaaattttgtcatcttttcatcatcaactccaaggttttgtaatttcttgtggagaggaagcaagaggatgtgcttggttgtggaaatatagggcccttaaaatatattcatcgtattcactcacataacaaaaattccacaagtaagcacatcatcttgcttcctccacaagaaattacaatgagaggagatcaataatgctctcaacgttcaattcgttgttgacttggaataattaattctatttgttaataaaagactgatgatttggtttttagatatttcagagacctcaaatcataattaatctgaagaaacgcgagaacgagctaatatttattctacctaccatgattatccacaaatttgaacacaaccaaaggcaggctacgtactacacaacaactagatcagctagatcatcataatacaccgctagagctttactaggtttgaaaagattaagatcgactgaaattgccactttttcccttgttgcggctgcaagatctgccaactcggctccaagatctgaatcacacaaagagaatgcagcgaagaagatgagaaagaatagcaatcaatgcttttgttcaagtgcttaactattgattttgttcttacctagtgcctccctcatgtatcgagccttttgtcctagctggaatatatatggatatctttttctctacatacagatgccaaaattccatgctatgtacttccttgatccatatcgatggctctgcaatcaaaagaagaaaccacaaatcctaattacaaagacatgattagtgaccgagatttgtagatctggtaccatttttggtaggtgatgatgatgaagagaaaccgcgagattggcgatttccaatcgatctccctccacggtaacactgtacaattcttctatcaacagatcactcgtgaaaaaaacgagaatcagatattcggcgtacgtaccttggcaacgaagggtctcagattctgcatgatccaagaattaattaggtggtttgttagtgggggtgacttggttgttattatttccttaaaaagttttatacaaggacagatgggcctcatattttatttatgggccttttaacttgggctagacatccttgtacttcctttcataacaaattcccaaattatgtctatctttctcataacaaagaccataggggcctaatggtttattagtgggcctaagaatctccggttgatcttaaaaaacccgatataagttcggttttactaaaccggtctccttaaaacacagtaaacaaacaccaaagtctctgaagaaagaaatcaaaacccctttcgaacaaggatttcttggagcgaagcaaaatggtttggggtctctttcccgttgatcctctttcaggtttttctccattagaattcgattgtcttgcaagtgaacgagctttattgtttactgttcatttttttcatcattacgataattttttcctccagtaattgcagttctcaatctcaactatgttatgctctaggaatcagtgaaattcgtgatgaccctttagtttttagttgttctctacttattaacaacttcggtctgatcaatgtgttacaaaaaccccacatttcttcttgggtttatgctagaggagtgagtttgatcttgctttttaagaatctctagttttgtaaccttgatgagttgttaaatggtttgaatcaggtgaagataaatactatatcttttcaaagggtatttacaaggttggtcgaaaaggtaatgttattacactttcatcatcgtcttgctcgtgttctgtgccttcatgggttgttctttctctgtaggatgtgatataattatcaataaggataagggggtatctaggatccacgctgagttaacttttgatgcaacaactgtttcaacctctcggaggaacaagtcttcttcagatacatcatcctttgttatccgtgtcaaagattgttcaaagtatgggacttttgtcaaaactgacctggggacaaaagataaagttcatgagctatctaataaggagaaaattctccaagatggagatgttatcgcgtttggtacaggttctgcaatttacaggtattccaggtgtgatgttttttttggttgtaacttcgtgtagtatggcttatattttttaatcattgtaggttgtccttaattccgcttgttttttacttgtgcccttcctctgagacctttaaggtggatcagcctgtacaagatgcagtttcatcaattggttagtgaaaaacattattccctgcctcatggagtagttttcatattaccagcattgcctgaaactacgtagatattcaggtgctcgtatttctcctacattgagtgaggagtgcactcatgtgcttcttgagccacgtatgcaagtgaatgaagctctgatcaatgcaattttagccaaaaaaacaatcattttgacaaactgggttatggtatgtctgagaattccattgtcatcacttgtctgttaattggtttttaacttcaatggtttgtctagcttctcgcagagaaaagtatctgcagcgaaattcctggatacagccagtgagcattacttactgttttccggttattgaattaaaatatattagttactgacattcaagtaatcaatgttaatttaggtacagaccatcagtgatggttgaagaagctttggtggatgtactagaattaaacgtccgtgaaaaatgtctagaaggatttacctttgtcttggaaccaacagacacggtataatctcttatttgtctcaagaagaatcagattcaactgatggttccaagtgatttttgttataggtctcagtagatcttagtcttactaaattattgataaactatgcatttacctatccgtgccattttctttatgcagtatagatttggttgcagcttcccatctttacttgaagtatgtggtgcagagaccgttaccatagaagacattagctccatgagtcaggtttgtgcttttatattgttttgctcatttgctctttctgtaggtagtcctaatcgtaatcaactctgcaggattctcagtttggagagattaatcgcatgatatgtgtcatcccaaaaagtgcaggagacaaatttggccgtttcaagcatctcagtttgttatctagagtgaacgagatggatttagtatgcgccgtcttttccggaaatctaccttcgacttcactgataccaccatccggtgagtaaccaaagccaaatatatttgcttttctcgggactatgacactgatcttgaaacatttcctgtttgtagttgtaatttcatcctcgtgctctacagatgagacagtggtagcggattctgaagccgaagaggaagaaacaacatcgtctgttcatatgattgatgctactgaaaaggcagaaacgccagagaagcctgctgctattgtaatagaggatagccctgttactatattggaagaaacttcgaatttgaacgagtttaaaagcgtgaacttattagcggatacagaaagtagaggccacatggatgaaaagaactcaagtgatagtgtgacaatccgaagggatcggaacgatgaggctgaaactgggaaatcggagattatatacactcaagatcttattgttagggacttgcgatcgactagaaaagttcaatcgacaggaggggaaggagttgtggacttcaagcgattcagaaaggtaaaacagaacctttggattctggacaaatgttgtgtttgcgagatgatgattttgcttgttttgttagggaaatgttacatgcggaaacagcttcagtagcctaataccttttgcgaaggatccatacaagtaattccgggtcttatctcttgcttattggctcataatgttttctcctctatgttttcttgaccgtttacttcggtgatgccagagaatacgatagctgggacgtgacagattttatgaaagaagagaagaaaaggaagcagatggaagccattgcagaggacttgtttaaaactgaaaaggtgtcaaactttattattatccaatatcaaaatataaagatcatcctgcgattctctttacactaatatcgtaatgtgcaggctagaaagcgtggaacggctggttccattcgcgggtttctctctggaagttgaggttttaaggtaaaatggttgctgtgggatcttaactctgtaaatttctcaggcttgtttagtcttcttcgaaagatctaagctttcattttttttctttgcgtgttttattgcaggactcttttagagtgaatcagaagaaaaagtctctggaagaacgcatgattctggatcagtggatcactaggaactaaacaaaatcttgtcttttattttttgttcttcatgagttaaaaaatgatgtatgtatagtgagtgatctttggtatctctgatgaaaacaaaaattgattatctcttttcagaaatttaaaaacagaaaacatgtggccattacttctctgttaactcgaaaagatacaaaatttatcctttctctttgttctaagtacaagcaacaatggagtggccatggtcggccatcgctgcttcttcttcctcttcttctagttgcttctttgcttctcctaactcttgcttgtctattactagacgaacgaatttgagctgtgttaacacttcggttaaatccttgcgccacagcagattcgactcgaagcataatctcgttaaacgtcgaatcaatggagattccgttgttcggagaagcaccacaagcaataatagcactgaggagacagaatcatcgtcgtcttcttcgtctgtagattgcgttggaatgggatcagacgtggaatgcgtcaataacggggaagatgaggagaatcggagctctggaatcttgagcggcggtgaaggaacgtttcttgaatggacggttctgatttcacccttctttttctggggaacggcgatggtggcgatgaaggaagtgttgcccattactggtcctttcttcgtggccgcgtttcggttaattccggctggtttgttgcttgtcgcctttgcagtttacaaaggcagacctttgcctgaaggaatcaatgcttggttctctatcgctctctttgctcttgtggacgccacttgtttccaggtctgcttactttacctgaactctttaagagttatgttgatagattcttgtctgcatgttggtgatgcttgttaggattatggttcagggatttcttgctcaagggttacagagaacttctgctggtttaggaagtgtaagtttttttctatctctcaagtcttatctgtgttcttgtctaggcctgagaaaggcttttgggtttgttaatccgtcacgctgcaggtcataattgattctcagccactgactgtagctgtgttagcatctttcttgtttggtgagtcaattggaatagtgagagctggaggtttgcttcttggtgttgctggacttttgcttcttgaggtaaacgatctacttaaccatctaaccaagtctgagctagtttctgtttagtgcaacttgatgatatgtttgattcactacaggttccatcagtaacttcagatggtaataatttttccttgtggggaagtggagaatggtggatgcttcttgcagctcagagcatggctattggcactgtcatggttcgatgggtctcaaaatactcagatccaattatggcaaccggttgggtaatgatgctcgatccttctcgcccctttcaatccttacttgtccccatttttgttcaatggcttgtcttcgagagttcttcttacaagaactaaactaaactaaacatgtctctcattttatctgcagcatatggttatcggtggccttcctcttttggcgatttctgttataaatcatgacccggtttttaatggtagtcttcaagatctatccacaaatgatgttatagcacttctctacacatccatttttggcagcgcagttagctacggtgtttacttctatagcgctactaaaggtccactctttcactgccttctcgagagactatcgctacttctggtttcagatctctgatacttgtatgatgtctatttttgcaggaagcctaactaaactcagctcactcaccttcttgacaccaatgtttgcatcaatctttgggtaagaccataatcagcaacccataaatccatgattttaatagagtttctttagtcatttggttcatagttctgatattattggtttgaccaggtatctgtacctcaatgagactttctcctcattgcaactggtcggagcagcagtgactttggtcgctatatacttggtgaactttcccgaaggcaacgactgagacactctttgagttcttacttacactctttgagttcttacgtcatttttaaacttgttatgaaggtggaaatgtatcatagtttcattatcttcaatcttattgtatataataaaatgaagcatcatagttcagtgttaatcaaaagccaagtttcgtaattacataaacaaatgttgcacaacacgatacagcagaagcagattctcttacttccgccacaacatttacaatcagagatcaaccagtatggtaatacaggtgtgagcagttttggattaagtagtcttctcatcttctggtttagcttccatgtccgacatacaagccacatcagcaactagtctctcaacaggcaccttgctcacatcccatcgcatgcctatatctgaaactaagcgactggtgcagtacatgccatagccagccacagccaaaccaccaaaacctgctacaaacctgagtggtgaagaaagaagaacactggcagctgcaacaattgaagcagcttgaccactccttcccacgtcggtgtttgccactagcaaacccgttttgcaatagatggcaaaatcttcacagttgttcttgaagacattgtacacaccaaaaccattttgcaagagaaaatttgctcgatagatgacttcttctggaggatctgaagatgctatagtgcatacgccgcctcgaggtttggcaagaaagatagcaggggaaacactgtactcaaagacatagagatcacctccggcaaggaaacattcaaggcaggaagatataacaccgccaagattggatcgatctccacaatcaggacatgggttgtctccatgattatgagatgaactaacaatgatgttgtccaagaaagtcccagttccagtctcttgaccatcaccacgagtaaaatggttgacttgtccattacctacatagattcctgcaaatcacacacacatacaagttaacgtgatagattacataacaaagaaaagataaattcaaggattacaatctagcctagtaacagagaatagctgttaaaatcacattttcctaaaccttctactaatttggatccaaacgaaagaatcacattatttcccccaaatttgaaattttcgcaaaatctaaccagttgcacaaataatcaaattgagacagctaaaattggaaattgaatcatctcgtatcatcatgaatgtacaatgtatgtatctctctgtaaaaagggaattacaaagagagagataagagtgagatcgaaccgtgatgagcgtaaatgtaggcttgacgccatgaatagatgtgatcgcctggtttcacatcgtctctggagattttattggaaaggaatcccatcttctccgccgacgaacggagaaccagaaattagggattgcgtcgtcagagagagaaagatcttattttttgcttagtgtgtagggttttccatcttccttggataacatcataacttttttaaagttccataaagacattgatcttttgacttttgagtttttgaccccagaaaaaatatagtttattagaaatttaaattctaattgcttaaatcttaaacgacaccgttacaccattgggcctcaaatgacattgactcttcatttaataaaaagcccaaattaaaattcagactcgtcagtcgtcaccattatttcatcccttaaaccaaaaatcttagtttcagacggaaagagagagtatagccatggaagtctcaaatcagaccagaaaacggaaagcaatcgacgccggacatggctcgcagccgacggcgtatcgaggctcagatggtgtagatctttctctccttgaagcacttgagaagtcttcgcataatggagtagaagcgcttgatcttaaaaccctaaaaaagcttgtcctctccttcgagcggcgtcttagagacaacatagctgctcgtctcaagtatgtggagaatccagaaaagttcgctgactcagaggttgacctacacgacgatcttcagaagctcaaggtgctcgctggagctccggaactttacccggaccttgttgcttccaatacggttccttcgattgtcaatctcctctctcatgaaaactccgatatcgccaacgatgttgttcagcttcttcaggatctgactgacgaagatgccttagaggataacgatgagcctgcgcgtgtgttagtcgacgccttggttgaaaacaatgtgctcgagctcttggttcagaatatgaatcgtttgtctgaggctgaccctgacgaagctacggctatatacgcaactttgacggtgattgagaatttggtggaagtaaagccggctgttgctcaattggtgtgtgaaaggacgaagctattgcggtggcttctgacgaagattaaggtgagggaattcgaaggaatcaagcagtacgcgtctgagattcttgcaattctgctgcaaaacagtacggcgaatcagaaacggctaggtcagatgaatggtgtagacgctgtgcttgaaggtgtggcgatgtataagtcaaaggatcctaaaactcctgatgaggaagagatgttagagaatctgtttgattgtttgtgttgcctcttgatgccattggagaacaaggagaggtttgtgaatgcggaaggtgtagagctgatgattattatcatgaaacagaagaaatatgcttacgggtctgctattcgagctctagacttcgccatgaccaattatccaccagcatgtgagaggtttgtggatgttatgggactgaaaacagcatttgctgctttcatgggtaaggcaagtttttcaatcccgtttctttttaccatctttatgaactgtctagtgacttattgggtattgaagtctgtatcttttgttagtaaatgcttgcgtagtagatcaaagtcatgtgaaagaggcgattctgaggcattcttgtctattgattttgtttagttctttgaatgtttagattccgctaaacaagagaatcaaaagggagcggtataaggaggagctagaggagcgggttatttccctgattgcgtcattatttggtaagaaggcaagtcatatgtttcagtaaaagtgacgtgttttctttgcatgttcttgatgttaatttcttggttttcttgtttgttggctgtatctttcagctgggatattaaggggttctaggagagatcgattgttgagtaaattcgtggagaatgaatttgagaagattgaccggctcatggaattatatttgaggtaatagaaatgttctctttctcttcagtagtctaccattttaagcattttgattaaaaagctaaggcttctatatggtgaacgcgatggtaaaatgcagttacctcaaagttgtgtttcctctctcattattgttttgcacttggcagatactctgatagggttagatcagaggcggaaaggttagaccagcttgagcttgatgaccttgaggtaatttcacttttatcattttcatattttgatgttttcattctgagcttgaatctgtttatgaactgatttcactgttttacttttcagttggatgaagatgagaaatataatcggaagctagaatcaggtctctacagtcttcaggttcgattaagtttaatttatccagtttcatgtccgtttgggaaatggcaaatgtgcctaatatgtgtatatatactacattacacacttattcaggcctctacacttgattttatcttctttttctagttgttgttaatcttgagtaacattttctctgaaattgcagcttgttgctgttatcctggggcatatttggtgttctgagtaagtcccacccttaaagcacccaccaaaaagatacttacctgagctttcgcttttcggacatactaatttgtaatcaatacttgatgtaggcattctggaatgagagcgcgggtggagctgctactgaagcaacagaagcttagtaaaaccgatgtcaagcagattcttcaggttttctatctcttccctcgtctaaaaagtagtatacacaccaattaaccagtgactcgacttgatatggataaaaacaacatttgaacaatttgaatcactgaaaccatcagacttagtgatacggactgtgaaacataagtttgtaatgaaaactctctgttacccaattttatcttttgtggttgcttcccttgcatttgctaataatataaacccttaaacaggagtatcacgacaacattggagatcttgatggagcagaggagaaggaacgaggacaggcgagaattcagttgttcatatcagcgatgtgatttagagaaggaaagaaagaagttagaaatcgtgcaaatggcttggtattattaacttccaacatgggaccagatatactctgtttatttcagagtcgagcaaatcactttttctggttttatagtattgtgacctttcaagtttcaatcgatttgggttacaaacttacttttttggtacttagatttatttagccttgaagcttactttcatatccgtgttacctcccagtgagaaactttttctttggagtagcttagctaagctgtatatttaattataatagatagttgtagacagacatgtggacgtgccggagtggttatcgggcatgactagaaatcatgtgggctctgcccgcgcaggttcgaatcctgccgttcacgtatttttaatttaattttgttcttttttaaaaaaaatctggcatacttgtgaaactgaaaccacatgacacatgtgctccctaaacgtcgccgtgaccagatagctccggtcagagtcattatctctctctcgctcgctctctccatcttcatctctcttgctgaaaaatggcgaactcgagaactgtcttaatcttgtgcggtgactacatggaagactacgaggtcatcttcttcctctgctactgaacttttttttttctttttcttaataccatttcttccttgttcttatatatatatcagctgattagtgtgtggcgtcttctctcaggtgatggttccgttccaagctttacaagctttcggaatcaccgtccacaccgtctgccccggaaagaaagctggtgactcttgccccaccgccgttcacgatttttgtggccaccaggtttctctctccctctctagatctccatgtgtagctgcttgatctattgatatacgatccattgtaactatatttagaaatggttcattccaattgagcttcgaattggatgatagaatgtattgtagacaagtttctttaagctgtgcacacttttctgatgtatttctgagagaatttgcagacatattttgagtcacgaggtcacaatttcacgctcaatgcaacgtttgatgaagttgaccttagcaagtatgatggattggttataccaggaggacgtgctccagaatacctggccttgactgcatctgttgttgagctggttaaagagttctcaagatctggcaagcccattgcctctatttgccatgggcagttgatattggcagctgcagacacagtcaatggtcgaaaatgtacagcttatgcaactgttggaccttcccttgttgctgcaggtgccaagtgggtcgaaccgataactccggatgtctgtgttgttgatggtagtttgattactgcagctacatatgagggtcatcctgaatttatccagctttttgtcaaggctcttggcggtaaaataactggagcaaataaaaggatcttgtttctttgtggggtaagcaatcttaccattctgatgaatttatgttttcagtagttttgcctatgatcttgctttagattgtacttcaaatatcatgacctcacacttttaaatttattggtagaagatatcaagatcgttgaatctcctgatatgaacatcacacttttggtaatttttgacctttgcaggattatatggaagactatgaagtcaaagtgcctttccagtcccttcaagctttgggatgtcaagttgatgcggtttgtccagagaagaaggctggtgatcgctgcccaactgcaatccatgactttgagggtgaccaaacttacagtgagaaaccaggccacacttttgctttaactactaactttgatgacctagtttcctcgagttatgatgctctggtcattcctggaggcagagcaccagaatatctggccttgaacgaacatgtccttaacatagttaaagagttcatgaattctgagaaaccagttgcgtctatttgccacggacaacagatcttagctgctgctggtgtcctcaaggtcagcactgttccttcgtagctctaattttatttaactatgtcctcctttttcttgccactacaagttgtttgaggaatttattctatgtgacctgttcactggctggtgcagggaaggaaatgcactgcttatccagccgtgaaactgaacgtggtacttggaggaggaacttggctagaaccagatccaatcgacaggtgcttcactgacgggaatctagtaactggcgcagcatggcctggacacccggagtttgtttcacaactaatggctttgttgggcattcaggtttcattctaagttccatgttatgtaaacatcgttatcaagcagaacccatccaacacacttgtctactatggtatatgttactgccatcttttctatctcgtcttttgactagcttactgtcaagtcaatcacttgtgtttcataaagaaccccactgttgatgctttatgtaaagaatgaattc

SEQ ID NO: 1265 - DNA, 100559 bp, Arabidopsis thaliana
gaattccaaggaggcgttgttcttcagagactttcattgtggaatcgacttcttcttacacaagaatagcttcacattgcaactatagaactcgttgtactcttccatctcatccaagacaagtttagacacttcacggttcttcataacctgttgtgtaacaccatcctcttcacaattaatatagatcttcatctcctttaaacacgaaaagtaatccaagaaatgctctatcaggtacttctctttcattgttactccaaacccattaatctctaccactttcactggacaagatttgagcgaacggcctttgtcctttcggaaaatgcagtcacaagcatccccgcatttatctgtcacatggtgcacgataccctgaaagcagaaacaagacagcagggttaagtatgaactgcatgctttgtccaagtagtttcatggtttgtattcccacctcaaatattagagtttctaaacgtggacaattccgtagaagaactggcactgcttgccatcctcgatcctcgtcactgtaaataagtaactttttaacgttgttgaacactggcatcgactcacagcatacagaaagcaactgaaaacaaacaagtaagacaataccgcaaccagacatattacaattaatatcagcactcagcagagcagaaagaataaaacagaaaatctgacctcgagagtatcaggacacaagtgaagttcctgaacattttgtatgccattcatgagcttcaccacattgccaaagtggcgaacgacatcatactctaacaaatcattacttggccctcttactcgcttgatttgatcgtcatttgctctaagggcgagtcgagccagagacaagtttttcatattaactaatggatagtcctccgcaacaaaatcagtgtagacaaaggaaagcagatttggagtatcaaaagaaatgctcttaggattttcagagcggatgccagtaatatggagcgttgtgagggttgcacttgacacggtttcatcagaatcaagccactgcatattagacatttgtaattcttcaagcacagggaaacaaggaagaagctcctgaagctcatcatcacaaaaaaccctcacaccgtaaacacaaagacttttaagcattggtaaggaagtgccttcagctccaggccaccaatcaatattaaatgcactttttaatttcagattgactagtgtctcactcacgaacaactcttcaggcagataataaccatatcccaaatcaatggtgagatcaatgtctgaaacatcacgctgcagcacctcacacaaccaacgattcacacgagctggaggaacaccagtttcacacttgagagagaacttacgaatggaagaattgccctgaagagacaatactctatccacaaaatccatgaaactctgaagaataccgtctctttcccgcttaccctcttccggatgaagaaactcagagtcatcaaagtcaagattagggacaagtgcaaacagattacgccacttcttagacagaacagatgtggaagcagactcctttgtggtaagaaaggacaatataagacaacgaacctcgtctggtaaactgctcaacagatccatcttctctgaagagaaaaaaatacacaacgcaaagcaaagaaatcaatttcccaaaccaaacagttccactcgaaattgaagcagagagattgtttattttgagactgagagcaacatcataccttgctacagaggccaatcttcaaattagggcaatgaaacgtcgatgagagaatagcgactgactgagactggaagagacggagtgcggaatttattggtattttggtgatttttatcgataaaatttaattaattattctaatgtgatttgacgtgttatactgtttggtttttgtatacatgtgattatacttttatttcaatcccaacatgaaaatattatgcaactgaaaaagtaaaacccactctaaacgacttgctctaaccatcatgtaaaccaagttaagaaagttaccaacgacttcctttcaccatttactgtgacctcctcgtatgaaggaagcttcatgttcaccacttttcctgataactgcttgatgcaacaacaacaagatttactcaaatgttttataatttgatatcggcaagatctaatgaaaccaacaagtgatcagatgcaaagagtgttaaatgcacacaagactgagtcagaggatgaaaatcagtaacccttaagcaatacgtaattcagagtcttgaaaattaaccaaaagcaatcagaaagtttccaaggactaaagcaaaataggtgtggcaatcagtctagccgagccgaggatagtgtgattaaaagatacacatagataactaaaacaaaacaaggatcggatctgataagtcaaattcctagggggactttgttcaaagacttcattgttcatcccacttgtcacacggctccaagagttggacattgcaactatatatatccttgtactcttctatcatgtccaagataagatcatccacttgagggtcgtttccaaacggtgaaggatcatactcttctctatagatcttcatctccttcaaacatggaaagttgtccaagaaatgctctatcaggtgcatctctttcattgttactctaaactctttaatctctaccacttttactggacaagatttgagcgaacggcctttatccttccggaaaatgcagtcacaagcatctccacatttatctgtcacatggtgcacgagaccctgaaagcagaaacgagacaataaggttactataagaatgaactgcatgttttgtccaagtagttagtttcatggtttatagttccacctcaaaggtcagggtttctagatgtggacaattccttagaagagcaggcactgcttgccatcctctgtcgtagtcactcttaatgcctaacgttttgacgttgttgaacaccggcatcgattcacagcacattgaaagcacctgaaacaagaaacaaaacgcagctaaaatcatcttgcaatcaatacattacaactagaccagaaagaagaaaatggaaaactaacctcgagtgtatcagaatgcaagtgaagttgctgaacattttgtatgcccttcatgagcttcaccacattgccaaatcggcgaacaacatcatcctctgacaaatagttagttggggctcgcattcgggcgatttgatcgtcatctactccaaggatgattcgagccttgaataaacttttcatattaaccaacggatagtcctcagcaactaaatcagagtaggctagggaaagcagatttggagtatcaaaagaaacgctctttggatttttagaggttctggaaccggtggagctaagaagtagctgattagtgagggttgcacacgacacggttacatgagaatcaatccactccatacctaccaaccgtaattcctcaatcacagggaaacaaggaagaagcttctgaagcttatcatcacaaaaaaccatcgcagagcttatatcaagactttgaagccttggtaagaaagtgccttcagctccaggccaccaatgaatacaaccaaattcagattttaacctgagattgacgagtgtctcactgacgaacaactctcgaggcagaagataaccatcttcgaagtcgatgataagttcaaggtccgcaacaccacgctgcagcactttacataaccaacgattcagacgagctggaggaacaccgctttcacacctgagggagaacctacgaatgggaccatttccctgcaaagacaatactctttccacaaaatccaagaagctatccagaatttcttctctttcccacttagtctcttccggatgaagatactcagagtcatccaagtcgagattagggacaagcgtgaacagattccgccacttcttagacagaacagatgtcaaagcagactcctttgtggtaaggaaggacagtatatgacaacgaacatcgtctggtaaactgctcactagatccatcttctcgctaagcaaatcaaaacagttccactggtactacagcggttgattcaaacctaacacttatgacttaacaacaacaacaacaacgcgagtaggaaattgattttgaggctgtgacaccgaaaacaccaacaacattgaaaatgcaaattttcgcacaactcttaacactacaaattagggcaactcctcaatgagtcgaagaagagagggacggagtgcgtaatttaggggaatttggagatattttgtcaattaaaatattgatataattttaagtcttaacgattaatcacttagataaattaataacaccaaaacagagcagcgaaatatacaggttacaccctaaatatatttcaatcccacaaggctgctaattttagtttacttacataacaactgttgatgcatattcccaaagactaaacaccaatccaaatccactaagaaaaacaaaacacatctcacaagtgaatgagctcattgtttttagacgatttctgcttcttctgatcatttccagaggcagatgaagaatgacccaaactattctcaccaaatattatctcatccagatcattcatcatcatctcatcgctgctgcttccgcgagagtctttaggtttagtagcaacaagaatcatatggctggctctgttgcagctaattagaagagactgaaaatagatatatgctcattgagcttattagaagagactgaaaatgcaaaatagctcaatgagctttattgaaatgtaaagaagagagaaaggtgaaagctttaggttgtcttcaagagcaaaatagatttggatttgatttcatacaatagagaagagagaaatagctaacaagagagaaactgattccaggtccaaactagagaaaaatgaactcaaaatagatcagatcaaatagtagtaccatcaaagaagaagaataaatagagtataccttggagaagattactgcctgccatttctgataaaggacgattcctctgtctctgtggtatgtggatatgtgatgaatgaatgacgcaaacaagaattatggagagagagaaaggaagaagaagaagaagattttgtgtttataaaatggttttgacattccccgaagatgttaaggacatatgaactgctcggaccaagataactccagatcatcttcagggtctcagatccatcttctcgctaagcaaatcaacagttccactggtactagagcgattgattcaaacctaacacttatgacttaagaacaacaacgcgagtaggaaactgattttgagactgtgacacagaggttttaattgagaagaaaaataatctacgaggaggtcaatgccgtacgacaagtgagaagacgcgttaactttaaaggaatatttggactctttcttttttttttatctccatggcatgaagaaaccacgagtcttggatttgttggtttcaactttttttatacaaaaacaatttcctttgctttatgaaaaaaaacaataataaggaaagtaaatatgatttcgaaaatgccagaaagtaattgtttttaaaaatgaaaatgggccgttcaacatctcaaaggcccaaattttgccgatataaaaaagattgggaacaacacttttaaacatattaaggagagacctattcgtgtggccaaacaccagaatatcgccaaaatcgttgaaacttgaacgaagaaacagacttgtcacagctcagccgccggaagactttaaggtaacgaatcttccattaaccgtccctcgtagatttatttctacaattgataatgcttattagtttgttgtctacttaaattccctattggtgaaaccccagaatcgtcaagtagcttttttatcgattcaatagctccaacacagcttttgtatgtttaaaactagcttatgttttttacttgattccgagagaaacaagtactaatgcactagtttcttaattcacttttagattcccaaaatttgttactatgttattttcttatcagaacactgattttagttaccacattgattcaacattgtttgagttaatgatagttgtgaattttgtttgctaattcttgtaggaggtatggatttggtgtggttattaagtgttttacttgttggagctgcacttggatattacatcagcactttacgacaaacccgccgaatctttctctcctccaaatctgtcgccatagatgcaggatccagcgggaataagaaaaccaagtccaaggaacccctcgagatagagaaactcgctgattttcgcaaaaatttcaaaatggtacctagcctcactctgcctccttgtctttgtattgcaccaagataccagtagctgatataaatgcttcttgttgttgttgttgttgtctgtgtaggttttggttgtgaggaatgatcttaaaatgggtaaagggaagattgcagctcaatgcaggtgattatcaatcctctttcagttttcaattgcatttcttgaattcaattaacaactccttttctcttgttttgcatattatatgtagtcatgcaactttaggtttatacaagaaactccttcaacgggcgccaaaagccttgaacaggtaggtatgcggtatgccacaccatctcatactctacttcaattctatgtttctttttcaggctacggatggaattaacagttacttattgctcttgcagatgggaatattgtgctcagccaaaagttgttgtcaaaattgaaagtgaggaagagatgctagttttgcaagtgagtttactgaacatgtgctacgtaaatatacttgccctttgcaagattgcagtttcctaggtattgaataagagaagaagaaaaagtcataagatcctcctatgtgaagagtgtaacaatcttgttgataccgacaggaaagagcaaagaccctgaaactgccaacccatatcaccattgatgcgggaaaaacacagatcgctccaagtgagtttctatagttactgttatttggaatcctcctgcttaaccctagtctgacattaatagaaaaacttaatatgcctacttgttctcttcttttccagattcaaggacagtaatggctattcttggtaagttattatcatctatgagaagagatgagttatatcacaaattgtagttacaagtgcaattgtttaataagtctattacttgtgcaggacctgttgataatgttgatgaagtaacaggtggactaaagcttatgtaataactcttggattcgacattaccaacactctggcagaaaggagagcatgctaattggctcccaagttttcgacatttctcggtgacaaatctgttttcccttcttctgagtagataactccattttacatggatttgtacaattgtcttactagaagataatcatatgacaacatttgctgattatccacaacattttaaagatgaagttttgatgctctcctttgttttgtctattgtatctataaactgaagcgtttaagctacgaattgattttgactgattttgtcctaaggagagtctaattcctgcgcaacagctaatcaaaatatacagcataagtgtttcacttcttgctatagttagtggtcgtttgctaaaatagtattgatgtcactgtatatcgtgctaccaattactatatatttccgggaatactgcttgtaatatccatttcaaatgtttgtttattctgagttctagcatttagcatagtcaatgaatgcgtatacactcaaagattgttagttgttagcaacatgtgggctaaatctatgtaactcgtgcaggactggttgaagaagacatgtgggctaaatctatgtaataactcttggattcacaaatcatttgacatatctcggtgacaaatttgttttcccttctccttaaccattattggggatcgttttcgaatttacatgaatttgtgcaattgtcttactagaagatcataatcatacgatatttgctgattatcccccatacatataaagataaagagtcagttttgatgctttcttttgttttgcatattgagagacctttatctccataaactaaagtggctaaagcgacgggtggagaagtgactcacacgcatagcaaagttttcttgccctaaaaccaacaatgatagctttctcttcaagctatcaaaatttcatcaaagaataatatgaaacaataaataacacacattttccatggaatcgcacctacacacatatacttccaaatgtctttgatttgaggatgaagccaaaaaaacaaaacacaagtatttcaaactatgtatatatatacctttctttcttcaaccccaagcattatcaaacgcagctgaagtaatcgcttgaacaaactcttggaaatcaatacaaccatcgccgtctcgatcagcttctttgatcattcccgttaactcctccgccgtcaacgcgtgacctagcttcgccatcgaatgggctaactccgccgccgttatgtaaccgtttccatcgcggtcaaacattctaaagatggctttaagctgatcatccgtgtaaggacacttgaccagatctggctcgacgagggcgacgaactcggagaactcgaccagtccgttgttattccgatctgctttctggatcaatgtgtcgagttggtcttgactcggctttagaccgagagatcttagaagtgagcctaactcgagctccgtcaaacttccatccttgttctggtcaaatgatcggaatatctcccggagctccgctagttgttcgtcgcctagtttcgccggcgccggtttgcctccgtcgcagctcatctcgaatctgattttgaatactgtcaagcttcgatttcgatgaacaacatttttctttttagagttgatttgtttcttcttgacaagtcaacgatgacaggtaatggattacaaatttcaaacgagtaaagattttgattttcttattaatgagcaagagaataaaaattttattttatttaaatcaaataaatgattgtggatggaatacgaaattttttaaattaaattattaattgaaccaattattggaacggtcaaaggttgttcggtggagggaaaacagtcgtgctaagcgttaattcaccggaactggtttgtagaaatggatgccaaaagatttcttgacaatagaaaaatgttatagctttgattcgtattttaaagaagataatattttcgacatttgttagctatatatgaatcgagtgttcgacatacgttatatattgcatgcatgaatgttcaaattttctttcagagtaactattttatccttaatatatggtctttatcaattcttttaacaaattacatgtttattaatgttcatatcctcttttaaagcaatatatccatgagatatctgtgaaatttatcatatgtaaaatatttatatagttttcagaaatagatatatatcatataagctatataaattacaactaatggtaatatcatatgtaatgttgtatgtaatgttaaaagcaagtttaagattgatacaaacgacaaatggatctggttcggttgcagtttcagagcttaacatatgcatgtacatacactttgattccgtgtaatcaatgacttgatccttttaaaccactttgttactatatccacacgacacacgttcttcctttttactctctctttagatgatttcctttagacgaaattggaacattagttttactcaagaaactaaaagtgaaggactgataaaaaaacactaaagcaggtaagatttggccacaggttaaccaaaatgccaatttttgcacttaatgtaacaaaaataaacaaggatctctaaagacatacacaagaacagaagaatatctctcactttgaagcatctccttttcattctgtcagtaacaaacaaagatattgcaatgcaaaaatcttttaaggcaatatttctcttattttattatacattgacaagaattagagttacaacagtttgatacatacatacatagtacctcctttggtcatattctttttgttgttgcggctccacaaaatcttaacccatctgcgataacaagacaaagacgaggggtttggttttgcacaaaatttaaattttggaaagtgtgtggtttataacatatcaatatagatagactgattacctcgtgaggaaagattgtggcctgtggcaatctcattttctgagagcatctgatgtgagaagtcccatctgttcagtaagatggttcatttgttgattcttgctccacacattactcagggttgattgtaactctagttgctccaatatcagttcattttccactgatcctgagattaactcatctgtctcaccaatcactgggctctcaccaatgaactgttcccaaaaagaatcttggacttcaggaagcaactcatttaaggtatcagcttctagttcgagtgcgccatccaaaacagccattattggatccaaacactctccattatctgtctcgcatccaacaagatccgaacttgagctcccagaagctgctgctccttgcgttggaggtaagagatcaccttgagaaaaaggcaaattggtctccatgacttgatttgtttcacaaggctcgtggtacttcattgcaggatagaagcctgcaggaatggatgaaacatctgccaatgtaacttcaggtgatccatttgaggagctcccattgtctgaaatgttagaatttggaacatcgcccaaaagaaagctaccattattgcttgagagagattcatggctaggtgcattactcatctgctgtatctgttgaagcatagtgtttgttgcatcgttcatcgatgactgatatctcacaatctggcggctaagaccattaaccccatgactgccagaattcatctggtcctcaacaggtagcctcctctttttgttgctttcagaaatgtgttggtttgcttcattactctgctgagaaaattggtttaagaaacctggactttggacagcctttgctagaaaggacatcatctgttgctgcctctgctccatcacatgaactttctgccccacattctgcagatgatgttcggtaacttgttgttgctgcctcaaccttacaagttcctgcataaggacgttcttatcgcgctgaagtctttccacttcctcttcgagtccaaatttgcccacttcaacgcacgcacccacagatgagtgctgaacttgaggttgttgtggaggctgcacttgtgcaggttttcgccggacaatactctttagtatttgcttttggcctcttaaaaagccctcgtttgcaaactcccagcggtctggatcaacttttctaaaaccctgaaaaaaagaagcatggagaatggaacagtcatcaaccgcaagaagttacttggattccgttgcaataggaagccaacatagaagatttgtataaacataaagaccattaaatacgttaataacaactattctagatatggtatgatacgttcactgggtctagctgcagcaccaaactaccatggtccaaggaaactaatacagttgttagtgtatcggcatgtacctggacggacaaatacaaacgaatggaaagctaacatgggacaactgatagaaattttgttttgtgacttaagaggccagaaatggaagtgctgaatcaaccaatcgtcagacacatatgagcacatgtccaaataagcctgcaaagttcgtggaaccttttggtaagtaaataagaacaggggaggaacaagctacgcaagagtatacacttgttagttttgcttgacctaagaaaattcattccagcctcacagacacggatgcaagctcagatacttagaaaaacaaaaacatatatgcctgcagttcacagggtatacatgtacaaaaaacaactgaagaacaatacaaatatgtgaaattatcttgcacgagtttgtcagaacccaaaaagatccaatcttaacagttagtgcaactaaaatcaacattaacacaacctactagacgtgcatagttcaaccaccagcgtcaacaactatataggaacatcaatcagtagcatcatactatacactaaataggagtcgacttctcaaagcaccttcttgcaaccttaaatcattcgtgagttttatcaataactaatgcttaattcaaccacaaaaaaaacaagagagtaaaataaaaatgaagcacataaagtaagattccctaaaatcgaactacgaaattgaagaaaatcgaatcaatgaagagaaaaacaaataaaaaagaatcgatcgaagttcactcacataagtattgagctgtctgacgaagctggagaaattgttgtgcttgaaatactttggtagaaactgtttggcgaactcaggcacgttccaaaccacgaagctgttgtttccgctgctccaagacaccacgtcgtccgtcaatggatcgtcaaccatatcgtacgttttgctcagaaaaggcggaatggagctcatcaccgccgtcgaagatttcgccgtcgctacagattcgcaaaccgttcccataaatcaaaatcgcaattgattccggtgtaccgtcttcttcaacaattccgagattcactactccggtcttcgcaaaccttacagagatttatattcgaagatcatctcttagcgacgaagagaagaagaaagaagctctctctctctctgtctacacttatattaaactctggagatagcttttacctctgctcttttatttatacactctgatttttttaattccagaaagcggtggagtttcgcagagtgatataacgtgtcgtaatctctaccgttgatctgattacctctgcaacgtccgattattaaattaaaaaattagttttgttgttaagataagaaataccacgtgggctggactaacgtgcttggcctttttaaaaaaacattaattaacgtacgtacctggtctttttctgattaacgtatctggtcctaagctctttttttcatacgtggcactggactcgcgttacttttctcaattttttccatttgcgtttcacgtttttttttggataattttctgctactcaaagttttgttgttacgaaaacgttgagtctctctctctctgcttgccgccgagacggccaataattttttttttaagacaatatttataaatctgaaataaacatcgatccagatttgtggattatagaaatcttatcaaattttataagattatttctttctatgatatctaacggctcatcatgtaagactaatctaaatttgtaacgaagaaaagtggaaaacacataacaagtgtattggcccgcctaatcgagttaatagggcaaggaaattctcctttactgcctaactcttctccagtttgatttttattttttgttgtggaggggaatattttaaggttctcttaccatagtacagacttataacgaataataataaaaagcagattatgaatcgaaagtacgaattttttcaaatccatttttttcagatagaaaaaacagtacgaatttttattgttaaaaatggttatattattgaaaatggaacaatttttcatttaagagaatcgaatattccattcataaatagtacattagtactctccttctaaaagaggcacgtgattggttgtcgcaaagcacacgagccaagatgcttcacttggaacgagaaaaagccccaagagacagaggagagggcaaagcaagcaagcacctttttctttcccatgctcgaaactcggttcttgattgattccttcgccgaagattaaccaatcaaatccaaacaaacccactcagatccagattcgttaaatctatccggatccatttacttcaacgggtcggatccagtgatctggcacttcacaatgggaagtggcttttctggttcttcggataccaaacaatgtcgcgatttcctcgaagattcatagatgattcatcaatggaagatgcaggaatctctctttgcccaagtattcactatagacctataaaccctaatgatctagatcgtttggagcaaatccatcgcgatatcttccccatcaagtatgcatccatctacttggattttcctatgttggtgtcttgtgaaaagatttctaaagtattgatttttgttttgtcaggtatgagtctgagtttttccagagtgttgtgaacggagttgatatcgtctcatgggctgctgttgatcggagccggcctgatgatcactctgatgaacttattggttttgttactgccaaatttgtgcttgccaaagatagcgaggttagttttcattctatgaattcgtctttttgtaattcgaacaataatgatctttcaggtcctgtaatcaccttgaatgttgaactagttcataatgcttatggtttttggttcgtctgtgatcatgtacactaaataaaagttatttcacttgtcaaaaatctttagaacagcggcttgtaataatgtctgaattatgattgaataatctgttttgggagctctggtaatgcaattgagtctagtgttgtttttatcttcttattatctatcttcatcagctggcagatggtttctgtgtcttgcacagatagatgatcttatacattacgattcctcgaaaggagaggagactttgatatacatcttgacactcggagttgtagaaacatacagaaaccgtggaatcggtacatgactcttataatactaataagtatctgaaacatgttctatatattgcttggttttataatttctgatgtttctgcaactttttttaactctcagcaatgtcacttattagtgaggtaattaaatatgcttccggtttatctgtgtgtcgcggagtttaccttcatgtgattgcacacaacaatgctgcgatctgtttgtacaaaagattgatgttcagatgcgtgcggagattacatggattttatctaatcaatcgacatcattttgatgcgttcttgtttgtctacttcatcaacggttctcgaactccttgctcacccttgtaaggagatttactcacagacaaaacaagtctttgattctcttgtactctataatggtttacaacaatttactgtaatttgcagagaggtggcgatgtttgttgtgaattatatgaagagtggtatcaagtcagtggcatctaagctggctaacaaggatgagaaaggtttgaaatggctgttttgcaaagacacggattgtgtctaaccctcgcaaaccaaaccgaagctagggtcatcatcagcgtacgaattcatttaacttaaaactatatttcccattcatttgatttctcattgtgaactctgtaatgaaaaggtaaatagtcaccgttaatgtactgttttttgggttttatacgctgatcattacgtgtttataaggtgtaaggaagttcttatgagtttttcaccacccttcttaaaatagttagcttggttgaaaatagctcttttgcttcattggcaattatccaaaaacaaaatcaccagcttaggatgtcaaaaaataggttaaacgataattttatttacttccctcaaaaaagcctgagaaaatccccatcaaaggccaaaagaacagaaaaaagtttttttcacgcggtggcaatggcaatggcgtctgcttcttcctcctcctcctccatatccgtcatcattttcctcctcttggcgcctctctgcctttcacgtgagccaccttcacaaatcccaaacggaaccctagatctctctttactatggtacggccaattcacgcctactcaaaaggagagggttcacgatttcatagaatcgcttaacttcgacgccaaggaaggtcttgacccgaaggtatcggcgtggtggaaagtggtggagagttaccaagagaggtttgaggtgaaggatatttaccgacagaagaagagtaacagaaccgtagctccgaggattaaggtgaaggttgtccggagttatgtggatgagaagatgaagtatggaaaggaattgacaatggggaacggtgagaaacttgttgagacggctatcggaaatatgtcgaaagtggttcccgtggtattactttcggcgcaagttagggctcatggcgtagggttttgtgacggaacttgccaacataacgccctagccaaaattaaaggtttgattttctcttcgttttttttttccgtctacatctctcagatttaaacctggattaatatggcaccgtgagagatcgacactagtacaataaatatattttaagtatgtcttgattttctcctcgttaaattgcataacattaatctattttacccttgagaaaaagattattggttctacataattttgtagcttttttagtttgttctaaaagattgtagtattagacaacaaacaaaagaaaaatttgacgtcattacgtaaatcccacgcaggtcaaaaagaaccacgacggtacataatggtaagcaacccggaggtggaatgtcccggagagtgcgcttggcctttccacacggccgataagggtccacgtggcatgacctatcaaccggcaagtggagaagtcggagctgacgcactggttattcagctagccaccggtttagccgatttggccaccaatccagatctaaccaagtccttattcaaatctgagacgacaccgtacaacgatgacgtaaagaaaaaccatgaatcttcgtcaatgtatattgtggaccctgcaaccaagtgcactcgggtttttggatccggagcttttccaggtttcactggtagaattcgggttgacccgattactggtggagcctttaattcacacggaatcaaccacttgaaattcttgattccttctatttgggaccctaagaccaaatcttgctggactcctatgtaaaccgttattattacgacatgttacacagtttttacccttcatgaacttttaaggttgttttgttattggaaatattcaatatacttggaaatacttcatgaacttctagttccaagtcttcatgaactagactttgaacgatcctcgtgtaaattaaattctgtgagaaagaaaatccatgatttagcagataatactacagtatttgacaacaacaacaacaaaatgttgataagtaagaaaataaagctcgaagatttgtaactattcatgattttagaaaatcggaataatgaatagtgtacttatttggacactgaataagaagttacacaagtcccgattgaaatttaatttactaatgatcgttacaaaattatttgtctctttgtcatcaatcctgttagtgaatattagaattattattcattgtaaacaaataggatcatccagattgagaagtaaataattttatgtatgttacaaatgaaataattaattgatcgtaaaacctctctgaccttatatatatcgagtctcactattcaactttttcattgcacttgtcgtacaaaggagtaaacattgatatgggaaaggtatgtgcattcctgtctttggtaattccagtaatttgttaagtaaattatgtgaacttatattttgtgttttggatttggttctaaagaacaagcaaaatggagaatcagacaacaagtctgaaaagaagaaccagaaaaatggagattcatcagtcgataagtctgataagaaaaatcaatgtaaagaaattgttctgaaggtttacatgcactgtgaaggatgtgcatcacaagtttctcattgcttgaggggctatgatggtaatactctattaaaagaaacattattagattactttccctctttaatggaatcatatatatatggtctcgatcataagaatcaatgtcaaatatttaatcatttatcattgagtgaaattgtactataatttaacttaagcattatctagtctggtttcagttttatttttctttcctgtaatctagagaagttgtctattaattcccacaatgacataacgaatagtaatctctagttcttaaagcatcaattaaaaaataggattaccgtttttttcttcttactcatgactcataagtagctattatcttatttgtcttataggggttgagcatattaagacagagataggagacaataaagttgttgtgtctggaaaatttgatgatccgttgaagatattacgaagagtgcaaaagaaatttagtagaaatgctgagatgatttccccaaaacataaccctaaacaagatcagaaggagccacagcaaaagaaagaagtaagttatttccaattatttcgtgttagaacttagatatatactctcatttatatcataccttgtctaattaatctgagaataacaactaacatatctaatcatttctaaatattttttgcatgattttagagtgctcccgagatcaaaactgcaattttaagaatgaacatgcactgtgaaggatgtgttcatgaaatcaaaagaggcattgaaaaaataaaaggtaatctttgtatatacatatagaaataatacgatatcgaaagttaaaaaaaacaacttagaatatgtttgtttgttttgacaaattaaaaggcattcaatcggtggaaccagaccggtcaaagtcaacggtagtggtacgaggagtcatggatcctccaaaacttgtggagaaaatcaagaaaaaacttgggaaacatgcagagcttctaagtcaaattacagagaaaggcaaagacaataataagaagaacaataataagaaggaagaaagtgatggaaacaaaatctttagttaccctcctcagtattcatctcaacatgcttatccctctcagatttttagcgacgaaaatgtacattcttgttcaatcatgtgattttttgacccgtaaaattagagtctttttaagttatcttttatggttttgatttccttgctacacatttctatatctcaatagattttaatttaatttaatttttgagtgacactttatgaaagtaagatttggtgtcatgtgtatactcgattactagattatgtttgtagttgtgggccttttgtacaattatttgtaaaaaaaaattaacagggcattagagtataaaaaaaaagaatgtgggtatatattatattttaataacttagggtctattttgtaatataatataagttgagagtacttgttgcatttaacccaaaaagaaaaagacaagggaggacgaagatgaattgtctcaatttttagggttcatcaaaatttgaacaaaagggacctgttttgctcaatttttgatagcagaagacgaatctggatctggggtcacttcaagtaagtaaagagttaaccttttgcttttttttgtaccataaattgtgttcgaatggtacgattgagaaattgcttacgaatcaatgaaataacagttaagattttgatgatgaatgctcatgaaaatctatttaagtttgattgagaaattgaagaagagaataagaaatcgagagatttattgcgtaaatggtaatactttatgtttcagttctgctatttagatccaagcttgaatatgtatcccttagctttatttctgtaggttaagattgtttggttgttgaatgttctttgtttgtgcattgcctttgcaggattgaattaagaggtttttaagtaagttgagatgtcagttaaagcaaggagaatttctggtagattagagactgtagtaactaaggttaattatgcatttgatcctgttgacgatgacaaaatcataagaaaccggcttctaacccgaaccacgaccactcgaggcgagcctccattgaagaaacttcagaagaagttcacttcttttgtactcgaggtggataaagaagaagagaactataacgactgcggtagacttgccaaagcttttttacaggaactgtcaactttcgagattccgcttctgaagagccaagcggttgtggaagcaaaccttagggagaaagagagctttaatgaggtgaaagatgagacggaaaggcagataatgcaggcgaaagctgagattgaagatctaaagaagcagcttgaggagagtaaaatagatagacagcataaagaagagtgtgagacgataaggaaactgatttctgcgcaaccgccaaggtcagagacagagaaggttatatatgaattgaacaaggagattgctgagcttgaagcagagagcactgcaagttggagattgcttgagctaaggaagaagcagtttgctctcctgatgcatgtggtaatgtcaaaaaaccgaaccttttacgtttcagtcttcattacgtgatctatgtttgaagtttgagtttgtgattgtgaacgtttttgggaatgtaggtggatgagttgcagaacacaatggaagatgagcagaagagtttggtggacgagattcggtcagcgtcggaagatcagaggaacataaccgacgctatgtctgttgattaagtccaaatctcgataaaacctgcatcatgtttcaagcgtttgctttgtcatctgtttcctgtttctgatatgcctatgttaaccaaaactgcggcagctcagtatactgaaacctgtgattcggatagaagaactgagaaacaaagattgtttctttcaaatttgcagatgcaagaaagattgtatcattgtaaaatgcagatgtttaagaaattatggtttgtataaccggttaagaaataccaatttcttggtaatgtacttttttactccaaaccgaggctgaactgttgattcaattaaaccgaggtggtttactataaattaattacgtcgtgacgggtttgcttttgaaccggcttagaaattagaaattaaacagtgttccgcttttgacttggttcgataggtttgggttgcccgatcatatttatggttttgcatttgaggtttttgtgtgttttagatgtagtctaatttgcccccaaaaaaaaaaaatgtagtctaattttggttggtgcggtttctattttcggtgtcgagaataatttttacaagtgtgattgcataatgaatatttcatgcaaatcgatatccacaagcaaagcttaatgttgatttttggcaatatttaattattaataaaaaataataatgcgaccgactagccaaataggctttattgtcgtaattgtaggtttctattttcttgagaaatatttgagcagcattagtgttcgtatgttaacacacgtttctccgttattttacttgagtctctcctgtcttaatcttaaacactaaaaattaactttgagtgtttaatttacactagaaattctaatgttatctttttgctttgactctaaagactaaagttatactttagattagacatacgaatatattccaaaaatattccaccttaccattaaaagaaggtggcatcttttgagaaaatgtgatccactgatgatgcaatgtgtctattttaaactgaatcaaacagaaaagcaaagtatttaactatataaattttgtttgattaactcggatagaaatccagtgattccgaacttaagccaaactcaatttaacttcgaattgtttctcatgagagcatctttgtagtttttaatctatataattgcgatcgatttcaatgatacaaattagttctaattcattttaatcatatgaattcatcatattaggttaaattttgatgtgtccacattgaacacgtttagcatacagtatttgtcttgtttgttccgcattatttcaccacagttttaaatatatatatatataaatatttggtatgtatttgttttaaaatcgaaatgatgttgagactataaatcttgcttgtgaattgtgatataatgacgtttaagatgtacaatgacgttttaaatgctaccatctgtttactatacatctcttttgtctcctttaaaagtcaaacaaaaataagattgtgtcactttcgagactcttattagttcacttcttcttaaccatccccaactaaatttgaattcttaagatattattgaaaaacaaaaacaaaaagataatacctaagtttaaactgaaaaatatattcttaaccaattttgagtcatgaattaattttcttatatataatgataatcagttttgtacagtatcaatgtgtttgtatacatggttggaaaataattaagacacaaattgtatgaaagttaattaacaacgtatatgtatatatctatatccacagaaaaaaataagactaatgttttactttcatctctattcacgaaatggccaaggctccgaacaagtttgcctgcggagagaacaaccaaaaaaacaaataagagttcgtcaaaattcaagatttaagaaaaaaatatatatatatgtgatctctaacttactctatgatctctttccaataagaatcacttgcttcatcatcaattatgtcacaccatggctggtgatcttgtgtaaaagttgaggtcgacgaagggtttgaagtatgatcattatacttcatgatttccttgttcttgaccatcatttgggtttccttagactcatcaggagatgtcgaaatcaagggcggaataaaattctgatcatgttgataagcaactactcgaatcgggctagaaaacgaatccagaggctgatcgtcaatgtgagagaggccttgggtttgatcataaggattttcaatatttggtaggttctctaagaaagaagattggccaaagagattattggttgtgtgatgaatgtcaaaggaagaagaggtattgttgttgctaaggacttgaatcatactatgtaacagttgggctttcgcaacacttgttgcatccaattgtatattttgatttagattcaagaggttgttgaaatttgcggcagctagtagttgcgggagagcggctagaacgtttagatggtcggttcttggcctatgggtcaccggatcgattcccatctgaataagtttctttctaatatgcgtgttccaatagttctttatttcgttatccgttcttcctgggagatgaccagctatagacgaccacctttagaaaatatggacaaaaatatgttttttggtgggttagttaagctttatactattatataacattgtcaagctctaataagataactaattatagacttggtagtatcgaacattgacgagtacgtatgcatgtaccaagaaaactccagtgtagcaggttattcatataaatgcgtctatacctcaactaacaaaaaaataaattataatagcatatataaaaatatatacttttagactatatatatgtgatctataaataagaccgactgaaaaagagactaagatattagaaattttaaattttaatctgtatttaataaaagaaatgtttcttttttgcctagaacctatctaatcaaacattaccatcctgtagttaaattttcttcttcttgaatttttttatcaaaatgaaattctaaagtgttagcaaaaaagttctattaaaatcactaataataaaaagcagtaaaaaattctatagcacaataatattgattaattaatagaaaatattgatgtgttttctgatttttgctcttgatgataatctcacatatatataatttataattaatcaaagtaagtaagggaatttaagaagaaataaattaagattgattacttgttcccaagaagagaatgaaggttaatgatagtttgttcttcctcagctgtgaagtttcctcttttgatatctggtctcaagtaattagtccatctcaatctgcaactcttcccacaccggtttaaaccggcttgcttgggtagagctctccagcttccatggccgtgttttcttatgtgatttatcagtttctgatcttcttctggcgtccatggccctttctttaatccgctctcatcgcaacacggtgatctccccattttgttataacatctagctattaaatgtacctggacaaaaagttaacaaaagaaaagagaaaataatggggtttaatcagaagcataatatatatatcctttgtgttttaacacacttttgctaagaaatcggatttctgatatacataggagattgttgagtgagcatacaatacatatacatatatataaaaatatataatatatacctttgaggttagagatataatcgagaagagagaaaaatggtgaaggcaagatcttagttaacaaaggctaagtgtttttgttctttgctttatttatagaaacatagaagaggctttcgtctcggtcttgtgtcttgtcggaacaagatcttagttagctcttctgacgtgtccatttgactttaatcacatcaaataagtgaaatgatgaatttgccctttgatgaaactagaagaaaaatgatgagaggagaaggagatgttcaagtttgcgaagcaatgtgtggaataaaagttgctgcaactaattcatgttgacaatgtaagtgtctcaaacttttgaaaagtatgtataaaaagttagttacttacaagagctaaatgctcaaagaatcatagaatataactcacgtattagcttcaactacggttccagtaaatatttaaaactacaggaaacctttatatatacattaataaatttgtaaaatgcagcataatttttagttgttgtctcaccagtccaattcagcccggacattaatatatgttactgataaataatcgttagtctatagattggttataatacatatggattttgagctgtgatcgtatatatgcttatggaagattgtattctatgcagataattatgtagaataacttataatgttaagttggcaaaacatatttcccaagagatatagacagtgcctataatatatggattactgctcactggtcaactaatgacacatctcaaccatatacacatcagatcaaaatgaaagtcaaactgtataattgaaccgcgttcgaatacaatcaataaactaaatatattttcttagtttatgaaaagatacctcttctctatcaacttcatactactacgtacgtagtaacgtagatatacttaacagaatctgtttttttcacacacattagaaaaaagtagatgatcttgtatatttatctttcgcaaaaaaattaccgtttatcattttcaagtagaacttagcacttgtttagattgaattcacttcattcaaaacgataaaaatagatattcaattaaaaaaaaagtttttcattatttagtaattgttattcacaacttagcaattgtttagtttgaaaacgttttttaaatcaaggtctcgatatggttgttcattattggtataaatctagttttaagcacattaagacacgcaaactattttgtttgagatcacaaacccatgggaccctccaaaaccctaatacttttaactactgatttttttatcttaatctttctacgtggcttttgtatgtattgctgacatcattttataatatgttatgaacaaacgttaagacatccataacacatacatgatagaattattaaatacaattcaacttagaaatctcaattagtttaattttcttatcattgaagcgagaagaaagtaagaattgtgcatagaagtttccaactaatccgaacgcgacagctttcccatttcccgcaattgatatccctacagccaatcacactttataattcgtcttcggtcttacctagctaattaaggacataatcttgactaaaattttgctgataaagtgcaatatatacggtgcttaacaaagttacaagtataaaatttacatatgcaatggttttaatatgtaatcgatcgataagattttaatgttgaaagacgaaactcgtaagcaagatttcaagctacatatatctttcataacaagaatatccctttcttattctcaaataaaaaaacttcttaacagaattaatgctacaaaaaaatctactaaaattaagacaacgacaaaactaaattatcctaatctatagaatcattttctctataatgcacaaccaaacgccacaaaattataaatacggacgttaatcctttttatgtgttttaatatacatacatgtacacggcaagtataacagaatcaagtataatttgtgtattattatatacgtacacatttaattaaaacatcaatatttgctaaaagacaaaaagaaagaatacactcacgcaagccaaaacctgattgtatgttgctacttgctataatactcgtagttaccagagcataacacaacataacttaaatagtaattaattaacttaattatctcttacgagccatgcaatgtacgtaacgttacgtacgtttggaattagagaaagaaaattttcatgcactgtcactagtggacgaaaccagatttaatcttatgatgcttatgtctcttattcaaatatatagcaatacattctcaaattattctattaacttgtttatgagttctggcgttctgctattaatcacccgcaattaggtttttagtctccatgataaaagaatgcaaaaaccactaagacatgaatgcaaaacatttactacatacctggagttataatctatcgaccatctagagcctagaggttatcatttttgttcgatttaacctacccaaaaacagtacagatcagaaacaaacctagccgaaacagagcatatactttggaatcatatacatttatgtatctgattcagttacgcaatttcaaagataatttggtccaattttattgttatataagaaaaacaaatcccgcaaggtgtaaattaaacgtttgtcacgacgtaggctaaattaaagatgaatggaacagatgaacaatcatatctcttttaccttctacgtatactttagttagtaaacaaaggtttcgttaaactatagatttgtctatttttatgcaacgattttacccttttcgactttgttatccgttcgaaagtcaaagattatgaaagacaactgactttcttgcaatttctaaagctcaactttgactttatgggataggattaggaccatataaccgtgagattaaacttgttaattctgtccaaaagttacttaacgtgaaaaacttgcattgcaagatacctaccattttttgaagaaccaaaaataggtaaagcttttcttcattaatttctacacattcaaaatacagagaatcaagccaccagtttattgtaactaaccagttaatttaattagcaataatattgaaaccaaataaacgctttagtctagcgggcctgggcttgattgtttaagggttggcaacaatgaaatggcctggcccaatcatacttcggaatctataaataaataatctttcttcgcgtttgagaggccctttggacctagttatattagcaatgactaaaaaaaaaaaattgtcctcgaatttattattattgtaatgcaaaacgaaatcaattcccggatatacagtataacgaggaagaataaattcacaaacagattttgttgacaaaagtagttgaagaacagagtaagcaaaaaaaaaatcgaaagaagaaaagaatcataaaccaacaatttaagacaaacctatttcagaagccataaaccaaataagaacaaactaatgaagatatcaatcaatatggtgcaaagagatgtgtgtatatgtaatagctagattttgcaatacctcagaaagtgtagtaatcaagagatgctttcatttatttctgattcacgggtcctttcttcttgagaagattcccaactttaccaaacaatgtcttcttcttcttcttctctttctctttcaacagctcatcttctccggttaatccatttactggcgaggttttctggctttggtccaccacatttaagtcttcctcttcttcttttgcagactctttatgaaaaacttctttcttctcaatctgacaactttcccacattttgaattcaacttcaactgtctcatcctctggagaacgttctttcttttccttcttctcggtgtcctcctcaagtttcatgttcatgccatcgagggtctctactttagaagacttctcttctgcacttctataaccattttcctcagaaaactcaaccacctttggcagcaaatcatagtctttttcactctcactgagctcaccgttctcttcaatatgtttcttggccaatgcttcttcgagtaactccgatagttccttgatcttcttcagagaatcatcctgtttcactctgagttcatcgttctcatgaacaatgctttgaaactcagtttctttatccaacatcttcccctttagtttcaaggtttcagctttcgcttccctgagagtttcctgaagataaatcacctcatcttccacttctttaagacaatctctcatttgggattctttttcccatgatgcatcagcttcttcctttgtccttttaaccaaattgcccaacctattcatttctttccccattgaagaaacttcttcatcaaattccttcacgtgattcaccaaaccggcttctctcatctcccaatctaccattgcgctctcaaactgtttcttggtttgttctaccgcattgacaagaacatcgatctcatgtctcgcctcgtcaagcatgttctcgtacttgttgttcgttgctttaatcaccaacttcagatcttctatctgtgtttcataattttgatcacctcgactcagcaatttttctttcaactcacgtgattcacttgacacttcgtgcaatgctgaagctaaactctccattgctttcttactcttctcctcttcctccttcgagctctccagttctgacaagatcttctttttttcttccaagagcctttgcacacttgaagtagcatcttgctccttctttaaagcctgggttttctcttcattcacagtttcaagctcattcttcagtttctctgcttctttttcactcttagatgattcttcttctgcaatacctagcttctgttcagatttctcaagatcaaccttttgactagcaactgtcatctccaataactcaattttctccttaagatcagtaatttcagattccatatcgtgcaatctactattgcttacttccagctgctttgtcacagataccagagataccgaagcacatttctccagcttgttagcttcttccaaccgtttctccagttctttcgctttgttttgccactcgtcagcaaagccatgcgcataagattctgccatttttgcagcttctaagtcaacattaagctgctcaatgatcatctctagttccttgacctttgcttccaaacttctcgcattctcaaggtctctttttagatccactatctccgcccctagctttaaagcaatctcattcttggagatgatttccttctctcgagttgaatcaagcaaagccttcaaccgtattaactctgacgacaagatttcaactttctctgcatgaattgcagccatcttactagcatcatctgcacgacacaaagccttactcttggcatctttagcattagccaattcttgattgacattctccagctcctgtgttaccaaaagaagagtagctgattctgaagcatgttggttcttgacattctctagttctttcttcaactcttcttcttttctctgaaccgcctctatccctgcctcaacaacctcaaatttctcaatttcgaagttctccagggactttttctgagcttctaaagcctcatctagtttctcagatgcctcttcagcttctttccgcgcttctttaagttgatcaagtgctttagctttttcattctcgagcgatgctatcagctcattggctttctttaaatcttccttgatttgaactgactgaggttgcgattctgatactctcacagcccgtatttgagttttctgcaaacaatcataagacaacaaaacaatggatatcaacatttgcagcatagtgtgtcaaaactaaaccaagttaagaccaggcaaactattatgaacacacttacttctggtggggttggagctttgggggacctcttatcagtactaggctttgagttagaagaagggcgctcgaacgaaagccgtgactgttgttgagtcggtgaaggagaattagaatcaggtttagtcacaatccgagtgagtctaggcactcttagagatgttgaagatgatttcctcaaagtagtgtcagataaaccatttctgcttcagaaaacaacaaaggtctctcatcaagcaagcaaaacaaaacaaaacaaaacaaaacacgtgagaattgattacacttgccaaaatcattaaaaaaaaaaaactaagaactctgccatggagccttagattaactaaattataaagtagaagagaagacaaataaaaatcaacataaatacaacatcacaacaacaactaagaactctgcaatgaaattattattattttttatatataagtgaagctgcttgtaagattaaaaaaatcacagaaacaggaacaatcagacaaatgtgttacaaatagaatcactaaaaaccaggagattaaaccctaaacccaaacctagtcagatctaccacatcatcatagacaacctcaagatagacccagatcggaatttgaatcgacgaaatattccaccgacatcaaaaaaaggatcggagaatgaatcttaataaggaaaaagacacttacttaatcttagaagccatagtcacagcctctgtctcgttgctgcggatcagtgagaagtaaattacgttagaggaggcgaccaaggaaaaattgagacttgatatacattattaaattatggaacctggaaactcaaatttgctcgaactctaactgggttcccatttttagcgtagagatcaagatcaagagagagagagacaatgattcggattaaggaaacgactgatgaacctaacgtagaagaaaatgatactcctagttggtgaggttttgtctcacgagtggccacactccccaaaaagtgtcaaaatgcaaactataaaataaattaaatgaattaaaaaaaatccgattcggtttcctacgtgataaacgcaaacaataacacgactaaataatcgcttgaattatcatcataaaactaaaacgtgagattagggagattaaaagactagtcttccccatagctaatgcggaataatatctgtataccgttactataaatattcgatatgtaccaaacttttttgtttgtttttttctagtaacaaaaagaagagtatatatatgcaacttagggaaatttctgaaatatgtaaaagatactatttgattgattgataactaactttgttatacatcgcattcgcaatatcttgttgaatacaatatctctacgactctaccattaggcaaactttttatcgggcccagtggcccatatttattaaggtccatttattaaccgcaagaaggactgggagtctcaaagttgacctggctccttccataaaagcagtttagtaaataaatggactgtaatcagattgatatttgaaaaaaaatgcttctgaaaacaaaaattcacttggaaaactttaaaaattagtcgcgggaaaatgagagagatttttggcgggatctctatataattttccattagttattaattatttattttatgagagtaacttgagatttgagaataagaaaagttgaaatttgtaaaagatatgagaaattagtaaattccagaaacttattagaagcggcggatcgaattcgcgacgagcgttccattagggtttcgaatcaacatcaacaaacgacgagagaaaactttttaaaacatgtacggaggcgattttgacggcaacgctgctttcgccggcggcggcttcatgccttctcaggcgactacgcaagcccatgaatcctcatcttccctcaaggtttcctctctttctctctctaaattatcttctcaatttgaaaaaaaccctttccgcgttttgtgtaatccaagttctctcttatcatgcgaattttagttctgcctgctctctatacctaggtttatgtatctgattctcgtcgtttctcgggaatatctgctgcaaaaagttccattcgagttttctaggaaatgttacatggatgaaaagtatcgaagaacaaattgttgactagatattatctagaaatgtggattttatctgtgaattttgaatcttatcataattgtacgtttgtgaatctggatatagagatcacagatgagcaccattttacttgagcagtccagcaatgtatgagagtgttcaccactattttgcagaaccgcgatgtacgtaccttgcttcccctgacactgaagcagttgagcagcgcatcaaccactggcgaatcaaatttctctattgatggcgttgatattaaaactgtgagctcctttttatcttctgctgttaaaacttgtttgctgataatgttatgccttaagctctattgattcaagcatttgagctttggtgttatctgtgtataggttgtaatcgttggacggatttctagaatggagaacagaatcactcaggtcgattttgttgttgatgacggtacaggctgggttgattgtgtcagatggtaaatacttataatactaatgctaatacagcctcaatatgataatgctttcataaaagagctcaactatatctcttgctaattcatctgcaggtgtcacgctcggcaagaaactgaagaaatggaagcagtcaagtatgtttcttctgcacattcctagatctttagaatagtatatcaaaaatttgatagttcacatgtataacaggctgggaatgtatgttcgcttacatggacacctgaaaatttttcaagggaaacgatctgtgaatgttttttcagtcaggtttgttttcctgacatacttttctctatcagtctatgatatatgtggtcagcgaatcatttcctattagcctttctggatttgaaaattcttgtcgatctatgatattttttctcagtggctcaaaatgttacattttctattttgtgttctccaagtaaatgtatttgctgcatcttaaagatatatacttagtccaataatatgctttcaggcctgtcactgacttcaatgagattgtacaccactttaccgagtgtatgtatgtccacatgtacaacaccaagttacgggtattaccctatccttcaccgcttttttaatctttgttccacagcttaatacttctcatgttaggtactaacctctattactttagggtggttctattactcaagatactgctactcctaggccccaaatgccatattcaacaatgccaacccctgcaaagccctaccaaaccggtccatctaatcaggtattagacaaaatcaatctagaatttaattttacatgctcttttgtggtcctcttaagttactcacagaatctttttcagttcccgaaccaattcaatgattcaatgcatggtgtaaagcagacggtcttgaattacctgaatcaacctatgcacatgtaagttcatctaatatccccaaaagaacccaattaacttgtcatatatttcattcatttcatacagctttgaatactaatgatcaaactgcagttcatgaaataagcaaatcaacctctaaagtctctatgagccaaccttgactaaattttatgtaaaaatcattcaactatatcagccttgtggccgatgtttgagattatgttattgcagcagattgatgttcttgagtcagtgataagtgtattgccatatgaattcaacttctttcattggattctccttctctctcgctcatctaaaagcataacttgagtttgatatttggtgttgtatatgttggatctacatcagtgtatctgaagctggagttcactgtgatataattgcccgtgaactcaggattccgctgcttcaagtcaagtaaatctcctctcattcttactctctatctctatctccctcctatcactatttgataaagttacaatataaacaaagaaattttcttgacaagaacggctttgtctgtgtggcagggaagcgttagaacagctctcaaacgatggttgcatatactcgactttggacgagacatgcttcaaatcgactgctaacgcttgatgaaaattgatttatatgtcaacacatatcaatcctcctctcatgttcaaaagtcttttgtataggccctaaggtaggacaatatgtagttttaagactaaaaatctttcttatggcttttggatttttttaaagggaactaaactcaaaagttcaaaatcattttcgtcacttgatttccttttgttatatggttttgagagaattttattctttttagagtgattatttttctaccgaagcgaaaacacaacatctatctaagaactgcaaacatgggttaattaataaaccatttatcaaaatcatatggcttttggatttagactaaactcaaaagctttcctatggctttcggatttttaaaattcatttccgtcatttgattttgtttgttatgcttgccagttgctactgatggtgtcaattaggtcggcccgaattctaagtcccggtccaatctgaatattggtctgggcctttgatctttaccagagacattttgtttttgtttttgacgaatctaagaaagtaacaacttgaactagtaccaaaggtttaaacggcttgctctgcttaaaatgctctgattttttaagataaaaaattgtcaaacaaaaggttttggttttccgtttctgcattagtgacatgaccatggcagattatttcttgtcgatgtgaaatgttaggaatatatgatgtttttaataaatatgaaaatgcaaataattgagatactaaaaagaatatacaattagttacgagtgtaattctgtagcgtcctgaatctccttgagacgttacacttacacctatgttttgttagaaagatactaatgttgtattttcagttttgtgatatttgtttagtgattgattagtttgactaccgatctttgatcatatggcgatatttgttacttatatgatatagtaattttgttcacacttttttttgctagatacaaaggttaattagattctgtgatacgagatttaaaagcataattctcctgaatctaaagaccatggcctataaattaactggaaaattaaccataaactcaaaaacaacctaaaacttatttaagatgggaatcataagttttacacccaacaatctctctaatcaaatcgatacggagacgacggacggacggactggtgggacccttacaagttgtaaaactagtttgtgtttgtgtttttttttttgtttcttttgtcccgagaaaaaaacaaacaaacatagaaaagcgacgagcgggagagaccacgaaagaaataaaaatcaatcacatggagaagatacgaaaatacggatatgatccaagaagctaagatgctgaggcctatcattgcgtttcacatatccacgcgcttcgttttccgtgtacgcgccgaatgatcttcctctattcctcctccacagctcttcctcataactcttatgagcgtaatacgcctccaccacgcacgacgacggcgcctctgtttccagatctccttcttcttcttcttcttcctccgccgccgcgagacgtatcggttgccggatgtaatgaccgcgactgattccttcgagctcgtcgagacgagagagaccgcgaggagaaaccgcgtaaagctcgccgttgacgtgatagcccgatccaggtttgttgaggaggaaagggactcggtaaggtccacagacgagaggatatttgtctagagtttggtaaacacctttgaaagaagcgtcaccagatcggatcagatcttgcatcaggacatgatttgagaatcctctctttagagttccgtacgtgaacacgagcgttgttgttgccggcgtcattgtttcgtgtcccatgattgaacaagagaaattaaacgtagagattaatttggacggagaaagaagaagagatcaaacgtagaattgttttgtgtggttggtgaagaaaaaatagaatcagaatcggaaaaagagaaagagagagagagagataagagaaaatggaatctctgatttttagggctttgaatattttgggttaaaccgatgacgcgtttatatagcacttgatttcctctgctctgcatattattatttttttttcaaatctgtaataagttattattcaaatttataaattgtggttattacgtgtgaatgacaaaaaaaatgatgccccaagttgtaattttaaaggttccctttaaataattatgctgctattttagtattagaaaaaagtgaattaacgaaaaaaaatctgacgaggtccactcggctcactaatagtcaagtatagcaaacgtcgtataatatacatcatacattaatacaaacatataatatgataacgttgacaaaaaagaaagaggttcttttgtaaataaatttagattttacatatttttaagcaacttattagtatatatttggcgggcacatatataaaaacaaaaatagaacaataattggggtgagacgttggtgtgttttgggttacgtgtagacgtagactgtggcagcaccacacattacagccaagttgccattcttttaatagttttatttaacctttatttgctttcaaacaacagcaatatattaaaccaaatcaacatttttaaaatttgtagtatagtatcaaaatatatatatatggttattctttattttcgatgtttagaatctttgtgaattgtttgaatgttttgaaagtataagacgaagagatgaaagatgagaaaaaggcacgtaaatacttggggtgggttaacaaagcgaagacgaagagatgaaagatgaaagatgaagggaggatgattagacaacgacaaaaaaacagctaaagtaatttgttttggagttttgttccgtggctctagtacaattgcaccgtacttctttttacctgacctgaaaacattctgataaactttaaagtacagtattacttttaaaagctaaaaagtaatgcaaggagtagtacttttgtagaaagtaaatcaaaaagtactttttcttacacctttttttacacgacgcagcctagttgagtagagtaatccgaccgtaacctgattcttctgcaatttttcatttttattattattttgtttttaaatttttattttattttcttttaaaactcagtatatgaccatggtttacaaatttaccgcgtctaaacttttgtgtaaacctgccttaagtgaattttttaaaaatatattttttcatgtgaaaatcacaatggagaaaataaaaacggagtgttaactgtgaagcacattcaatggtggagaaaggacaaagcatgacatatgaaaacttttgagcacattcaatggacgcaagtgacgatgaacacaacaaaagttgctttagaaattagatacccttacattcattaatttactaatcaataaattccaaaaacatattctagaaattatacaacattatattatacccacacaaaaaaaaaggtttcagtggaaccatgattttaaactctctccttttcatagtaatatatatttttatatggataagaaccattaaacgagactatctttttttgttttatcggtgaccgaaaaaaacaacacaaaataattccatacaaagagatgtaagatatccattttgttgatacaaaacccacaacacagatggttgaagcttttattgttgtttcactttgatgtctactctaagtgtgtaacccatgaattaatacagtaaattcttaacccacaatatgtaaagctaagcattaaccagacaatgtttcttcttattgtaccatcaaatttctaagtatacaaacattctgcaaaagctgttatatcgtcgaatggggtagacatgaggtgtaccgctatattcccccgcctggtaattatccagggaggtggaacaataatgtcttcccgaatttcgaatcaatggttaaaaagagaatcggtttagcgataaacggagtaaaccagattagaaccttgctcatcggttgtgttattgccttctgccaattgttcaagatagataaaccgatagcatgaagagccaaccggctcactgtgtttgaccaaaccggttttccgttgatttcattgtttttcacttattaaatttgaaatttaatctcgattgatttagaatttgcatttatcttattgacattatcaatattgaaagattaagatttcgtatcgtgttctcttagtatagatagttttgttttggttcggtacgagttaatacgacgattgtctttttctttcaatatctaaaagtcagaaaagcccctaggaatagttccaacaaaaaaaccacagaaccaatggaaggcagttttgaattggtaaaatggagcagagcattacattcaatcatgcagtagcttctgcttctgcgtcggtttcaactgggacagacggcgaagaagtgttcttgctgctaccgcttcgacctcctttcagacgcgacgaaaccttgtcaatggcggaattgagttggccgattttctcattcaatatctctcttctctcctgttataaacatcaaacccatatttgtgtcttagttttagtatttttaacaatttcggtactaagtttttcttttatacctctaggccttcgtcatagtacatcggctgctccggtttcttgaaaccatattcattctcgctcagcactgatcttcggatctgaataaaaaaagcatgacagcatgtggaagtaagagatcacatgagaatatcatcccaagctcggaaagcaaagtcaacttaagaatttatattgttaatgttggtgatttcatttgcaagaacaaagctcagaatcatttaatcacctcaagaacaaaggtcagaattagtacttaatcatttggaaaagcaaagctcaaaatcttttaatccctccaagaacaaaactcagaattacttaatcattaggaagaacaaagctcagagatcttagaggaagaaataaaaccaagaataaacagctctaagtatgccttaagccaacataagatatgttagaattgaatagataaccgtagtttgttgttaatgttgttgatttcaagaaggacaaagctcgaaatcaactaaatcataacaagggtgaagggagttggtaaagatctaaagccaaaaatcataatctatgtctagttttctgttatagaaacaatgaaatggttttttaagaatgtacctgtggagcaaagatataagccagagttccgaacacagcacttcctagaagaaaaccggtaacaaaatcactacttccaccacccttacttcccccactgcaataatcaacacagtaaaactgtcaaatgtaacctagaagaggtttaatggcctatatatatatacagagagagaaatataccggtaacctgcagaaaccgagagtttgtgactgcggtttgattttgtttgaacagtcaatgtagagctcttgcgaatcgcattgaagtttcggtgtgctttgacatgagagtcacctgagccataaggtgtgaatcaagaagctgctttggttcagtttgagtaaactctgaaaatgcaagtgagttttcatatataaagtaatctaacgagatatggagaaaccctcaaatacacaggtctctaatcatatgttggtccgttatatcagtggattttcgtatttcctttacgtcgatttgctatatgttgaactagtttcagactatgaacaaactatgatctcgctaaaatgttaaatacctaacggaaattttgaatactaatcgaagatacgaggataaatttgaatgagtaagcaaatgcaaatcggcgaatctttctctctcgggttactcagaaatttgagttcaaaacgaagaagatagaggaagcaatgaactgaaaactggagaagagaaaaaagcgattgactacctgagaaagagataggagctgctaccaaggacgccattgtacatcaaaacgaacaagagatctgagaagagtaacatacaagaggaagacgaacacatacgccatttgtccaccagaagagttatctattttctaaaacatatcccttaagagttacttatttcccaaaatacactcaaggaattacttatttgctaaaacccttcctattatttgtaattcgcaaatatgacaccacaacatttcactttcgaatcaactgcttcgatgaaccgatgctatctcttcaatgaacaagattcataaacagaagagagaaaagaaattagccaaaacacactttagcttaagcagatcagtcaagtcaaccaaaatcaacatcttgtcatatgtcttttgcccatcgccgtaatatgtacaaacaaagctgtgattgggtcttcttcatgataacaaatgaatcaaaattaagagacactagtttggttactttttaagatatgtttcctatgaggacctgtcagggaagtctctaacgaaaaacaaacaagtattcacattctgcttcttcttgtgttcccatctagacgaatttccttgaagcaaatttatgaacagatgtatccctcctgacaatgctacatccagtttctactcctgtaactgtcttcagctttttattcgctggaccttcacacagcccttctttattcagatcatccacgttcactctctggttcatgtcggcggatttcactgtcccaggccctgtcaatgccaaaaacagacgattcgtgaacacagctaaaagtttttcctggtcagcgaaattattctcagagctcgttacagctgaaagcaaatccttttgattacctgccgtcttctcatacttcaactgtgggctaacacctatctctccttcctcagtttctacatccacttcaccttctccatatgaaacagagaatgcattctccttctcagtgccactgcacgctttaccctctttagcatcctcctcctgtttcatatccatgaatgcatcaatatttgcatgatgttaagatagacatagcaactgtctagaaaactcgaaactaaaacagacctgagagtaagattttttttaactagagcggaaaactgaatggccaatgtaaattcagagaagaaatgtataattagcagaggactagaagtctagaacaacccaccttcatacacgattgcattctgctcaatgtgcgatcagtcaaagactttttgttgcttggattctcatggcgaaaggtatcacgatttggcgaaacacaagatgccgggaggggtgtgttctttggtggattagagcaactctctttttttcctcggaatacaccccaaaggaaaaataacatgttccagcctgcaaacagaatcgatgtagcactaagcaatagactttctacaggttagatcaggccttacatttatacggaacgacacatcagtgaaacatttttgaaacttattagagagtgttttagcatgactaaagagccatatttgcttctcaatgggagaaatagatattaatttggtaagcaagcattgtaaagacagtgagattccaaaaacttcacatagaaagtttaatcgtaagaatctagttaacattcttacgctggcaatcttgaggaagctggttggacgcaaatatcaaaagctcaacgccctcgaggtttccctttagggctaaatctttctgaatcatgttatctaccagaggcttataatttttctcataactgtgtgtcacaataacatttaatatatttcgtcagtggattaggaaataaaacattgaaacgaccaaaaacagaataagcatgtgaaacaaaacacaattatatacagttacctctcgatgtccttggcaaagaagaaaagagccacatgctgttccttagcacctgtatcttgaaactgtgcaggccatgaactaagcctgggtacttcattcaaggtgactttttcaggaaattgtttcaccacttcaaccaccttaggtgaagctaaggttgaaagatacgcttgtattccactatgcattgctgacaaatttctgcttttctgcacctccaagtcccctctggtcaaaggaaatagaaggtttatctagaagtaattaaacaagaaaagtgatcttcataaaaaggaacgaaaccatactgccaaatatactcaggctttgggatggctgaggttgtcgacagaacatttggggcagccacaggcaaatctctcatgaccgattgtacagaaggatcgttaacttcgggctcaacagattgggaagcagtcgttgcatcagtaccagcgagtgtaaactgcttttcatttactgtatttgtctgcttgtctgtccgtaaatttggatgccctcctggcaatccttggaatcccacaggccaatctcttatgaccggcacctttgaggacaaacattttaaagccttattacaaccagaatccacattagacactggaggcaaatcagattgctccaaccctctgtttttgctaaagctgggtttttttcgcagtgcagcatcaaccgctgctcgcaacctattgcccttattattatcctcgccaatatttcgcttttggtgattaccaacagcatctttggttttctcccccgcctctctgaattccctcgaccggggtacaccatctacttgtgccagttcatctttacatttcgcttcacttgatatttgctcacttgaactacacttttcattcttagatgaatcccccactgcataggtaaaaaacaaatccctgggtgtcaatcatgatatctttaacgcagagaaatgtttactaatggagtaaaaaacctataaccagtggacatcatacccgaagcaactatatcttctagacggtttcgacttagatgtctggcttgttttgacaagctaccttgtttaccatcagactgcaaatccttcaaatcacggggactttttgcataaggaatggatgaattgccacgtgaaatggatgctgaagggttagcttctgtgctccaatctttcagttgctttgaaccttttacttttgagtcattacaattagagctccctacgtcaatacatctacttgacattgatttgcctacattttttgaaaatccttcctttacttcaagggaagaattttcattcccagtcttctgtcgtggaagcatatcatcatccactggtctcacttttgatctagagctcaaagaattaaacgaattggacttcaaaaacgaacctatacaaataaaaaacaaggtaatattatacaaccttcaaaatcaccagaagtacggcaaattaaacaaggaagaactgcatttgagagaaattgtatcatatgtcctacctttaggggactggagctgtgagtcagtagatcgtgtgctttctgtgtcatcactggagtggctattgaaagatgagtaatgagctagctttctcgttggcttctctaagcccttaaatgatgtttctcgggataaagtggacattcttgggagaacagatctcttgggtgatcctatttgagccccaactgccaatcttttagaatcaggaactgcctcgaatttatctatgtgccttttgctggagatctgtgtattaacgtttacttcactctctctttttcgcttggtttctgcacgcttcaactcaatttttgttagacaaaaattaaaaaaacaagttcctaatgttttgcactaacaacatgtatctttacctagtttatgcttttctgctttctcagcaaacttgcactcttcacaaagccaataacccttaggaacttttttaagcattactcgcatacaatagctgagtcaaaagaaaacacaactatatagttagtagagacaatggtgatcactcttcaaaaagtacttgatcttttctttcccatgaacagaagcaggcttacgtgtgttctgcaccatcactgcatctactacagatagcaagtaaatcctcacgacccgcatctccacaagtatcacatacttttacctgctcaacaacatagagaacattttaacttgagatttttgtcactaggagatgaaagtaaacattaataaaaaaaaaagaggcaaaagttcagccaacaaaatagatgtgttctttcattcttcctaatatgagacaaaacagcatacttacatcaagttctagcatttcaggatcattttcactctcactgtcagacatggcagatgtgtttgattcatctgccttatttaagagaacattttctcctgacttcccgacccttggtcctgaatgcttagaacttccagttaaagtatttttcttctcttcgttattctttgctcctgacttttccttgacttttccctgccctagagtgcttctggcctgatggtcattacatgaatctaccttcatggaatcttgatctttgtgaggcctatctaataatgggccatgggaaatatcagaagatcttataatttccttactctcagcattctcagatgaagtatcatgattggaattaaccagatggctcgcttcactagaagtgttatgtgaactgccgggagcattaaccccagaagaacgcaaaagattgtccccgttgaaagaacactggcttgccagtacaccatgggagttttcatctgatgactcatctgactttgaaccggaaaattccgcattatgatgcatgcaagatgaacaaggagcagagcagacattacaagttccagactgtatttcaagacgacctctgcgacccatggggcgattaccaactcttctatcagccttcaagcaaatcatatagagaatgttaggaaaatagtgtcagtgaattaaaaagaagcatgaaaggaaaaatctactgaaagattatttcgtaataacaaaatttacataaaacgatacaaattatccatctttaagcaagaacaagccaaacaattgctaatacaaaaaacagataaacttaccataaacaacagaaatgatgagcactgacttctaatccgctaatccaactgtgaacagaaagaacaaagagcataattaataactgcaacaaaaacattaaccacaatcccagatgattcaatcatgctgcttaacaacattggtataacatgcaaactgaacaaaatttctaactaagaaccctcaaggaaatcacataatttactatttttttaaaaacaaagaaaagtcaaaggacagtgaccaatctctgaataaaatcacgattataactccagaaaacaaggaatctaacgataatcaagcaaattagtctctaaaaactccgaaaaatcagagtataagattgcattgttgaggtctcaaaatcatcttcctcgacatttggatttccgcaatcatcatcttaatcactatcagcatgagccaatcgagaagaaacaaaaccctaaacttaccattaattgattttcgcagtacaaatacaaaccctagttcctctaaaatccagattcgatttccctctctctctctctctctctctctggcgtggccctaagttcgtttctcgataaatcgcttttcctcaaaacacagagcccagataatgagagctgctattaaatagccacctcaaggattctctatatctaggacctacacgtagatacgtacggacatacgtgcatatacacacgcaattatttataaattaattactaattttagtctattagtattaaacacaacgcaagagttaagagatttttacagtgattagtattttaccttttaccgccatgaaagcactcctctctactctggaaaaataagaattctgcacttctgacagataattatataaacataaatatttaagttttcttcttaagcctaatttagaattacattattaacttaattgttaatttggtaatttcattggaagttaattttaattgttttatctgttcccacttatctttaagttaggaaaacttgttaggccgttaacgttaaaaaataaaataatagaccaaacgaagaagagaatttcaaaatggccatttcgtcatcctaagattattttcggccgtttcagcccaaattctgtaattggaaaaccgttgggctaatgggccttttataaaaatttatggtcacagattttatggtgatgtccattaataattgtccagtccttttaaaattaatcagattttttttacattaaaactaaaaacacaaataatatgacaaaacaaaaaatcaatgaaatggcccacaaagatcacatgctcaacttcgccgcatttttcgctttctattacacttttttttctttttagtcgcacttcacaattagcttaattaatttcctaaactcgcttattttcccctttctatatacagatattatcattagtgacattttcattttccaaacagagcgtttagacactagtcaactacacaatataattttccaattttcactgagagaaatgttttttttttttttttccaaggcaagattttagtcttttggttctctatacgtgggtaattagtgattagtaatttacactgttgagtctttgacattgtctaagagacaaaaacgacaagtgtggtacgtaattagaaattaaaatgacctacttccccagaatcacggcatgaacattggcaataccaaatttcttgaataccattgaaggaaatccacactaatcattttctctataaatatctttaatccgttttattgtttcttaagaatcattcattggcaatcaagattttttaaccaaaaaaatggcgaattgtatcagaagaaatgctcttttcttcttgactcttctctttttattgtcagtctccaacctcgttcaggtaaaccactcaaaacagattcagtttattaaagtctgatattgaagttttatatattacaggctgctcgtggaggtaaaaatgaccaaaggctatacattccttaaaaatttaatggctattagttttctgatattgaagttttatatatatatgacaggctgctcgtggtggtggcaaactcaaaccccaacgtacggactcaaaacttttgttgtttcatatgatcatattaatttattaatcactaattattgataatgttgataaataaactttaaagtaacaataatggtgtttattttgtgaaatgtcagttttctagtatactgtatgctgtgaattataagcatgaacataaagatctcaatgatttgttttttgtttgtttgttgtgatatgcttttttgatggaaacttcaattgtagagtgcaactcaaagtgtagcttccgttgttcagcaacatcacacaagaagccatgcatgttcttttgcctcaagtgttgcaaaaaatgtctttgtgttcctcctggcactttcggcaacaaacaaacttgtccatgttacaacaactggaagactaaagaaggccgtccaaaatgtccttaaaacttctttttagatatatttgataatattcatctagttttggattatcaaacacttactactctgttttaatctgtttctacaagttggcgatttgtctctacactttttttgtgtcttttgctcttaactgttgtgtttgttatacgtgtaagcccgcccaatgtgtcatggccgaacttattatggttacatatttatgaaatgggcttcattatcaattgatttgagcctacaaaaatgtagccataaagcccattaagttgtaattgttaatatttcagtcataaatatgattttctatatctatgatttatctctagtgttgatgatgtttgtatgtggaagtcatgttctatttgcttccacggtttaaaaaccatcaacttgctaaggtcaaattctaatattactgtgaaaaacattatttacgtgcgtaattatatgaatttatgaataggttttaattccattttttcctaatagtgttttatgtcaaagagtatcccactaataaatttattgaaccccatgtgcatatgtacccagtctggtacgagttggaacatgagataaagttgtggcaactgcccatgactcggtgtaaatggtatatcacatgaaaaattataagtccagatcacaatatgttttcttcaaataattcgaaaaattatctaatcgatttccctttaagcttgaactaaatagtttatcagcactagtaattctttcatacaaaatctctaagcaaatatatatctttctgggtcaatgttgttttttcatatctaaaatgttttttctttctcctgtgaagtagggttattagttagtggttaccaacttcacattataaaacttcatatctaatcaaatcgtgaagtatttgtcagtcaatcgtgagacgatattcatgaccacttttgtcgttgactttgtttttggctcaaaattttggacggcgataaaaaataaaactcgttgacattgttttttggctgaatcgttgactaggattctgggataagatgtgtaaagaagaaaacaaaaaccaatttattcacacgcaatcaactatatatttatacaaaaattagcaaaagcaatagttttatagacatttttaaaactttggaaataaagaaaagtagaaagaaagaaaaaaagaaactgataggtctcatctcaatttgaggctcaagaattaacgaacaaactagaacaagaacaaagaagaagaagtagaaaaaaggcgggaagtggggtcgacactattcaagaaattgcaacttgaccccaaacaatattcaaatcaatcaatttagacccccaaaaaatcagtcggatacaggatttggggagccagatgaatgagaaacctcctcaatgagtctggtgacttcagccatcgaaggacgactatctgggaactgagccgtacagctcataccgatcttcaataaacgaatgatgttctcattgccctcaggttggtaccttgtgagctcgggatcaagcacatcggacggtgtttgttgctcggtaacagattggacccatctcggcaaatctacgccttcttcattcaactgctgatgcgttggagacttacctgcaatgtaatgttccatgttaaaacctagaaaccacagcaattgcaaaaaaagcagttaaaaagatatatctatccttgattgtttgttacctgtgagtaattcaaggattaggacgccaaagctatagacatcagctttttgggatattttgcgagcatcagtgatttcaggggcacggtagccatcaatacggttaggtgcagatgtagaactaatgatgggagcaagaccgtaatcagagaccttagcttcataggagtcagataatagtatgttcgaggacttaatgtttccatgagaagttgtcccatcacgcgaatgtaggtagctaatcgctcttgcagctcctaaggctataccggctctggtttcccagttcaacggagttctcccgtttcctttgttccctacaaatccattaaaagagcttcaaaaccgagcttgaagacacataagataaactaactatgaaacaattcagtaatcagtgtcaattttagccaaaccaggtccatcaagatcacaaactagcatcagctaaactaagaaccctaaaaataaacaaatgcacaaatggagattactattctataccgtgcaatatcgcagacaagcttcctttagacatgtactcaaagacaagaagcttctcgtcacggctgaaatagtaagcgatcagagtcacgagattggcatgactcattgatcccaaaacatgcaatctctctctgaactctttctcaggcaccacaacatctcttaaccgtttcacagccaccactaacccatgctcaaagcttgccttatacgacgacccaactgttcctttcccaagaacctcagctgaagccttcaacaatccatccaaatcgaattccccgaaagatttcacgaaaaaggtcaaatctttattcaccgcaccactctccgaccccgtagccttagccggcgggacaacaaccaccgtttcctttggtatagcagcggaggaagtcgcagcagcgacaggagcttcaacattcctagatggaacgttctcttctttctttctctttctacagagacagaacagaatcaaaagaagcagtaacagaccaacaacacatccgatcacaatcccgacaatagctccggcggataacttgtcgctatctttcttctccggcggcgtattgggtcctccagcgtcaccaccattggggctctctgcctcacaagtgtctaaaggcttcccacagagagtgttaccttcaaaagcagttcgaggccaagacgacaacgaactcggaatagacccgtttaactgattagaagaaacattgaattgctgaagaggaagcgtgatctcagggatcggaccagagagttgattcctctccaaatacagagtaaccaaccgggtcgcagaattgacattatccgggatccgacccgagaatttattctcccctagattgattctgattatgctcggaagcgtgaagagaagcgacggaatctcaccggaaaaggcattaccttgaagatacaagtaacggaggagaacaaggttggagaaatccgaagggataggaccagagagagaattgaaccggagagaaagagtcttaagctgggttagattaccaataccaccgattggtaaagaaccgaataaaccagatccgggtaatcggagagccgtgacccgacccgcatcgcagtggactccgtgccaattacaaggagaagaagcactcatgttccatagcaaaggacggccacggacactgttacgaacagcgagtaaagctctccggtcagactctagatctgaagtcaccgcagcgagatagaagacaaagaggaagacaacagagagacttagcttacgcttatacttcatcttcttcttcttcttcaaaaaccgtgtaaattcttcgtctccttggttccaaaaattcaataaatatatcgactttttcggatatgggtttttggaaaatttatttcggctacgcgtaaacgagtgtttgaacaaagagacttttgtgttttttggtttacaagagtttcagctctgtctttcttctctctctagagccggctaagagagagaaaatggtcataattgcagagaaaaaggaaaaaaagaaaagttactaattggaatatttcctttttgacaaaaaagttaaaagagaatcttatgtatttaatttgacagctaatttacagaaagataattaattaattataaggttatgacttatgaatactagttgtaacaattttatcagagtcaactatatttgcgttacataaatgacaataaatcactgcagtaatgttttttgtagacgtttaaacgacctctgtttttcctttcttttgtattagatcaataaattaggtctaattaaaaaattaatggtcgttatcgttttgtttcttttatgttttttttttttgcaggttgagtgtgaccaaagacatgccaggtctgtcaaatgtgtctgagctaccgttgacaaacaaagattagcctctccgacaccgtttttatttctgatataagtttgtaccatagacattttttttttttttttatgtatttgttgtatcaatttgaaaggaaggtaatagaaatggtcaacagagaacttaagaagtggtattcattttgaagatttcaattgttcaatttttaaaactcttacatcaaatttattttaatagaagtggttggtttctcgtgactattaacaaacattcttcccaacccgaaacctaacctcacctaactttcaagttcaaatacaaatagatgatgactaatataagctgattttctcccaacaccttctataattcactcttaacctcttcttcatggctatgaccatgttcgtccaaataagaaacggccatagctgcgtgaagagcagccccaacaggaagagcttcttcatcaacaaagaagtaaggcgagtgaagcggcttaccagcgcctagcgtctcattctttacccccagcacgaaaatcgcagccttagtcttttgagtgaagaagctgaaatcctctcctcccattgtcaccgggaaatcatggaagttattctttccaatcatcgcttccgctacttttttaccgtgctcgtataagccctcgtcgttattcattaccgggtgaagcgacggctttttctcttcgaagtttacttctgctttgcatcggtataccgatgcttgtgcctctgaaatctgcatcatcatcaagaaacatttaaacagggttagggacctacattattcgaatagtagaacaagattgtatagaaaaatggtgtaaaaaacaatctctttacctctttgatccgtctttggataaatagaagcccatcgttgcttaagcttctgaaagtacctccaaatttcgcactctgcggtattacgttttgagcatgacctccttcaatatatccaactgtaaccacctgagaaacataaaaaaaccaatctccgctgatttcagccaagattctgattcatcaaacaccaatgctttgaaagtggaaagcaaacttacaccagcttcgagtggatccagttcccgcgaaacaatctgttgcaaggcaacaacagcggaagaagctgcaagaaccgggtctttagagaagtgcggtgtagctgcgtggctaccttgaccgtgaaccgtgactgtaaacaatcctgcacctgcaagaacggtcccaggcctagaaccaataccacctgatgggatcgatggaaagacatgaacactgagtatcccatctaagtcgtctagaatctcgtcttttagcatttcataagcacctgcataaccttcctcgcctggttgaaacacaagttttactgtcccctgttgcaaaaaaattgtgttttcgttcaaaaccctcataagattcaccaaactctcataagacacacacactaacaactctagaaaacacacacacataacaattagcaatcaaagacatacacacacatatatctaagaatcttagaaaacactaacccacatcgaaatgagttttaattgcagggcacagacagaatcattcaaaattatacatataaattgagtgaaagagaaaaaagagagaccttgatgaggtgttttgtggtttgaagaagcttagcagcaccaagaagcatagcaacatgagtatcatgaccacaagcatgcatctttccatctactttacttttcgattcccattccactaattcctttttttgtccccattttttcaaattcattagtcaaacaaagcaatctaaaaatcagagtaaaaatcggaactttgattattagatttcaaacctgtaacggaagtgcgtccatgtcggctctaagtccgaaaacaggtttcgaacaggatccgatccaagcgacgacgccagtcttcgccacaggatacttatacttcactccaagcgagtcaagctcgtctcgaacgagttgactcgttttgaactcctgaaaccctgtctctgggttctcatgaatctttctcctaattcctctcatccactcgaagaactcaggatccttggctgaatgaagcatcccgcgagcgagtgactcgagacccgaaccagaatcgtagctcccagctgaagacagaggagggagaaagaagaaggtaacgaagatgacaaagaagctccctgagaaatccattctgatttcttttgtttgtcgatgtaaactggcaagtgtcaatgaaagaaaggacaacggtgaatacgatgatgatgaaggagaaggagttggatcaccgatccatttttaatatttatatagtacgtaatttacacacgtttttggaaactcttttaatcgtttttaaatacgtatacgcctctaatgtgaaattcataatttatggttgtaatgtgaagaaaataatgaaataccaaagataaaatatgaaaatgatacaatgtagtatatttacggtataaaaggaatatttacttgaaatgaattagtacgtttaatacacgattttaccatttatgttaatgaaaattaacacttttaaaataaaacatggcatgaattagagttgtgagaatcacatgtaggcctttaaggttcttaaatttttaattccttataacataggcccatgtatttgattgacatataggccattgggttcttcgacttttaaattacttataacaaaggcccacctatttgaagcgcattgttaaacattttgtttatattttgattatgatcgaaaattctctagaacaattcgtacaaaagaagctgtttacgaaagtagctgtacatgcgaacataatcaataaaaatgtaaatgactaatgaaacatcagaatatccgtacaaaattgtgactttatattatttagttataggtacaaagttgtggagagtaaaaaaataaaaaaggtaaaaagttgtggaatagacctatgaaacaatcacaaacatacaaccaaaatgcaaattgtaattacgcaacagaggctttcttttcaaggaagtcaagtgtaagatttgcaaatgccccaattattatttgagagaaaaagggatattgctaatcacaattaacggtcacattacaattcccttttttctctgttatttcctcttctttcacaattaagttcttaacggtcacataaatattttgttttttatataatgagtttaattaagttgaagaatcaactgataaggttgatgatccgatcctcaaaagtatactaaccacaacactgtctacgttcatgttagtacctacttcaaagtccatgtacgttgggactggctgtatcttccgccgagagcagcagagagcgtcatcgctgtcttggaacgagagaaaggtcgagactatctctaaggcaaccaaaagcttagctatgatgaagacatctttctctctctctttgcctatgaatggagaatacaacaaataatataaagtgatggacatttctatgctttgcttctcttctccaaagagaaatagatgaaaaagattgttgattttcgtttctctcgaagaagaagaaagaagaagaaggtgaatagagacttttgatttctcaagaatgaacaagtagattgtagagtgttagtgtttagttctgttcttaggttgcagagattgtgtatgtgtggcgtttgatgtctcgtgttggagaggtggtctcgtttagagtgttagtgtttagttctgttcttctgttgatctgtgttttttttaaatgtaaattacacaagtatgcaaaacaaatctcttctcagaaaggggctactgttatatcatgagatttataagacaaaatgtaaaatatcggaaaaataaaacaacataattttggtgttgaatgagtttttcttgtccacacaacggcagaagcagtagacgattgttcctttgtctcttgatcacaaaccgatttcaaagtgttcttcgcatttttctcatcaatgtaagtgaaccagccagagaaagacaagtatgcaccaatatcattccggccccatattcagaataaattagaacatctttttccttccgtgttatgcacttgttctaaaaaaaaagaattccggcccatattcagaataaggagtccagtccaatagtctcaagtccaaacccgactcgggtctgtccgacccggaaaagagaactgattacagaatgcgggttttgtcaagagaaagttggatgataaaattgaggtgaaatctaatcttcaaatgatcattggttagctttttgtataacggattttctgaaatcctcttatttcccatatcggaccgtgattattgggtgatttcggatgcctaattgggtaattaatataatacagtataagattagatgcctcgaatattcgctctgtgcctaaccacaaaaaccgtaacttttggttttctctgaaacacatcccaaagtaaagaaagcatcactcttttcgtcttctctcgaaaatggcggacaatggtaaagtcacgatcaatctctgcaaaccttatttgatttccctgtttcctcattttctttcgggcgacattgatttgacgcagattctctagatcagtttttggctgccgccattgatgccgctaaaaaagctggacaggtctatctttcgatctccttgagttttgatcgatattttggctaatcgttatttaatctggctccttttggtttgcgttctgcagatcattcgtaaagggttttacgagactaaacatgttgaacacaaaggccaggtttttgtttctttcctccgctcagataatgtttcaatcactcaataagtgggaatggctacttaagagtgtcaattttttttttgaaattatcttctatggctccttaaattgttgcttttaggtggatttggtgacagagactgataaaggatgtgaagaacttgtgtttaatcatctcaagcagctctttcccaatcacaaggtggtgattatttcttcttttgaattcccattttgttggcttcttcctcgcgttgatcattagagttttgctataatttattagttcataggagaagaaactacagctgcatttggtgtgacagaactaactgacgaaccaacttggattgttgatcctcttgatggaacaaccaatttcgttcacgggtattatcattattgatcaattcccatttgaatgacctgtgtgtttcatttgcccatttcatcaaaaacaaaaacaaatgctgttttttttttgtaggttccctttcgtgtgtgtttccattggacttacgattggaaaagtccctgttgttggagttgtttataatcctattatggaagaggtaaaagattgtgtattccattgtttcaagtttcttcgatcgttacaacttaccattatacatagtttccttgatggtgctctgtacatgcatgtttcaagatttttctcaattcttacataatatctaatgatcaaacagctattcaccggtgtccaagggaaaggagcattcttgaatggaaagcgaatcaaaggttagcacttgttctagagacctaataaaaaatttcttgatctctttttatggcatccggagtatagctatcacttgttcagagacttgagttctcttccttcttttcaactcaaacaatgttctttttgcagtgtcagctcaaagcgaacttttaaccgctttgctcgtgacagaggtaaaaatctggctcctttgtgttagactactaaaactagattgctatgaagcctcctctcatcgctaatgtgaccaattgaatataggcgggtactaaacgagataaagctacattagacgatacaaccaacagaatcaacagtttgctaaccaaggtaaaagtttatcgatagatatttggaactccaccaatttggttctagtctctgccaaaactcatgattgttgtgtccttcattcatcaggtcaggtcccttaggatgagtggttcgtgtgcactggacctctgtggcgttgcgtgtggaagggttgatatcttctacgagctcggtttcggtggtccatggtaaattgtcttcttttttttttccttgcttggattaaaaaaggggatttctttcttgtacaaacaaaattagatcctgatgatggcataataatatcaaatctttcacagggacattgcagcaggaattgttatcgtgaaagaagctggtggactcatctttgatccgtaagagtttgagattaaaccaaacacactcactctcaaaccgtccaactgattataactaactgttttatgtcgtctttgttcatcagatccggtaaagatttggacataacatcgcagaggatcgcggcttcaaacgcttctctcaaggagttattcgctgaggcgttgcggcttacaggggcatgaagtcatctgttattattttacaatatggtctcaaccttatatgatcaaactcaattcaaaaacttaacattattgaatatttcttttcggtagaaagaaaacaaactcaattgttgagaaaaaaaaaaaactattttctttctgctaccctttgtgaattcaattaaaaaaaaatcatatgtttggtattgaatgatataattctgttcttccatgtagttgatctttgtaatcgagtttgcattttttttttttttataaaaggtggagtttaaggtattttgtgatccatactaaattaacaacagaggaaaatggggataatgagtccggcccagttacgactaacgacccagaagcatcccgaaagtctcaagtctaatcccgagttggatcgacccgacccgtaaaagagaagagattgcggagaagaacggagggaggaattttgattctcacggtgactgttgtcctcctctaaggacttagggtttgatttgaatagaacaaatttctcagatcttcgtattccttgcgaggttgtgataatttgggagttgcgtgggttgctacgaaggagagtgatggatgctcaagcgaagaagaaggccatgttccggtctaaactcaacgccaagaagaaagacacccgcatagattctcctctcgttaggtaaaccgttgttagcttcttcttctcttcgtttcgatgtcacttctgggtttctacaattccaaatatttgtgggttctggggattgggcttgagctgtagttgggatgaagagtttgttctttggatttgtaggtacaacgaatcagaccagcctgtgtgtcgagtttgcaatgtcgtcttgaaatctgaatcactctgggatgtacatcaagcttctcgtaagcaccacgaggtaaacttagtgtcttctgctccataagctttacttcacaatctcttataacctgagtaacaacaatgggatatttgataaattacatacattgaagataggtagatttcatgctcttatatgattttatgcgttagattctctgttttatgttctttaatcttattaacttagctttcgtaatgtaacgtttggacaggccattgatagtctcaaggctagtgcagcgggagtccaacggggtagcaaacctgctgaaactcggccaacgaaaattgaagctttggctaaatcatccaattctcagacatcatctggtcttccgccaaatttcttcgaaaatcgtgagcctgctagaggtaatgactaatgcactttcctcttcttgttcttatctttttcgaataattttcttagtagaaggcttttggtttaggtgctagttatgtggatgccatgcttaaaggctctagtcttaggttttttgaaagattgatgatagtttcattcgtcaatcgaaaaaaaaaacttattgatcaaatatatgtgcagcagaagtagaaccagcaaaatccaagaatttagagcaatcaaagcacactataggatctgaaacaaataagtcaaagggacctcttccagccggattctttgataatcagaaaactgattcttcaaataccaaaaccaccagtgaacctaaacagagtcagacacagaccactggtccagaaacaaaaccaatggtgaatggaaaccttccaaccggtttttttgataataaagaagctgacctgcttgcccatggaatcaagctcgtcaaaccagatatcaagtgagtttcttctctttttttttttgttgcttttacttttccagatgcagaaaatcaaagtgaaacctcattgttgtggaccttgtgatccagttactttcctacattctcaatttgaatggttcatatgatcttatgggtttgtacctaagaattctcttcgtgaacttatataaacatggatcttcttacagggatgaatataaagaatttgagaagttgatacaagatgatttgcaggtagtggatagccgcatggaagaagaagaggtcagataactttctgtcactatgataaattgctgacagtatcataagctctttcttaaacttaaaatcgcttttctcgcactctaattgtcaggttgatgctgcggaaactatagaagaggaggaacaacgagagcaaaggtaatttgattcattactttgttatagcaagaagatggaaatgttgagacttgtttaagattaagtaaacacttggcttctccttttaatcttattctgcagatcatacaaagagaaagtagagattctgaagaggaagaaaatggaacttaaagcggcaagattagcgaagcgcagtaaaacctctgaggggtctgttaaaaagccgaagaagacagaagaagaatcgcccagcgatgaggaggatgacgaggattctgctgttgattggagagctcaacatctttgaataaactagaaaagactgtttaaaaatctgtaccctggtaaaacatacaatgttctatgagaatatacagtgaaaactaatcaatctcatatatatacaattatcagtttcagaggatcaattggtatttgaggtatagttatcggttaatgggtataattcaagaacgtaattttcataaccagagttgccaaaaaggccgaaatatctggggatgaaacctgaaactgtggcagttccgaccagtttcaggtgataaactaaaaaaaaaaaagtgattatgactggtggtcgtatcattctagttttgagtgagaatgtttcagatattgatcatttggtggcacaaaacataatgacgaaagtggtaaatttaacaatcatctttaaagttaaaactcttattattgttaaacaaatacatgtggaataataaataattgagacaattccagaaaccaattaggggtcaaatatgtcgagaaactaattaggggtcaagtattgaagaaggaagaagaccactaactaaacatattcatatttttttgtgaatttttggactatttgtgattaccaaccatatgcttatataacttataaaaaaaatgcattaggctttccactataaaccattgacatttgaaatatttaaatcaagatatatgcataaccaaaaaaaaaagggttatgttatcttgtttataacttgaaaaggagtccacaaaacaaagagagagagaacagccaaagcaaaggtcggttaatgcacaatcgatgatataacaaatatcccattagaacataaaattagttaactaattacttctgacctaactgaatgcactcaatctcctataataccttaacattatctagcttgactaatcatataaattgtcacgtgaattttctaatggtaaagtgtttcacaacgggaatcaaagtttagggacatttcagtttagagtctatccatcataacacttgtatcccaacttggtttttccaaatttgttttagataaaataccatttttcgaattcatcgtcttcatgtgaattttaggaaaaaaagagtgacaaaacacacacacgcacacacacatcggcttcgacctacataaccaaacgatatcttgtaaaataccacacacaatcacaagtgtttaatcttatgatctctaatctcttatgcatgtttaaacgtgataaaggagaaatcgtttagcattagaaagaaagaaacatttacgaataaaatgatcgaaaaagtgacttcctcgaactttatcacatcacgataccttatcacatgtacgtaacacgtaatgacttattgtttatcttgtggttataaaagactctcttatcatttatatggtgctcttcataggtcattctaaaaataaacccatatctcactggttcaccttattttttaaaacatattattattcttttacactacgttatcttttattatgaccataaaaatattaatatagcatgggctttttgaatcacaatttgaacttttaatgtaaaaaataaacaacagcactaacaaaaaaaaaccgaaaatttgtgtataaatttcgccgattccatggtgttgttcatcgaattaacttgagttgctatttttttctctatctgataagtttcgaaatttgaaaacacaggcgccaattttaggcatataactgaaaatcacaaaaaggaaataagagagaaagagagagaaagagaaagagagagaaaaacagagaggttgtcttcttcgtcaaatatccgattatctggtatcgtgattcggaggtgtaatgggaggtagtagcggcggcggagtttcttatcgtagcggcggcgaatcagacgtggaattagaggattacgaggttgatgatttcagagatgggattgtagaatcgcgaggaaacagattcaatcctctcaccaatttcttagggttagacttcgccggcggtagcggtggaaagttcaccgtcattaatggaatcagagatatctccagaggctccattgttcatcccgataaccggtacaccataaattctcgtcacgcttttgaattttgttttctgagtcctttaacttttaatagtttcataagtaggccttatgttttattttgtattattctagtccacttactttgttatatggattttagggtaggtattgattaatttctttttttctttatactgagactaaatcttatagaaatcaatcttcctatatattttgaagctacgtactacttttattagagaaattttgaaggaaatttgttagcttaacaactttcggggtcaattgtagtgcaaacaaaaacattaggggcttgattgtggatttaaccttcctttttagtgtaataacattttcttcggttattcattcatttcccgccactttatgacacgtatcagtttctcaatggttacaaatgatcgttggttaaaaatgtaacaaccatgagtctgtacacgtcagaccagattaaagaagaaaactctgtttcgctgaagtttggagcaataatagaagtagactaagtagtgagtttagtttagctactaaatactctgtccggatctaaagattcttgaatttgcaggtggtacaaggcgtggacgatgtttatattgatatgggcactttattcttccttcttcactccattggaattcggattcttcaggggattaccagagaatctgttcatcctcgatatcgctggccaaatcgctttcttagtagatattgtcttgacattcttcgttgcttatcgtgatagccgaacttatagaatgatctataaacgcagctcaattgctttacggtattcaaactctactctgtttctgttttcttgctatctactcaatgagattaacctcttcatggtgtttgtcaattttgtaggtacttaaaatcaacttttataattgacttacttgcttgcatgccatgggatatcatctacaaggtatacactttttactcttttgattttgcgggaaacggagaatttgaaactgtgaatttgaaaacaggctgcaggcgaaaaagaagaagtgagatacctattgttgataaggctatatcgagttcatagagtaatcctgtttttccacaaaatggagaaagatataagaatcaattacctttttacaagaatcgtcaagcttatattcgtcgagctttattgcactcacaccgcagcttgtatcttctattacttggccacgacgcttcctgcttctcaagaagggtacacttggattggaagcttgaagttaggagattacagttactcgaagtttagagagatcgatctctggactcgatacactacttctatgtactttgcagttgttactatggcaactgttggtaagttctgataactgaaaacttggtgaatatatcgtttgctttcattccttaacttggtatgtttcttataatgcaggttatggagatatacacgcggttaatatgcgggaaatgatattcgcgatggtctacatttcattcgatatgattctaggagcttacttgattggtaacatgacagctttgattgtaaaaggttcgaaaacagagagattccgggataagatggctgatatcatgcggtatatgaaccgaaacaaactcggtaggaacatccgtggtcagattaccggacatttgcggttgcagtacgaaagcagctacactgaagcagctgttcttcaagacattcctgtctctatccgtgctaaggtatgatgagtgcttcagagatgcttgttcagattcagatgatgaacaaatgtaaacttatgttgttactgcagattgcgcaaactttatacttgccgtatattgagaaagttcctctctttcgcggatgctcatctgaattcattaaccagattgtaagccttttgatttttttgaaaattactttctttcttcaggtaactaaagagcacacttttgcttttattacaggttataagacttcatgaagagttctttcttcctggagaagttataatggagcaaggaagcgtcgttgatcagctctactttgtttgtcacggtgtattggtaaacaaaatatctgtgttttcgtcaataaatgttaggaatgactaaaaaatctcagttactaaaccaaacttcttgtgatttcaatcaggaggagataggtataacaaaggatggatctgaagaaatagtggcagttctacaaccagatcattcttttggagagatttcaatcctctgcaatattcctcagccttacacggttagagttgcagagctatgtcggattctaaggcttgacaagcaatctttcatgaacatactcgagatatttttccatgatggacggaggattctcaacaatctgcttgaagggaaagaatctaatgtccggattaagcaactagaatccgatataacctttcatatcagtaaacaagaggcagagctagctctgaagttgaatagtgcggctttctacggtgatctttatcagcttaagagtttgattcgagctggaggtgacccgaataagacagattatgacggaagatcgcctttggtatgcttctacagcttctcggtttcttaaatccaacattggaagatatctattaacatatttttgttgttaacagcatcttgcagcctctagaggatatgaagatattacattatatcttatacaagaatcagttgatgtaaatatcaaagataaattggggagcacacctttactagaagcaatcaagaatgggaatgatcgtgttgcggcgttgcttgttaaagaaggagctacgttgaacatagagaacgcagggactttcctttgcaccgtggttgcgaaaggagacagcgatttcttgaaacggcttcttagtaacggaattgatcctaattccaaagattatgatcacagaacacctcttcatgtagctgcctctgaaggattttatgtcttggcgatccaattggtagaagcaagtgctaatgttcttgcaaaagacaggtaacttcttttttaaccaaataaagagcggtttgttttcgcggttgctaacagttttttttgtaattagatggggaaacacacctcttgatgaagctttgggttgtgggaacaagatgttgataaagttactcgaagacgctaagaattctcaaatctcttcgtttccgagtggctccaaagagcctaaaggtagttttatcggcatataagtcaaagtaccgatgtttttttagatagaaactttaacaagcggtttgtttattcgaataatctgcagataaagtctataagaagaaatgtacagtgtatttttcacatcctggtgattcgaaagagaaaagaaggcgcgggattgtactgtgggtacctcgaagcatcgaggagcttataagaacagcaaaggagcagctgaatgttccggaggcttcttgtgtattatctgaagatgaagccaaaattattgatgtagatttgataagtgatggacaaaaactgtatttggctgttgaaacataatgattcgagcaaatttcaaaaaatcagtttatttagaaacagagtaattacaaagaataatagtgtgttttgtttgtttgactaaaatgatttcttcacattcttcaaatgcattgaagaatcgacacaatttgtcttctcgatctcgtttctacaacggtttaaattccgcaagagctcgctcgctttctccttcgtcttatcctcgcacccgacttgtaagagcactaagagtttctcaaaggcaccaacttgaagagcttcaactaacaaacgatcatcacattctccgtctttcttattcttccatagcttccaaagtatcgaaaccgaacattgtgtcgcgagatccgaaactctaagaatcttcttcaccagaagaggaacgatcaaagcgtttctaagaacatcttctttgccttgctcgttatcgcatgtagcgtttaaaacaactagagatctctcgcaaacgctcttttcggcattgttcaccatcatctctgtgatcaactcaaccaaacccagtttcacaaatttttcagtgatcttgtcgttagaagaaatcgctctataaatcaccattaaagatgctttcgtggagctagtcgaaacagagtctctgatgatcttaactaatccttcacaagctccttccacatctgttaacgcgtacacatacctcttgtctactgcaataacctctctgatgcaaaacgcagcgttttgtctcgttttagcgtccttaccgttcaagaaccgtacgagacagttaagagaagccgttgatcccatcttgttgaaaccttctgatcgattcagaggcaaccaagatgatagaacaaacaagatttcctccaataaacgcatgtgtccatcacgcgccgccgcgaatctttcaaaacaagaagacaaagccaaaacgcttccgttttggaccaaacacttcttgttcgtgtcccctcctcttcccaagttcttgattttgctcacaatctccaaacactcggcatactcctcacgcgccgctgcgttttgcaatctccgacttatctccaccgcatcacgcggcgtcaacagcacgcgcggtgactgaatccgctctatccttgatggcgatcggagttgaactggaatcttggtttccacgacggagatatcgccggaaatcaattgattacgtctctttgctactcctcctcttgatctccaaggtaacaccattatctcgttttcctttttgttttgttggtttggtttcctaagaaagttcaaatatttttcgactattcgatgaagaatgaaatggggtttatgggatttgtataaatatatgttccttaacgtgttttatttatatatatgcatgtaatgtaaggtggttttgtacttattaataaagtgagacatggtcaaaggttgtataagcttgaaagagaaaaaaggtatgaaatggaacgtttgatttaggtttgtgaactgaattggaatgttgaccgttgaaatctgtggattagtattctgcgtccagatttatgacttttttttcgacggttaattaaatttttttttcattcaaatattgttaaagtctagaaagcttagtaaataaataactaagaagatcataccaagaactatatattattaatatatacatatagattacgcgtgtttcccctttaccaactgtatactatatgtttaattaaacaatttgtagaaaatatactaattagttactagacttaaatatatctaatcgatgattagatattggttcccgatcatgttaaatctttgattaatttggacgttatatattgagtcttgtatatacatgacgatgacgtataatatatgtagtatagattacaagtatgggaacatttggactggagtcgagtacgacgagtaggcatgtgagactcattctgtgaataagaattagtcatagttgaattaaaagaaaaaagtaaataattaagagtgattaaattagtttttagtttaagaaaatgataaaacgagtagggaaagacttaagaccaagacgatgcgactcgggcttggtcgcttatccgtcgtcgggtccgtgtttgtttacttttccccgcgtcattgtttttccaatattacttcaatacattaaatattttacgcgtagattcatacactgctttaaaagttcgagtatctaagataaaccacacgaagattcgatcaaaaccaaatatctgataaatacgaattttcacccaattatgtaacgttcaatattattttcgattaaaagatccacagaaagttattttcatttaaaaaaaatcaaaccaaaaccggattcattacatcccggttcagtttaccacgaaatttaacgcagataggtaaaacataagccagttggttcaatcatcgtagccatgaattctcaaactatcttaatgctgaaaattacctaatcttcagttaaagcacaaattatcgccaggaatcaagtttcaaaatttcatccatatttcaacattgcaaattcattctacggctttgtaataaggacggacttttataaataaggaaaaggagaatttacagactcttcatcaataagatcctctttggataatcatatcaaagaatgctctgtatcatttacagactctttcgcttgttactgctataagtatcaatggacaatcgtttctcttgtttcagacacaaaatcttgctgtaataatgttctcccgataataaaagcagaaacacatataaaaaaacgatcagacgaatttaccaattgcacaatgatgtgcctctccatagatctactccatggaagagaagatttccatgaagcaaaattgtcatggagaggcaaaatcaatcttgtcatcttccgacacaaatttggcacagaggttataacctatttgctttaaggatgacgaatctcatcagacaccagaaaacagtagctcagagtgttaaaaaaacaaaactaacacaaaaggttatgatttgatcaacgagcttgattcggacatagataaatacatacgactatggaagtgtaacctcctcagagcaactccatggaagagaagagttccatgaagaaattcccatggaggcctataaaactaatcttgtcatcttccgacacaaaattggtacaaattataacctatcttgctttgttagatgacctcatacaagaaaacaccaacacaaactaagatatctccgccactgtaacactaaaccctaaaaactgatatggaggtaacggaagaaagaaaaacgcaaagtttatacagagaggtttagggcaaccgatggaactaagcacaaaacgacgccggttatacaactattgggtttagaatgttttaatttaatatgggctttatttatagcccaacttatttctacggtaggtccaacctttaaaaggcctatgagttgaagaaaaaacaaggctccagtttaacacatttgggtttgattttaccgaaatattttaatcgcaccaatgcacatggtcaaagccaaatatgagggaaattactttcaattttattgaacctgattcgccaaaagaatattacaacaatggcgatcagatcaagatcaagatcagttgtataaatcacctctatacattattaataaatgcttgagagactaaatgaaaatgagaatttacagattcctcttttgaaaaatcaaaaagcttttgtttttcttcttgtttaaaagctcttcttcttcttcctttgtttcttcactgctgtgtattatcaatggtagtgtctttaccagaggatgttgttgctgcttgtcttgtttcagacacagagagtcttctagatttccctgttgatgtttccactacctcatctgtctctgaagctgtgttgtcgtatgtgaatactcgcattgggtgatcaaatttacagcttggaccaaatttgcagattccatagcgtgtatagaacacacacaacggttctccctatcattttgagaaagaaaaaaaatcaaacaatgcagagatttaatcgaagagaaccaagtaattatgcacaagtctttgagcttaccgggcgtaaggggaggccaatggagcttaagagacaatcaggaggaggagcttgtctgtctctaggatggtgaaatttgcaaactgtgccaaatttgcagtcacctgtcttcatgtagaattggcattcgggttgtcctggtctctccgggaacacattttccctcggcaatgcataataccctcctagcggaacagaggatcccggattgtaacccgagaatgatccttgagactgagagcctgactctattgtctcgttctgctgtaaatttctgtagttttgatcatttccggtacctgaaggagaaactgagccgagctgaccctaacgaaatggaaaccccgagaaacactcgacagaaatcaaaaccaagtcatataaagtctgaagagtataagcaatgttgtttagaaaacttacactgtaagggttccatccttgaaccgggacaactccttgaggcatgattaaggaagcgtagctagacggatcttgccaacgagggctggcaataaaagaagctcttgaccaaggataagactgttgccctgaggtaggaaccatcatgttggttggttgaggctgagggtggttgaatttacaagtaccaccaaatttacagtgtccggttcttaggaaataagcacaatcaacctcattctgcatatatgacattacagagaatcactaagatgatgaaacaatgagaagtaatgaaatcagcaagtcaaaaagtcaaatataccgagcgtagaggatagcctaacatattgagagagactcttccagcaatcccagctttgttccttggatgatgaaacttacatgttactccaaacttgcaggttcctgtcttcaaatagtactgcgcaaccaaaacatacaacaccacaaaatgttaagttagtttgtgtaagaagatgactcaattaccaaaccttgacaaaatgttcatctacaactggacaaaccaaagattcttacctcgcattcaggctgaccaatcctttcagggtattctcctctcatccttgcagtagctataacctagaaattggacaatgagagagaagagctcaaaaacaaaattccaaaaggcaaaagctttgacattataatccgaccagacagatctctaaactccaaaatcacagagaggaacacaaaaaccataacgtaccagttcccgatcacgaggatggttgaaccgacaagtagagccaaatctacaaagaccagttcttatgtaataagaacaatcaggctctcctggtcgttcagggtaagaaccagtttccattgtttcatctgaactcaaattcatttgccacattgcatctgatcataaaccacaacccaaaccaagaagaagaaactgagattaaacccaatccgtttaaaaacaaaacaaataaccaaaatttgccgatcaaaacagagaaaagaaagaagaaattgataggaccttgattcatcaaaggtgaaagagaagacatgggaactccggcattaaaatccatagacgtgaagaggaagaatgtctccgatgatgatgatgatgataataagcatcagacattatactgtcatcactaagaatgagtcaccggtaatcgatcttcttccaacaagaaaatgaagtgtagagaggtagatgacaatggaggaagaagacatctaaagaagaagaagaagaagaagaagaatcgtgtaaacagagaggtgagaggtagtgaagaaagaaagagagagagaaagacgaaaagcaaaaaagcgttctcgtctcacctccacacaaatcaaacaagaaattttgagaaaaatcaattaatttaaagtttgtgtatgtacgtagacgaatatgcccctactgattttctttttttctattttcgtaaagactagagtgcgacaatttttattttatcttctccaccaaaattggacggtagagaacacgtcagaaatttttattatctttgtccttttctatgtggttatttcattccatttattatgaattttttttgaatatacaacttttatttattttagttgttggaaaaatcaaatctaccaaacaataaagagcttttatgccaattatcatcaacttgggttggaacaaattacggtccataatattgggtttgatggatccacaaccgaaactaacacacgaccagacatccatacatatgttctagtttcggacacacatttgttactattagataactaattgaaacattcaaaagcacaaatttttcaatccaaaattcaaattgaacatctctagtctaatcttgatttggttggagccttgctttggctctttcgagagcttttagcctattagcttccatacgtactctctgttcctcggaaatgttctgagctttctccattgccttcaatctattagcttccatacgtgctctttgctcttctgtcagttcactgcttttatccatgttttgttcatcgctcggtaactttgaagcattatcaaatatctcattcaacatactgtcttcaaaagcatcagcatttgtatcagcatcaacgctctttgatggtatgttctcttcgtcatgacttggctgatccatatctagattaccagcagaagactattcattacccacaagattgtaatgtaacagatattgaacttaagtgttatgcagccacataagaagcgtttccttttcgtatcaatatcttaaacttaaaagaagattcaagggaaaaaagctgatctgtttgacataccttgatcatcagaaggaacagtattttcttcctgcttttcgtataacttgtttggatcaactccactggcaaccctttctcgcagttcatttatacaattctaaaaggataacacatcagtatatatcaatgtatcaagtataaatgcaaaggcaacatagccattgagtgaatatatagtttcagtttctggcagaacctaactatgttagggaagtaaagaacgtatgagcaacctaacacagcctcagagtctagtaattcgaactttaaagcaacagatgattgatcaccaaagaacgagacaagcaatgtcattctggcctatataatttgtttcacgatgttagcccgtcagcaggattcagatcaagtataaacgcaaaggcaacatagccatcaagtgaacatatagtttttagttactggaagaacctaagtatgttacacaagtaaagactaacatatgagcacaatgatcatataccaaaacagcctaacaaatactcagatcctctatcttgcaacttgaaagcaacacatgagtgaacatcaaacaaggagacgaacaatgtaattctgattacagcaatctagactaaccactgcttaatacaatcatcggaatattttcaacctttaaatccggattcatagattcacaattgccacaaggaagaacgctttacaaaaacagaaaaagtggatcgagcaatgtagtaccttaacacgcttagtagaagcgacttgttgaactttatgcacaaagtgatcaaaggaatagtaaggtagcaaatgagtgtgccactcactgtacaaccgtatcaaattccccaaatcgctcacctataaaaattattcatattatccaaattatcacactgtaacatgtaaaaccgctgttaaacgaatctgcgggtgaaaaaaagacttgcctctttgcctcggccacgatacttgaaggatttagggaaatagcgaagaacatagccgagaccatcctcagagagtaacaattcaggagttagcttgggcctttgaactctcgtcttcgtcactttaggagcaggagctattgaggttccacttttactggaggatctctgaaattcattattagggatttgagatggagcggaagaagaagaaacggaattattgccggcgaccggagccgatgatggacaatcacgagaccaatgaccgggacgaccacacttgaagcatcccgtcggagctgattccatttcagatttcactcttcgatctctctttctccctcttaggtcttttatcattccaccatcgaaaattatttgggcggttttcactttttctttagcgggaaaattagacgagtcgggtactgtttgacccggtttattataaaaacctaaagaaagagaagcccattaaatacaaattttggaaccaaacatattgtaatttgaggccttaaagcccagtagaatatattagtaacgtagtagagaagacagagagttgcaaataatgtccagaaatagtattattatagtccagaaatagcgttttttagcgggatgatctatcaatactggcaaaaattattaattttagtgtgttgtgggacagattaatccacttcaagatcattacttgagaatttatttacaggatttttaaaattaggttatacagaaattcgaaagaagaaggatggttctccatgcttttgggaaaaggtaagagtttatgagagattgagattattacaaaaaatctaaactttttttttgtccattttttctcggaaaaattactcttcttcatcgattttccggtggtttggattgtcaacttcatcttcttcttctctttctcctttcattttttttcttgtgtttcttcttttacgtgggtccttcaatctccatgaaggacccgaccattgcttaatcctaaacaaaactccaaaaatctaattcttttcgatctgttttatcttcaaataataatactctttgattgctaaaaccgattttgatcatcatcatgcactgttttccgtgtttctcttcgccaaagaacaagaaatcttcaactacgaatgagaccaacgacaacaacgaacccaaaccagatggtatttatctcctaacgatgtaccatttcttagttttccttgttcatacgatcagtaaaatgaaagaaaacaaaaaatgatcattttttgtttgtttttaaagataggagacgtgcagaagaaacagaggaaatagagcaatcggaaggaacatcgttgaagatattcactttccgggaattagctacagccacaaagaatttccggcaagagtgtttgctaggagaaggtggatttggtagggtttacaaaggaaccctcaaatctactggccaggttcttccttaaatctccagaatttggaatttaggatacattcatgagaccatcaccaaagttaggtatttttcaatgagccatcatcagaatcagaagaatttgtcttgtaggtggtggctgtaaagcaactagacaagcatggattacatggaaacaaagagtttcaagctgaggttttgtctttaggccaacttgatcatccgaatcttgttaagcttattggttactgcgcggatggagatcaaaggcttttggtctatgattatatctctggaggttcacttcaagaccatcttcatggtactaaattgagagattctcattgaacacattttttttactttgaaagaaatgacaatttgaattttgcagaaccaaaagcagacagtgatccgatggattggacaactaggatgcagatagcgtatgctgcagcgcaagggcttgattacttgcacgataaagcgaatccacccgtgatatacagagatttgaaagcttcaaacattttgttagatgatgacttttctcctaagctttctgattttggtctacataagctaggacccgggacaggtgataagatgatggctttatcttcacgagtaatgggaacttatggttactctgcacctgagtatacacgaggcggaaatctcactttgaaatcagatgtctatagctttggtgttgtgttgcttgagcttatcacgggtcgaagagctcttgatactactaggcctaatgatgaacagaacttagtttcttgggtaataaataacaaaccctaatattattgcactttttcaaccaagttaaaacaagaagtttttatcttgctgaacaattcatgttatcgcaggcacaaccgatatttagagatccgaagaggtatcccgatatggcagatccagttttggagaataaattctcagagagaggattaaaccaagcagtggcaatagcttcaatgtgtgtgcaagaggaagcatcagctcgtcctcttataagcgatgtaatggttgcgcttagcttcctttcgatgcctacagaagatggtattcccacaacagttcctatcttatccttcaaagacaagagcatgtctatagccttaagccgacatgattcaaatcttgtatctcctcctcctgagctagctacggaagatgacaaatctagtacctcatcaggcgaagaatcatctttggagagcgaaaaggagagtgtgagtaagaatgagtataagaagaaacatgaagaggaagatagctcaatggaatctgatgatgagtctgattctaactctgaacatgaaaaggaccaaccaccaaagcctattgatgagaagaaccaggcgcaaagcttgaagataaagtatagatatagctgggaagatattgatgtcaatgatgagaggctaagcagtaaaagcagccaaaaatcaaacgacgaaagtacttcttcgcgttatgatagcgacagagatcaagacgagaaagggaaagaagaagaggaagaggaagaggcagaagaaaagcatactcatattgaacacattgatagctcaaaaactgatgatgatcaaagtgtttactttgataatgatgatgattcaggagatgacaatggaggctctttgcatcggataaaatcagatgttgcgatcgattctattaaagagtgacatttttcaagattttttatcaatccgttgaagctcacaagaagtatttgaaacttttttgggtttatttttgggaaaaattcttaattgggtattaaaataagatacatattgacggtttttcttaacaaattataaccatctctctttatacatgatgaagatgttttggattgatagattaataaagaaacaagttgtataatcagataatctgattgagaaaacttatctcagcttttgtaatcctttaaaaaaaaatgttacgtacttgtgtttttctttaaatagtagatgaaataataatagtttagcattttaaagaaaaacaagtatgagataatcaaaccctagataagaatcttaataatcaatcttagctgtgactcatatagcctatgagcaaatattacattattcataggaaatggaaagtattagattctcaatttggatatactaaagtagatacttaaactgatagataaaagacatatctacttcttatcctatttttgcaattaaggatagtctttgtgttttccatctttttgtcaacgacacttgtcaaaagtttcagtctgtggaatcaaaatttttaaatgagaccacttagttttacttttctttcatgattcgaccactatactttctaagaatatttattttaatcaaaattagataatgtttacaggattgacccaaattagattcgtaaagaatcgtcagctatgaggtcaaataaaagcagagaaaacgacacgtgtcaggatcttggagattcctgaagtgaggtccaccctaaaatccatttaaggttttctaagcaaatcaacaaaggaaggaaggatcctaccaaaagctcccaaaatctgagtacgcttttcaaagttgtctcctttatgaaccccacttgatcccttctcctcctataaaaacatcttcttctcagatcaatcccatcaaatctcgggtcttgctctgtttctctctttttgattcttttagaggtttactgaattcgatgtgtttgattatggaaacggatgatcacaacggtgatgttttagcgccgccgtcgaatttctcgatggttgaagatggaatttatcgatctgggtttcctcgacctgagaatttcagtttccttaaaaccctaaatcttcgttccatcatgtaagatcctttattaatcttctgggttattcaattatactgtttgataattgattatgattggagtaattaatcgtttttttattcatcaaaacagttatctgtgtcctgaaccatacccagaggagaatctcaagtttcttgaggctaacaacattaagctttaccaatttggaatcgaaggcaaaacggtgcgttttgcttctttcttgttgcttgttgtcaaagaaatgcaattgtccttgatgtcttatctcggatcttttacgatatgcaggatcctccaactcctatgccaaaagatacagttttggatgctctcaaagttttagttggtaaggaatcaacactcaataatgttttttggtctcttcttagctagttcatgagtcttaaagtagatcttttgtttctctgtagatgtgagaaaccatccaattctcatacattgcaaacgcgggaaggtaatttacagtttcttcttcctcttctaggaacttagcctatgttattatttattacaggacactcatggtggtcttggcttgtcttatttagttatgcacagtacacaatctttttgtggtcctttaggaaataggcagttatttacaggacactcatgatttggtgtttttggtgaacttgcagcataggacaggttgtctagtgggatgcttaagaaaagttcagagctggtgtttatcatcggtgctcgaggagtaccagaagaacgcgggtttaaaatggagacaaagggacttgaattttatagaggcatttgatatagtgagcttgagacagtgtctcttgagcatcatgtatcagtatcacggttatggcttcaagaggagaaggttggcatatgaagaagagaatgtcaagacaccaaaaccgcaggctgctagagtttaaaaagagagcaaccaagtggcatatgttccgtgttctgatttgagtttaatcggtgcctggattattctttaagtgggataagttttagtttaccccaaaagccgtaaccagaagttttattgtgttttttagaaatagaaatgtatagaaagtttattcttcattacaatctgatgcaggggaggtcatttttaactcaatgactcattcatgcttatgttgctttattttattttattggtcaaactcctaaagttagcttaatcttgttgtttaaacttcaaagtctctttggaataaccattagcaataatataagtggtacagcaataataccatgttttaaattcttgtaaagagttcttcgataatctaatcatttataaagagttcttaaataatcaaaccagtagaaattagatcaaaattagcaagaacttgcagtacaattttcaaatcaaaagaaaaaaaaaactgatttatgtccagaaaacctctctagccaatcaaactgaattttaaaagataacattcggtagtatactttcggtatgaaatcaattattaaaacagagaaaacagaggaggttaagagtatcgagtcagcttctaatatataccatgtgcactgcagtacaaggtatatgactaatctagcacatgtgttaggaaaaatatgttttcaaagataattaaagaaatacaagttgattagcagcattcttttactaaaacagccatattatattcatctattatatatttagctttttgatttccattctcagaatgaaaaagtgtgcagctataattgacattgtctatgtaactatgtaacacataattgacaaagaataagcaaaaccgggaaaattctatcgtaatttttctgaccagaactaaaccgagaaaaatccataaccgaaccaaatcttacctaagaatcatcattcatcacccacgtatcggataaaaactcacctcctacctagaaatcatcacccaagtatcggataaaaactcaagatcaagaacgcaaatcagattgacaattacgcaatcttctagttatagctaagaaaattccatgtcattttcagaaaacaagatgtccgtgcatacgtactttgcaaatcatccggacctaaggtttccgctgtttatgttcgaacagaaacagagtacttcatttcaaacaataagaactaatcttgatgatctaaaacttgtctgaaaaaagaaatagaggttgttgatttaacatgactacaaagctatttaagattcgctaaaccagatgacatcaacaacatgatagattttggggtaagaagtagcacattacactctttaacatcaaaagataacaaattttataaaattcaaacatagagttacttcttcaagcttcccctgataccaggtttaggtttcgattcagctactggtgctaaaacagcatggagattcacgagctttgattcctcataaatgatattaggatgcttcgattcgtgatggatctgcatcgtcttaagacctggagccgtaattttgcaatgaggacactcgtacttagcgtggcctcctttctcttttccggtccgatcagcgattccagcttttcctccgcctcgattagtcaacgcagcatcgatcttcgcttgaatctccttcgctgtatgcttctttggcttggccttaccagtcatcttcaatggcggctaaaagggatgaatttgccaggaagggagaagccctaaccctaaccctaatttgtgctctactcttctgatttaggacgcgagagccgatatgaatatatatactaattttatttttaaaaatggaaataatcttatctgattttgttttttggggtgttatagtgtgtggagaggtgcatggtaatgactgtggacctaaataaaataaaacgcagtaggcagaaacgcatcagtcatcaccacatgcgacacaccaacaccaatgtctgcttcttctttatttaatctcccattgattcgcctcagatctctcgctctttcgtcttctttttcttctttccgatttgcccatcgtcctctgtcatcgatttcaccgagaaagttaccgaattttcgtgctttctctggtaccgctatgacagatactaaagatgctggtatggatgctgttcagagacgtctcatgtttgaggatgagtaagtctttgatttttgattctctctactttgatttcagtttttgggtgttgccaaaattgtacctttgtctttaagttgtgttctcgaacctggtttgtcttcggcgtttggtcggtgagaaaatggaaggaaaattgactaaattaggttatgggagttggagtttttttcgattaacaatggtttatgaacttaggtgtgttgattagttgactttgatgtaatagtaacttggctccattgatttgttgaccttgatgtaaaagtaaaggattttggatttagtatttgtcaggggttccttttctgattattggaatcaagcaaaaaaagtcaacgctttagtgtctcctgtgaaagatgtcatagttttgggaggaacatagtcaagtttagctatgtttttggccaaaaatggattctttggatatatttttgtttgtctccttttagacttaattttacgattatgatggttgatcttttgctttgatggaagtgtttcctataagttttagacttaattttaccttaatttattgatccatctcttccttttcaatcttgcttgcagatgcattcttgttgatgaaactgatcgtgttgtggggcatgacagcaagtataattgtaagtgaactttgttctagtctcgtcctatcacgtagtgttatgcagtaaaattcatgtgcttgtttgcctttctcctatgactgaactcactgaactggattgctgttttatctttttctatgcccctattcaagatactgataccttatcaaatctgcaggtcatctgatggaaaatattgaagccaagaatttgctgcacagggcttttagtgtatttttattcaactcgaagtatgagttgcttctccaggtatgtacatatgcttgctttgaagtctagataagtcaagtgctgtatacaaatggatcacaggcgtgtgactgggcatggctatgtcatatctagaatcacatttttgaagagaaaattaatttcaaaaatatgggaggttagatcataggcttgattctagagattttcttgcacatgttgggtgttgctatgatgatgggatgctctcgtgatcgtagatggttggtgggttttaataatctggctcatatgtcatctgactggtttcttctcgtttgaacagcaaaggtcaaacacaaaggttacgttccctctagtgtggactaacacttgttgcagccatcctctttaccgtgaatcagagcttatccaggacaatgcactaggtgggtatctactggcaaaacaatttagtacttctttttactatctatgtagaaaactgtagcttttctcaactagtgacctcactgttactcatcaggtgtgaggaatgctgcacaaagaaagcttctcgatgagcttggtattgtagctgaagatgtaccagtcgatgagttcactcccttgggacgtatgctgtacaaggctccttctgatggcaaatggggagagcatgaacgtaaataccatttctcaagactcttggttcccattttcttgaacagaataataaaaccttaagcttcttctgtgttggccttccttttgcagttgattacttgctcttcatcgtgcgagacgtgaaggttcaaccaaacccagatgaagtagctgagatcaagtatgtgagccgggaagagctgaaggagctggtgaagaaagcagatgcaggtgaggaaggtttgaaactgtcaccatggttcagattggtggtggacaatttcttgatgaagtggtgggatcatgttgagaaaggaactttggttgaagctatagacatgaaaaccatccacaaactctgaacatctttttttaaagtttttaaatcaatcaactttctcttcatcatttttatcttttcgatgataataatttgggatatgtgagacacttacaaaacttccaagcacctcaggcaataataaagttttcgtttttatcttaattaatgaatgaatgtcacaaagtttgtgagatgtacaaaaagcgtcgaggaaaaggataacaaggaaacagagtcgaaaccagagaaaaggcaacgcaaagattccttttttcgaagcttaacgacaacccaccttccatctgatttaagtaaagttaaaagtcactaatttaatattattgaacgaccgaaacaagtatgttgatgactttgttctcctttaaattatcatcacttcatttctcagagatttacgcacacagagttctcttcttcgtcctagtttcttctattccaggtaaatgaaataagattcgatcaaaacccagatggattttgaaatagttttcttgtgaattgaatgaaaagtgtgtatctttccttctgggttttgattgattgactgagaatatatatgatcactttatctagactaatctcgatttgtcttttgctttctgtgtttgagtaatttctcgtaaatctcatataatcaaatccccagattacttgttttgatcataattcttgattcaggtgagaagaaaaaatggcgtttgtgaccactgcggaagtgtgtgacgcgaatcaagagatgattcgaagtggccagctccgagctctgcaacccgtttttcagatttatggtcgtcgtcaaatattttcaggtccagtagttactgttaaagtctttgaagacaatggcttaatccgtcacttcctcgaagagaaaggtattaatgattcttgcttataaaattcaaaagactgaaactttactcgtagagctatgaactttcagagtatctttgacatggtttattggtattgttacattttagattcaattcttgtgttacttacttgtcaaatagtttcaattgttctttgcttgaaactatgtttgaagaagtcttaagatcatctctctatgatttagaactactgctcagtgtttatatacttcttcagtcactttgctaatcaagttcttgaatactagagacgagataggtctttcaaaaacccgagtcaataaaccaatctgttctctgtagcattcacatcaaaagctcaataatgttttaaatgttaaaacaggcaatggtagagttcttgtggtggatggtggagggagtttacgctgtgcgatactaggaggaaacccggtcgtacaagcgcagaacaacggatgggcagggatcatagtgaatggatgcatcagagacgttgatgagatcaatggttgcgacattggagtgagagctttagcttctcatccaataaaggctagtaagaaaggacttggtgaacaaagagtctctttgaacattgcaggcactcggatatgcgatggcgaatggctttatgcagatactgatggtatccttgtttctcagattgaattatccgtttaaaaggacacaagtgatgttgttgatttgttaaaatctgtaagctactacttttgtgctttgtgtttctgtaatggctatcagagtaaaagttggcttctttgaatatgattattgaactattgaatccgtttcgagttgataaaaaaaaacatttcgtaaagtgaaaattgcaaaaagatccttgaagtatccatacaagcatttttcgtagatcaatttccaataactggatacttcgagggtcattttgcagtttaccaattttctaaatccgccttcttgcaatttcacagtgcttcgttttaggtcaaacacaacgaaagacagaaaaccctaatcactccggcttcagctctgtgtgtgataatggcggcggagagatcgtccatcactctcggagggaaaggttcttctttatcttcttcctccgtttacaatgttgcttccggcgtcgctaatgttcgaattgactcttctgcgatcgagagattctccactagaaacgttccatcgatcaaaaggagctcctttggtatccctcaagggttaacgaacgaagaaactcgagcttctctggctgttctcttaaacaagcttattttgtcgacttctggtcctccttcttcatccaccgctcgttctgttcttccgcttaagattgttgagattctgaatttgaaggctgagagtttggaattgggtgagattgatgtgacagaaggggaaaacattgtgttggagaagtcgtgtgcttcgttgattgggatttgttctattatagatcacaaatcgacgactctttcacagattgtggattctgttgctgcgttgagttgtgaggttacaaaggctgatatagcttcgtttagcttgttggattcaggagatgggaatggtgataaagatgtgattggtgttgctggtgatctcaaggttttgcttaacgggtataaaggtacagggaaattagaaatagaagagatttcgaaaatcccttggattcatgggaaattcaggtatgtggtgaaaagcgtgcacgcggatgctaggagagaattgaattccggtgttaaaggaggcaaaactgggtctggaaacactgggattggtgaggctttaggaacaacattgttacctttgttaacggcgattaaaaacttgggagtgtgttcgttccttcgtgctaagctttgttttgagaagattgtggatgagaatctgaagaaatgtttatctgaaaagatctgtgttgagaatgagaatctaaagaatagctataagttagcttatactgctcatttggaagaggattactgcaggtttgctcacaaactgaatgagtgtctgggaattgtatggagaattgttggtttggaggcagttgctgccttttttgctcttgctggtggagaattgtttgttcagaagagcggagatgcggacaaagaagagtcgaagaccgataagaaaaagaagaagaatgagaaaaaagcagttgtgggaaaggggacaagcctagttatccagtttatcaaagatagattggtgagtaatgacgcagcaagtgatggtgaccagatgcattcattgatgcaatgtggggagcaaatcttaaatcttttcaacccagagggtcgcagttttgatagcttgttggataaagtgaaagagattgtagaaagtaatgaaaataggagacttcccaagcttccaaaggtaaattacaatctcgtatatggagaaggtttaggcctcagagttaatttctgatttgtttcattctatgacagggaactcgagatttcgctaaagaacaaatggcagtccgagaaaaagccttttcaatcatacaaaacgttttcaagaggcatggtgcaactgcacttgatactcctgtttttgaattgagagagacccttatgggaaagtacggagaagactcgaaattggtttatgatattgctgatcaggtagaactcttcttggctgctgtaatatcatcagtttatgtgatgatttgtttgtcaaaatttgagctcatatggatctattaattgcagggtggagagctttgctctttacgatatgatctaactgttccatttgcacggtatgtggctatgaatggaatcacatcattcaaaagataccaaatagcaaaggtgtacagaagggataatccatctaaagggagatacagagagttttatcagtgtgattttgatatcgctggtttgttcgaaccaatgggacccgattttgaaattgtcaagatattaactgaactcctcgatgagttagaaataggagattatgaggtaataacttaagttgaaagtcttaatctttcctggttggttttttctttggctatgttcttaattctggtttgtttaaataggtgaaactgaatcaccgcaagttgcttgatggaatgctggagatatgtggagtaccacctgagaaattcagaaccatctgttcgagtatcgacaagctagacaagcaatcgtttgagcaagtgaagaaagaaatggtggaggagaagggcttgtcttcagagattgcagacagaattggcaacttcgttaaggagaagggagctcctttggagctgttgtctaaactgagacaagaagggagtgagttcttagataaccagtcatcaagagaagctcttgatgagttgagtatcatgtttgaagctcttaaaagatcaaagtgcagtgagagaatagtctttgatctaagtctagctagaggtcttgattactacaccggcgtcatctttgaagctgtttgtataggagcagaggtaaaatcccgcattttggcttcctgcaattcaattaaagaaattgtagtgtatggcctttgaattcttctttctgcaggtgggatcaattggtgctggtgggcgatatgataaccttataggaatgtttggaacaaagcaagtccctgcggttgggatgagcctgggaatcgagagagtgtttaacataatggaagaacttaacgagaaacagaaacaagtaacttgccaaacccttatgctgtttgtcgaccttgttttaaaagaatggtttttgaagtttgtgttatttgctatgaatataggtgattcgaccaacggagacacaggtgttggttagtataatggtggataataaactagcggaagcagcagaactggtaagtcagttatggggtgctaagatcaacgcagagtatctagtgagcaagaggaaagaaaagcatttcaatcgtgcaaaggaatcagggattccttggatggtgatggtaggcgaaaaagaactcagtggaagttttgtgacattgaagaagctcgagaagggaagtgaagagaaagaagatcaaacatgtactagagatcgtttcgtggaagaattgaagaaactactctgagtcgttgaaaagaaatgaaaggtacacacactcactcctggttcgatgcccagacaaaaggaatcacagtgttttgcattcttttttgctgttttccttggtttgtttgataatggtgttttgcatgactcatgattgtggagacaagaacttagagattttgatgttgatgaagttttccgtatttaactaattagaggagatatacgtaaatgttaagccaattatcagaattacgtttctttcaaaaaaatccttatccctgataacctaatctgcgatcttatcagaaaaaagaaagaaaaaataagtaggaaatgaggtggaagaatataagaccgaaaagagaaaataaaacacaacaggtaaggttgtctccaaaaataaaaaaagtgatctgcagatctgtgtgatcgcatttgcatgagatgagaggaagaaagatggtacgtgttggtttctgtacctctctgccgacatgtggtggcttcaagtaactaaggtcacttgtgtattcacatctcacgtttccattgactattgtctctactcattttcgattcaactactgaaaatatttggtaagaaacaaacaggcgatttaccatcccctactgatcatttatataaaaaaacaatgagttctttggttccttaaataagaagaattcacggtggttattcttttatatacaatagtttactaagcgatacaataattaaatctgataaagagtctcaccctcatgggatgattgactgattgtgagaccctaaatatgattttgatctaaaaataaatgatctgttttattgaattttcacaattttaataattcttcatattatatattgatgatattctagtggatgtcggaaaattatgtgtaagaaacgtcttatccaagcccatgttaattctgccagcctgaaacaaaaaaaatataaatattttcatacattaatacgtaaaaaataataaaataatgattcatcagaaagaaaaaaatctgataacataatttttggatgtattattaatatagtttttttattattagagagagtgacccatctccattactgtttctatctctctcttctccattctctctctctatagagacacacaaaagtagaaagacgaagaagaagagagaacgggtttgtagttggtggttgcgtttctttctcgtttatattcttctttcttttttgttttcatctttcaattcctttttttcttttttgtttataatctaatcgacgcacgaacagagcaatctcaagctcttcttcttccccacaattgaatctgattctgagatcctcttaccttctgtttgatctctctgtttcctggtgagtctcctttcagctcgaattcgaatttggcaattcgatattaacaagtttagttttttttttctcaatgattcttcttttgattggttgcagacgaaggagatattgtagagaaagaaaggggttctcatgattctcgtgttttgagtctctttccagtataaattaaaacttacacttgtctttctttttctttttggtggaaatctacgtagatctgttccttttttctcataaaacttttgggtttaaatttctgtacaaataaaatatttgtaagaagaaaaaaacgtttttttaaacaagactcgaaaagggtcagacccagaagtctcatcttttaccttttttcttggtcagctttgaaaggcttcatcttttttttattccgttttttttttcttcattcaattttgacgatttgggtttaaaaatcactgcttgtgtatgtatgtatactggttgttgacgaattagattttgctcaaaagggttcttgcacaaagtagctggaactaaattttgaggtttgtttcttacaaactaaatcatcatatcatcctattactctttgtggtgatcattgggatctaaagacgggttttgtcttcttacagagatctcttttgcatagtttgaatcatcattgctctttccggtgagaattgtgatctaaaggttcaatctttctcgctggaggaccgtcggggtgattgtaccattgttggtctggagtgcctgctcaatataatcagggcccttaaaatggggtcctgtttatctgcagagagcaggagccctagaccgggctctccttgctctcctgcttttagtgtgaggaagaggaagaactctaagaagcgacctggttctaggaactcttcctttgattaccggagagaagaaccgttgaatcaggttccgggccggatgttcttgaatggatcaactgaggttgcttgtatctacactcaacaaggcaagaaagggcctaatcaagatgccatggttgtttgggaggtttgttagatcctcaagtcttccccctttttttttttttattgtttctaatttgggatctgaggtcctattgtttcttcttcactgattgtttcctgttttcgtgctcagaattttggttcgaggacagatacaatcttctgtggagtgtttgatggacatggtccatatggtcatatggttgcaaagagagtcagagacaatcttcctctcaaattaagtgcttattgggaagcaaaagtaccagttgaaggtgttcttaaggcaatcaccaccgacactgtcaataatgtaaccaacattaacaaccctgaagatgctgctgctgctgctgcttttgtcactgctgaagaagaacctaggacatctgctgacatggaggaggagaacacagaaacccaaccggaattgtttcaaacgctgaaagagtcgtttcttaaggcttttaaagttatggatagagagcttaaattccatggaagtgttgactgtttctgcagtgggacaacagctgtaaccttgatcaagcaggtattgtctcggtttggtatgttcaaagtttaagtcttattcattgtttcatgatctttattatgtatcctctgcaatattgcagggtcagtatctcgttgttggaaatgttggggattccagagctgtaatgggtacaagagacagtgaaaatactcttgtcgctgttcaactaactgtggatcttaagccaaatctcccaggttggattatcttatgtgaatgtatgatgttgtcctgtggatgtatgatggatccattaatcatgtttattgggtttttttttattccctcaattgaacttgcagctgaggcagagagaataagaaagtgtcgaggacgagtgtttgctcttagagatgaacctgaagtttgtagagtttggctgccaaattgtgactcacctggacttgctatggcacgtgcttttggtgacttttgccttaaagattttggcctaatctctgtgcctgatgtatctttccgtcagttaaccgaaaaagatgagtttatagtgttggctacagatggggtaaatactctctctctcagacacatatcttttctatttgcaatttttgctgctcacatttctttctattgtgatagatttgggatgttctctcaaatgaagatgtagtggcgattgtagcttcagctccatcgcgctcctctgcagcaagagctttagtcgagtctgcggtcagagcttggagatacaaatacccgacttccaaagtcgatgactgtgccgctgtttgcttgtatctagactccagcaacacaaacgccatatctacagcttcttccatctccaaacttgaagatggagaagaagaagaactaaaagccacgactgaggatgatgatgcatcaggaccaagcggtctaggccgttcgagtactgtcaggtcggggaaagagattgctctcgacgaaagtgaaactgagaagctgataaaagaagcggataacttggattcagaacctggaacagagtattctgcacttgaaggtgttgcaagagttaatacacttttaaacttaccaagatttgtgcctggaaagtgaatagagaaagaagagttgaagtgaagaagttgagaggtgattaatgatatcaaataaatcacccaagacaaggtactgtgtctttttgttcttttgtttttccttttcaactttcttcattgatctctattcttttttgagtcataattcattggttttggaacctaaatttttgtcagttttgtctttggtttatgtctttctctcttgttaatgtttatgttgttttttggtcttgtcagtaaagaagagtgaaaaaacatcacatcatgtaataatggcttgtgtctgtaattctgtgaatcccctcaggcttaattttgtcagtctgttgggacaatttcctgtttctgtcttttcaaaaagctccaattccagttacagaatttgtgtcaatccctttctctcgatcatgaaagtggcaattgtttttcaagaaatgggaatcagttcctttaatgataaacaacagaaggaataaactttgtcccaagagggtttttatctgaaactataaagcaacgttacagaagaaaggaattaagagagaaacaagtgtaagaagttttgtaatagctaaagaagacgaccatgagaggttgtgagcaccaacagtatagattgctccactttcttcatccttgacttgtattcctcctgagcctgtgtgattcagtatttcattacagtcaaaacacacctaatacatcaaatctcatagaatttgtggcaataaagacaaagataggatttgtaatgcttacagttgtgattggtccatccaatgacttggttttcgatatcgtagacaactaacttgttagagagggccatgtctgcgcagcgaaacaaatcaacactcaaattttttcagcaatttcaggatgaaagtcatttttaaaagagatatatgtacctccaagaattgttaatgaagctcctcctttagtctgcaatccaccattttgccagccaaaacaccatgtgtcttcctatagtcagttttttatgtcagaacaagaaaacaagaacacgaagttagaaacaggaacaagacttactcgaacttggaatagatattcccgaggataaaccgccaatgaaacagacttgtcaaactgaaaagtgacagttgggaaccgatctaatctgtgaatttgacagaaaatttcagagggtcaaaacatcaaacattatatactaggtgtataaaatcagtcattccatcagattcagctaaatccaactccatttcaattccaaaagcaaaaactagtacatttccagcaaataacagtaccatttcaaacattctcactaaacaccaagaatgacaaagcgatgagttaaattcttacttgtctgtataatggaaacaagtaaacgactcttgaactgtatgcaaagtaagctctggatgtgaagccaatatctgatggaaactcaagggaaaaaaacataagtgttaagaactttgtaaaataagacagaaagaattcacaagtaacagaatatagtactgacctcattcagtaacgggttataaacagcatcaggaagatacaccagagttgtaccactatcaataataactcctttgtcatctcccgaatcaaaagcattcgaagaaagttctaaaactgaattaccaacttcaattgcattgaggttgacactatagtgagctctgtgaaagagttgcaaacagtgtaagaaattcaaaacttcttgacaaagaaccaaagaagaagagctttaagagaaaggcattcacttacgatttagagagcataggtgtagtctttactttcggcgacacgacttctccaatggcgaatataccacctccattgttgttatccaaacaatgcgcaaaagaccttttgacctttccttgtgaagctagctgcgatataaacgatgaatttgattgtccaaatcccattatcccatcaaccgcagcttgtgactctccgagctgaccagactgtttagacccacatctgtataagaaccacaaataacagtgattcagagatttgcaagccacaacaagctacaaaattcatagaagaataaagctgtttttccttaaactaacccgaagataatagttccgttggtggaaccggtttgacgatttccagtaactaaatccaaatgaacaacatctttcaccaagtatccattagttgaactcccatcgccatacataataacatactgacaagtagaacctgagtgacactcagatctttggttaacgtaagagcaaaagttgtcactgcacgaaacagattttgcagtggacgaagcatccacatcataaggtgtcagctctacctgaaagataatgaaactatgaaactgaaaacataatgtaacttagagttctgtttttttttttggagggatagaattgatggtatataccagatcacttttcctaggacatctgatgcaaccagcacaattcacccataagatatcacttcctgtatcaacttgaacatggaagtctcttgatggagttccgagtccgattttagcgaagtataaactgaaattaaaaacaacaaacataaagaacaagaatcaacattttaccgtagaagacacaagaagaagaccatttcataatgagtcaagaaccaatcaaagagttgagaatctcaatagattcaaaagctttgttttttcttcagattccacatttaaaaaagacaaaaaaaatccgactttttgttaaaaaattcccaaaattacaggttctggtaaatggcgattcgaacccaatagactcaggctggctatcgccgccgagaggaatatcgatggcggagaggagtcttgagtgacggtggacgtcgtgagctctgagagctccaagatcttttactctttttccggcgaacttgcttcgaacttcaaataccaaattctccgaagccgtcgccgccgtcgagaattgcgggtcaatcagcaacgccgccgacagcaaaatagccgacaagaaccactgtctccgcctgagatccatgaccggagatatccctaactaagttagttgagaaatccaaacgaaaaaaatgaagagaagaaaaaaagcaaaagaaagaaaagtatagtttggcggtggagtacgatttaggacaaagaagaagaagaagaaaaattggtactttccaaataaaaaagtattttaatcattaactaaacaacattttgaaattaatttaagactggctagaaaattatgtactatataataagattccatgactacaaaaaaaaaaactaattaaatttcaagattgtaataattatttaaaaagaaaactgaaataactgctagaatacacttttggcagctgtaaattattttcacttgtataattcattttttcacatgaatatgcattgtcacattattaggctcatttttaacatttttttaccgtctaatgtagattttaacaaacaaacaaaaatcgactctagatgataatgagtaatgataaaatcatcagttgtcataaattgtaggattcaaaactgtttttgatcacaaatatgagagttttccttagatacaaaactagtaatcactgaactatcatgcatgttgttggtattttgtattttagtctaaaatagttaaatttatggaaaataaaagaattcatgtttgtctcatcattttgagggaccgaaccgtaatttcgcagtaagaaacataaatatcaatcttaattcctcaagaattctacacctcccgttccatctatcacgaaaacaaataattacagtaagtacccccgaatatccttgttcatccgaagcaattcgaggataataccgtctttttctctttaaaatccaattaacataaaataaatatttgctcagtccgttgagacctcacacacactctctctctgatcattcaacttttcgaaattttgcttcatcgtcttcgtcatcgtctctctgttgaattcctcaaacaatgcctctttctctccgtctttctccttcgccgacggctttatctccgactaccggaggatttggtccatcgaggaaacagtgccggattccttactccggcgtcccgacgacgaagattggtttctgttctttggattctaggaaaagaggagattcctctgttgttaggtgtagcttagaaaccgttaatgtcagtgttggtcaggtgacggaggtcgataaggacacgttctggcccatcgttaaagccgccggtgaaaagcttgtcgtacttgacatgtacactcaatggtacctactatctcttctatgcctctctctgctttgaaatttttaccattcgacatctctgattgtatatagcggaatcgatgaaatcaatggcgttgcgatgtcgaatgcttagattaccaattgatttgaattttgatactaatcaaagtttccgtggctttcaactaagattgaaaaatcttctcagttagattcttctgcagatgtggttcatttagattccatagtgaatgttttggttttgatgttggtagtctttaaagagagtttcaattcaagatgttctattcttggataccttatgcaggtgtggtccatgtaaagtgattgcccctaaatacaaagctttatcagagaagtacgacgacgttgtgtttctaaagcttgactgcaatccagataaccgggtctgagttctgctcttttatctctcttcttttggtaactcggttttcctaaaccatatatcaattgaaccatagctagtagcagctaaggataatcaatacctgtttttgttgttgctactactacctgtctttgttgttgctgctaagccattgaaactcttcattggtgcagccattggcaaaagagctaggaataagagtggttccaactttcaagattttgaaggataacaaggttgtcaaggaagtgaccggtgcaaaatacgatgatctggttgcagcgattgaaacagcgaggtctgctgcttccggatgaaccagtctctcatgtctttaccataattgtttgtatgtaatgtgaaatctggtgttatccctatatataggtgatgaggaaacgtcagcaaaagattatcttgtatgtgtaaaagtttcaagaaatatgatcatgaaaatgattatctttaggtttccagttgattcggtctgaaggatttctaagcaattcggaactgagtttggaagattcggtgcaatgtgcactagcaagtttgtatttttaattggggatatagtttgaaagttatgaattacaattgtgagaactagcacaagtcttatagaattcattctttacataaagcatcaacagtggggttctttatgaaacacaagtgattgacttgacagtaagctagtcaaaagacgagatagaaaagatggcagtaacatataccatagtagacaagtgtgttggatgggttctgcttgataacgatgtttacataacatggaacttagaatgaaacctgaatgcccaacaaagccattagttgtgaaacaaactccgggtgtccaggccatgctgcgccagttactagattcccgtcagtgaagcacctgtcgattggatctggttctagccaagttcctcctccaagtaccacgttcagtttcacggctggataagcagtgcatttccttccctgcaccagccagtgaacaggtcacatagaataaattcctcaaacaacttgtagtggcaagaaaaaggaggacatagttaaataaaattagagctacgaaggaacagtgctgaccttgaggacaccagcagcagctaagatctgttgtccgtggcaaatagacgcaactggtttctcagaattcatgaactctttaactatgttaaggacatgttcgttcaaggccagatattctggtgctctgcctccaggaatgaccagagcatcataactcgaggaaactaggtcatcaaagttagtagttaaagcaaaagtgtggcctggtttctcactgtaagtttggtcaccctcaaagtcatggattgcagttgggcagcgatcaccagccttcttctctggacaaaccgcatcaacttgacatcccaaagcttgaagggactggaaaggcactttgacttcatagtcttccatataatcctgcaaaggtcaaaaattaccaaaagtgtgatgttcatatcaggagattcaacgatcttgatatcttctaccaataaatttaaaagtgtgaggtcatgatatttgaagtacaatctaaagcaagatcataggcaaaactactgaaaacataaattcatcagaatggtaagattgcttaccccacaaagaaacaagatccttttatttgctccagttattttaccgccaagagccttgacaaaaagctggataaattcaggatgaccctcatatgtagctgcagtaatcaaactaccatcaacaacacagacatccggagttatcggttcgacccacttggcacctgcagcaacaagggaaggtccaacagttgcataagctgtacattttcgaccattgactgtgtctgcagctgccaatatcaactgcccatggcaaatagaggcaatgggcttgccagatcttgagaactctttaaccagctcaacaacagatgcagtcaaggccaggtattctggagcacgtcctcctggtataaccaatccatcatacttgctaaggtcaacttcatcaaacgttgcattgagcgtgaaattgtgacctcgtgactcaaaatatgtctgcaaattctctcagaaatacatcagaaaagtgtgcacagcttaaagaaacttgtctacaatacattctatcatccaattcgaagctcaattggaatgaaccatttctaaatatagttacaatggatcgtatatcaatagatcaagcagctacacatggagatctagagagggagagagaaacctggtggccacaaaaatcgtgaacggcggtggggcaagagtcaccagctttctttccggggcagacggtgtggacggtgattccgaaagcttgtaaagcttggaacggaaccatcacctgagagaagacgccacacactaatcagctgatatatatataagaacaaggaagaaatggtattaagaaaaagaaaaaaaaaagttcagtagcagaggaagaagatgacctcgtagtcttccatgtagtcaccgcacaagattaagacagttctcgagttcgccatttttcagcaagagagatgaagatggagagagcgagcgagagagagataatgactctgaccggagctatctggtcacggcgacgtttagggagcacatgtgtcatgtggtttcagtttcacaagtatgccagattttttttaaaaaagaacaaaattaaattaaaaatacgtgaacggcaggattcgaacctgcgcgggcagagcccacatgatttctagtcatgcccgataaccactccggcacgtccacatgtctgtctacaactatctattataattaaatatacagcttagctaagctactccaaagaaaaagtttctcactgggaggtaacacggatatgaaagtaagcttcaaggctaaataaatctaagtaccaaaaaagtaagtttgtaacccaaatcgattgaaacttgaaaggtcacaatactataaaaccagaaaaagtgatttgctcgactctgaaataaacagagtatatctggtcccatgttggaagttaataataccaagccatttgcacgatttctaacttctttctttccttctctaaatcacatcgctgatatgaacaactgaattc

SEQ ID NO: 1266 - DNA, 96540 bp, Arabidopsis thaliana
aagctttgtcacttgacggaggtttatcactttcacgatatgatagaaatgctggttggatgcggttataagaaggggactacattattcggttatggttacgatttccgtcaaagcaataggtgatttgctaaacttctctgctatttacctgaattcctagttctcgagatcatttgcttatataatctcttgcaggatcgatctacttatactaggtctgaagaagaagctggaaactgcatataaacgttcaggggggagaaaagtcactatcatctcccattcaatgggaggacttatggtttcatgtttcatgtatctccatccggaggtattataatctccaacctttatgatcttcgacagattctagctgaagtttagagtttccccttattcaaacagaataatgagtgagactcttttttttcttgttggcaggcattttccaagtatgtaaataaatggattacaattgcaacacctttccaaggtgatacggtttatctatttgcaaaaaattgttcataagagaaatagctggtttcattggaaatgacttggatttggtaaacaggagcaccagggtgcatcaatgattcaatcttgactggagtgcaatttgtggaagggttagaaagtttcttttttgtgtcacgttggacgatgcaccaactggtaataaacctcatagtttcgggtttacttgcatcactttttttctttttgaagttacatcaaagctttagatttttatttcagggtccatgaaactcttgtttttactgatgaatctgtttttaatgtttggttttagttggtcgaatgcccatctatatatgagatgatggcaaatccagactttaagtggaaaaagcaaccagagattcgagtttggcgtaagaaatctgaaaacgacgttgatacttctgtagaactggaatcatttggcttaatcgagagtattgatctattcaacgatgcattaaaaaataacgaggtagcaaactaaacatactcagcttttgtttctcgtttccattggcttgagatgttatttggtcagtggatttataatcaaacatcttattatgtattgtagctaagctatggtgggaataaaatagctttgccctttaactttgctatcctcgactgggctgctaagacaagagaaattctcaacaaagcgcaacttcctgatggagtgtccttctataacatatatggagtgtcacttaatacaccctttgatgtttggtatgcaccactattcatcgctcctatattgcctgaggctttttttgtggattggtttatgaggagtattctcttgaatcatccaaactaagtttcttggtcgattccaaatgtctttgccacattaaaaaagctgttttgtttttcttttgcagttatggcacagagacttctccgatagacgatttgtctgaaatatgtcaaactatggtgagtgaaatatgactcttcttgaggaaaatgctttagacccttttaaatcctgaaacttgctgttctctacccagccttcgatttgttatctcttggcattccttcacttacaattatactttcatgtttgattaaaaagtctctgcaactttgtatcatgtttcagcctgagtatacatatgtagatggagatggaactgtccctgctgaatcagctgcagtaagctatactttcttgtttataccgatatgagttctcggttttcatgaagcaaatctgttactggttctcttgtgcacttgtttggaccttaacaaaacccttacgtttttacctttttattgcaggctgctcagtttaaagcagttgctagcgtaggagtttcgggtagccaccgcgggcttctccgtgatgaaagagtgtttgagctcattcaacaatggttaggagttgagcccaagaaggctaaacggaagcatttaaggactcacaaagtagttgattctggttaagtccaaagcctagtaaactaaaagatcttgtttgaataagttaaaatgaagaaatcgttattcaaagtgtggttgtaattatttctgctatttttattgtacgttgtgacatatgtatgtgcatgaaattgtagtagaaagaaaagtaatctcatcaaaaattaattgggagaagaataaaaactagtgatcataccttttttgcctttgtttctgagaacaataacaacaaatgttctacacgaaatcatcttctttgcttaaacatgcaaaatcactctcttgatttctgtttcttgagtttgtaaatcatagtaggctttgatactctcacacactttacatacaggtataccattctttcgtagttgtaacgaaagaaaataatttaatgaattaaaaaataataaaaatgtagactttcgtcaaaacgatttgcaaattacacaattctgagaggttccttcatctgcaaatgctactactgattcggtgatggaatcgatcggcgacgacgatgagctccgaagcaaaacagtttctcttccgagaagaatctcgtttacgattcttcttcttcttctgttaatctccttgagtacaagggtctctggttcgttagacaaatctggaagaagagtgattgaagcgagaactgggcaagacttgatttgggttgttcagctatccgatctccatttcagtgtccatcatcctgaaagagccattgatttcaaaaacattgtgggtcctgctctggctcttatcaacccttctctcgtcttaatcaccggtgatctcacaggtttatatctctctcctgaattaaggacttggttcgaaattctcaatctttcattggttcgttagatgagcttcagtgatgttgcttctgggttcttaggttttacttgtgagcttcttatatgcaagtctcaagctttgattgctcgagctcaaaaattgaaactttagctttgggaaccactgtggttatatatttgctatatcagatacttataaactctcatctgtagttgatggttttgtttgtttgaagatttgctggttgattgttttttcttaatgtggttaatcagatgggaaaagcaaagacatgttaacaatgaagttaaatgaagatgagtggttagaatacgagagtgtgatgcaagatgttgtgaagagaagtgggcttaataagagcatattttatgatcttaggggtaaccatgacaactttggtgttccgtctgttggttcatctgttgatttcttctcaaagtatagcatcaatggacagatgggaaggaaaggaaatgttaacaccataactgttgaggttggttatgctctcccagcctggtctatagtttgttctcttgattattttggttgtgatgaaaagttatatgttacagtgtgctaacggttctgtgttttgttatacagactagcgaacgtaaacatctgtttgtcggtattgacaccacaatgcatattggattacgcggcccaacaaatctctttgggcatccaactgatgaacttttgagctcactcgactcacacctctcgcaatgggataaccaatcagcaaaacctgttgcaaaaatatcatttgggcatttcccattgtcattcacagcgctgtcacattctcaaaagagccttaaagatgtttttctgaagcactctatctcagcttatttgtgtggccatctacactcaaggttcggcaagaatcttaaaagacatcatcactctggtggtatcagtttatcagataatgacttgtttcagctgaatatgaggcagagtggtgctgaaagtacttcgaactgctcttttggagccttaccagctgcagagttctgggaatgggagatgggtgactggagaaaaaacagggcaatgcggatcatggccattgataggggtcatgtttcatatgttgatcttgacttcaagtcaaaaccccagaagactatcatattaccgacctttccattagattcacgttttatgtcaacatcctttgcacgtcacaaatacgagtgccaacatatgatctcatcatcgtatgacgcaataagagccattgttttttctcattctctggttgtggaagttgtagctagagtttatgactcaagccctggatttgataatctggtcatggaagctccaatgagaaaacatggaggcgattcttcttcttccggggcaacattcttttcacttccatggaattatagggcctttgaagatcccttacctgatagattttggctgcaaatagaagtcactgatatcaaaggcagattaaccttatcagaaatgcgaccattttccatcaatggtctaagctctaaagtttcatggacatggaatgagttccgtgtcatgggctgccagtgggcggcattatattacccgattctttggcctgctctatatagtttgtttctcgtttttcttatccccaaatgcatcatcatcgttttcaagaagcagtacactctcaagaagttcattgccaagaaaggacctatcacacttgtactgtggattctccaagacctctgcagaatgcctgtggtttggttcggttacatggcatacttgttctatctcatattctttccttggttctccggtgaagtgtttgctgattctggagacagagcatacatgactattatgggatgggtggtgacgagctcaggcgcagataggaaacatgaatacattggacaacctgatgtaatggttgtggtgatcccacatgtggtctttgttgttatccccagtgtcttggttgtgtgttgtctggttgctgagagagaaatctacaaagatcacattcgaactgtctctggtaagaaagaggatgaccatgaccggggaaggaagaagagatcacaacgccgctcactgttattctcgaacagaagactgtttcggaaatcggtcttgctggcttcattagctctatattggaagcatttcaaggtaccacttgtatattaactaatgattcgtttatttccatcttgcattggcaaaaacctgcgatcatgttcatccgttgtctgttttcattctgcattcacttctgaagtatattttgtttttattgacagaattgctgggcattaggtagagcttatgagatgaatgtggttcattttccaggttacagccttgtagttccattgttgctactatatgttatctgcaaaacccataaagttccatgagatttgaatctatggaagttttggtgtttttatgattttgattatgaagaaacacatttatagggggttttcttatgtgttgtttgatagagttgatatactatatagatcaagaaagttagaccaaattattctgtatccttttgcttttatttttttttacagctagaccaaaaaagtacaagtggttttgctcaatttggaaaaaaaaaacattaaaaatattaaaaaacaaaaatgaataatgacgtaagcgaaagcttctgtcatagtctcacagtcacaacaaaacagtcaatcccccaaagaattatggtagcagtcaataatcccataaataatcttcttcaacagtttttttctcttaaatttttgtttcgaaaaccgctcactacttcttaatcgaaatgactgactgagagctttagcttttgatcgttcgtcttcgtgattcctttcttcttcttctctccgctactgtctgtacctgaaactactgtcctcgatcgctgctttgtctttcgaggttctctaatttgttttttcttattattatctctggggtttgcttttgcgttaatcctctttctgctcgacttacggcgatttttgatatttgcagattaaaaagttaggtttttttttcgtaaatctactgtatatgttttagatgaccatggatgctgatgcgatggaaactgagaccactgatcaagtctctgcttctcctctacattttgccagaaggtttgcttatcttctgatatctctcttctaagctctgtttagaagaacccatgattgtgtaagtcttacatcttgtatattttgatgctctgttaccagttatcaggtagaggcacttgagaaagctatcaagcagaacactattgtcttcttggagactggttctggcaagacccttattgctattatgcttcttcgtagctatgcctaccttttccgcaagccttcaccatgcttctgtgtcttcttggttcctcaagtggttcttgtcactcaggtattggtgttaggattggagttgtggacaaagggattcaccaatatacggacttgtcctttgttctacaatttctgcattattacacgtgctccttttccaaatttagaaactttagtgttactttctccattatttctgcatttttccttgtgtgttttacgcagcaagcagaagccctgaagatgcatactgatctaaaagttggtatgtattggggagacatgggggtggacttttgggattcttcaacatggaaacaagaagttgataaatatgaggtctccttttcttattttgaccaattagacatacatatatttttctggtgaaagtgttatgaggatgcgtttcattattactcttttagctcaccattcataagtcttattttcataaaatcttgcttagctgcatcacagtctcttatgatttgtcaccatattgaacttgtttttcctactatctgacgctaatttccactgaaaggcactattactgtttcctgtccactctcgatgcacattcttataggcccgttctcctttggtttcataagtgcaggttctggtgatgacccctgccattttgctcgacgcgttgaggcatagttttctgagcttgagcatgatcaaggttctaatagttgatgagtgtcatcatgcagggggaaagcacccttatgcttgtatcatgagggtgagcatgaaaagatattcctagctttcgaactcagacctgaatgaaatctcattgaaacataggaaatttttttttatttaaaagaactagtttataatgtagttttccaccttttgacaacatagctccttttcatgcaggagttctatcataaggagttaaattctggaacttccaatgttccacggatatttgggatgactgcttcacttgtgaaaacaaagggtatatatgcatctaacattctttcttgattgcatttatacattatattttgtatttgctatttcaagtttggtttttcttctttgtctttcttctctcaactaaggtgaaaatctggatagctactggaaaaaaattcatgaactcgaaactctaatgaattcaaaggttgtttcttttctttatcttgaattttttgtattgtccatcctgttttgtatgatataatgaaattttttttgttctaatatgtgaaaggtgccgttaaaatcagaaacatttacttaaggttgatatttttgtttgatgtagtgaaactagtgattgcaaaatgatttttccgtttatatttcgatactatagtgaacatacatcattggtcattatttcttcgtagtatgaccacatctgatgcagaagcataatattttcttagttgctattttgaactgtacgaagactgttgatgcttgacctgtctcagtacttagaactaaaccatattttcaaaaggtagaaatattataggctggttttattttgcttactccatcataataataatttgtttgattaataaaggtctatacctgtgagaatgagtctgtgctggctgggtttgtccccttttctacaccaagcttcaagtattaccagcacataaaaataccaagtcccaaacgagcaagcttggtagagaagctagaaagactaacgataaaggtacgtgaactaagaataaatgtttatatgcgagtggcgtcttttttgggttttgaaagttttttgaaatttaagaatgtagctcatatttatgatcattctttaattatgaaatgttaactgatagtagacttatttttcagcatcgcttatcccttggaaccttggatctcaactcctctactgttgattctgtagagaagagactgttgaggataagttcaactctaacatattgtttggatgatctcggaattttgctggcccagaaggtatttttgttcttggtactgctgttatagattacataggaaagtaagaagtgttgtttttttttgttttttctacaacaggctgctcagtcattgtcagccagtcagaatgactctttcttgtggggcgaactaaatatgtttagcgtggccttggtaaaaaaattctgctctgatgcttcacaggagtttttggctgagatacctcaaggtggttttttgtttgctaacatttagtgattgaagtttcattcatttcttatatttcctcacctcttttgttcttttcatgtgtaaataggtcttaattggagtgttgcaaacataaatggaaatgcggaggcaggtctcctaactttaaaaactgtctgcctcattgagactcttcttggttataggtttggattgcatgcacacatttttgtttatgcttattatattggagttagatatgacgatctgaaatgataaaccttgaatgttggacattacttatatcaatacatattggagtacaatggttatttaaaatctgtgttgttttccagttctatttctctgaatttttattgatacagctccttggagaacatacggtgcatcatttttgtggatagggtgataacagccatcgttctggaatcccttttggctgagattcttccaaactgtaataactggaaaaccaagtacgttgcaggaaataactctggtctgcaaaatcaaactcggaagaagcaaaatgaaattgtggaagacttccggagaggcttggtatggtcaaattactgtgaactgttgttttatttgcttactgttatctttatttctgagtaacctgttcgtattcgtaggttaacatcattgtagcaacatctattctagaggagggtctagatgttcaaagttgcaacctggttatcagatttgaccctgcatccaacatttgcagtttcatacagtctcgtgggcgtgctagaatgcaaaattcagattatttgatgatggtggaaaggtctgttacatatttggctggtcttcagagagtttacgatttgttttgaaaacaatagctccatgcttaaaaaaaatataattctttctcactcattgccactggcagcggagatctgttaacacaatctcgattaatgaaatatctttctggtgggaaaagaatgcgcgaagagtctttggatcattctcttgttccctgtccacctcttccagatgattcagatgaaccactcttccgtgtcgaaagtactggagcaactgtaactcttagctcaagcgtcagcttaatatatcattactgctcaaggcttccttcagatgagttagtctaataccagcttcatcagttagttttcctttattcaattttttgtttctttacttctttctgatttttgtttctttttgtcttctggaaaaggtacttcaaaccagcccctagatttgatgtaaacaaggatcaggggagttgcaccctttaccttcctaagagttgcccagtaaaagaagttaaagctgaagcaaataataaagtgttaaaacaagctgtctgtcttaaagcttgcattcaactgcacaaagttggagctctaagtgatcatcttgtgcctgacatggttgtggcggaaactgtctcacaaaaactcggtaatcttctgcattttcatatgtaaatttggctctaaataaatcacttatctatgaggttcgagtttgcagagaaaatccaatataacacagagcagccatgttacttccccccagagctagtctcccagttttcagcacagccggagacaacataccacttctacttaataagaatgaagccaaactctccaagaaattttcatttaaacgatgttttactaggcaccagagttgtgcttgaagatgacattgggaacacaagcttccggttggaagatcataggggtacaatagctgtgacattgagttatgtgggagcttttcaccttacacaagaagaggtattcatctcagttaaattcctatgaatcatttctcatttgaattccaaattcgatcagtctctgtattttcttttgttcaggtccttttctgtagaagatttcagataactctattccgagttcttttagatcacagtgtggaaaatttgatggaggcattgaatggattgcatctcagagatggggtggcacttgattatctactagttccatccactcattcacatgaaacatctcttattgattgggaagtgatcagatccgtgaatctaacttctcatgaggttttggaaaaacacgaaaattgttctaccaacggtgcttctcgcattctacacacaaaagacggcttgttttgtacttgtgtcgtacaaaatgcattggtttacacaccacataatggatacgtctactgcacaaaaggtgttctcaacaatctaaacggaaattcattattgaccaagagaaattctggcgatcagacttacattgagtactacgaggaaaggtgcatataattctcactgttgatatacttctgcttattttattctcctttcagatgttgcattctataattttgttgcaggcatgggattcaattaaattttgtggatgaacctcttctaaatggaagacacattttcacgttgcatagttatcttcacatggccaagaagaagaaggagaaaggtttaatctcttaaccacaatctgtgattgattgcatcatgatttcttgttgaattccttattccttatcttgcagagcatgacagggaatttgttgaactacctcctgagctttgtcatgtcattttgtccccaatatcagttgatatgatctattcatatacttttatcccatctgttatgcaacgcattgaatctttgcttatagcatacaacctgaagaaaagcatcccaaaagtcaatattccaaccattaaggtagaacttagaacttcaagctcatatacatattatatagatttttcaatttggtttttcaccaaattcttctggttcacttgtggctacaggttttggaagctattacgacaaagaagtgcgaagatcagttccacttggaatcactagaaactcttggtgactcttttctgaaatatgctgtttgtcagcaactattccaacactgtcatactcaccatgagggtcttcttagcacgaagaaagatggaatgatttcaaatgtcatgctctgccaatttggatgtcagcagaaacttcaggtgaacatcttcagtcttaaattaatttcatggagtaagacttaaaatgtaaaattatcttctttgattacagggatttatccgcgatgagtgttttgaacccaaaggttggatggttccaggtcaatcatctgcagcttattcacttgtaaacgatactctacccgagtctagaaacatatacgttgctagtaggaggaatctgaaacgcaagagtgtggccgatgttgtagaatcattaattggagcatatctcagcgagggaggtgaacttgcagctttgatgttcatgaattgggttggaataaaggtcgactttacaactacgaagatccagagagattccccaatacaagcagagaagcttgtgaatgtaggttatatggagtcgctgttgaattacagttttgaggataagtctcttctagttgaagcattgactcatggttcatacatgatgcctgaaattccaagatgctatcaggtccggtcacttctccatgaagttaatcatatacatgttattcttttagcatttcatatattaaactaatttgactctactgcagcggttggagttcctcggtgactctgtattggattatctcataaccaagcatctatacgacaaatatccttgtctgtcccctggactattaaccgacatgcgatcagcttctgttaacaatgaatgttatgccctagtggcggtgaaagcaaacctgcacaaacacatcctgtacgcctctcatcatctccataagcacatctctagaactgtcagtgagtttgaacagtcttctttgcaatccactttcggatgggaatccgatatatcttttccaaaggtaacagagtttaatctaaccacatatagtaactctactcgactgtgtacacaaatcctttaacggcttaccttttttggtctcgctatcaggttcttggagatgtgatagaatctctagcaggcgcgatatttgttgactcaggttacaacaaggaagtagtgtttgcaagtattaaaccacttttgggttgtatgataactccagagactgtcaagttgcatcctgtgagagagttgacagaattatgtcagaagtggcagttcgagttgagtaaagctaaagatttcgattctttcacggttgaggtgaaagctaaggagatgagttttgctcacacagcaaaggcctctgataagaaaatggccaagaaattggcttacaaagaagtcttgaacttacttaagaacagcctggactactaaatttctttttcttgtcaactttattgcattcattcatgataataattgtcttagataacttacattactcttgattaatatttgataaatttatttattttttgtttctttcttctctccattgtgaattatttaataaccaagtttgtattatactttgaatttgttttacacggaatgtcttaatcaaactaaacaaactatactaaaatcaatctctccaaataatatgaaaaacaaaaaaaaaaagtaaccacctaaaattactttttaaccatcaagctaagagccaaaagttcttgtgacgcttggttgtgatcaagtaaccaccaagtttacggttctttggtttaaccgcaatggtcatacatgaagccttctctaggcaatacttgagagttccggctcggcctcgccgtttcttccatccccatctcttcaacaatctccacactggcggtttcttctcttttccaacaactaatagactcacttgttgttctttagcttcttccactatcttctctcctttctctttctcttttccttgtagccttcttatctcaacctctatctgttattatatataggcataataaaatccgtcaaatttgagcgattgtagacgcagcaaatgcctttttgttagaatttggactcacccctggtcgctttgtttggcagagttttttaagagtatgaacaagttcatcggtctttacttcacttttccggttcttcctttttcctatagcgaatagaaatccttagaattcatatctcaaaaagtcaaaccaaaattgccaaatgaacactcaagatagagcaataaccttttctaaagggtttggagaaatataaaagaaaaagatagtcttgtgattgtagtgtatgtttcaaagcccactcaagagctccagttgatgcaatcactttatcaaccaccaccatcaccctattccctgcctctgtaatctccgcctctactgcttccaccgcggcttcggtctcttcgtgttcacttttgtaaccgctctcaacgatcttgcagccatcatcttgttcctctccttccccttctcctcctcgttctttctcttcttcaaactcttcatactcactggtgctgtcgccatcggtttcctcttctccgagaaactcaattctctgatctatttctatggaactagagtctggtttaaacccgatggttgaagaacggatccggacatgtcttaggctcaacttgactgatttcttgagcgatcttgccatgtctcctatgaatcttgattctaacaaccatacgcttgatcctgatcattgttattgtccgtatatacaatacaaacgtgcaagctaattaaagaaaaactaatcacaaaagagttcctaggacgtgcataccatgagaatatactaatccaaaaacttcaaagacagcttttcaagatcttattaatgcaacacacgttaatttgcgtctcagttcttacaacctcacgttaaatatatcacttccatttaattccaatgatcatcgaactttagaagagacgtgtgactgtgagattaatctcctaaaatttatatatttgattttatttaactaaacttccagttttctctataacggctagtttgtaatctgtaaagaaaaataaaataaaaagaggtggacaaattattctcgaaacacaaattataaaagaagaaaaaaacttctttatgttcatatgaaagaaatttaacactaaaaattttaccgatagatccacacacattattgattaacagaaaaatatatctatacattttcacaacgtacggagaaaaaaaataaggaatcacatacttaataactctcgactaatgtctccttccgtacattaataccaacaaaagagaggcattttggtgacgagaaaataaattaaaaaacaaataggattttgttgaattagggcacatgatcttcagctatcgtctccaactgtggtttcttagatttcgaaacagagatccgatgaataaactctgccgccgagaactcttctatgtcttcaagattcagcttcggtccgatcagcctcacgtcatcattatcttcattttccggagacactctcctatgaccgcagtttttcgtgcgtttctttccggtgaggtagagcctagccatgtcggaagcgttggctgcagaagtggcacgtgtcatcggaaatgcgacgtacacatgacagcctccaagatcaagatcgtcgtcggcggcgagtgggataaatttacggcctactttcaccgacttggtgtcgacgaggaaatagcttggcatctccatcatgagctcggctgctttcgtcggcacgtggatgtcacgcactccaccgtcagggagaatcacttttgccaacggtgacgatgacgttttgtttagagcgcatgaaacgtagttgcccattgttattgtgttttttactagctatatcaagaaatcgaaagattttacgagtgaagttaaaattaattttggattttgagaagatggaagaagacaaacggaagcttaatatagaaaacgagtggaaattttatgcattataatagaaaataataatagtagtataaaatatagtgaagatggacagcgttgcagatagaggttgacattagatagttgaatccgcgtcttagcatataatatcattaagccgtgttttcagaaatctatggacattatttattttcagtttaacccgcataaaaaggtaatgattaagagatgataatgaagtcgatttcataatgttaaaactaaatttgacatttgtagtgttagtatacttggtttttctgatggtgtcgaatattacttcaaatattttgataaatttatggaaaaaaaattaacattattttcatctaaccaaaataatttggataataaaaagaatgcaaaaagtcaaaagctcaaaattattttcaattagaagaaagttatttttttaatgtgttgagtcaacgtagcttacccattttacacatcgtgaagagacggtgacagtattaataattttgttgtattaactaatataaagttccctaatatttaggggtccaaagtgtgaagggaaaggacgcacaaattattgtactacattattagtttaaccaaaatcaaatattatttatatagtattcgcttactcttccagttgttatcgcaaaatttaaatcacgtgtgggatccacggtcacttcttaagacacctgtgttttcggtttattgagttcaatgacgcgacggttccgttgtctatgggatcggactgttcttgttgcttcaaggcctaaccttttctttcagctaatgtatttcaaatttgattcctaaattcaaatttgaatgtaaacgggatacttgtgcttcttctactctaaagccatcatagctttttcataaatgaggacaaatttacccaaaacacctcctgttacaaattcgtataagtttgatactataattttttgtaaacaactcgtaagtcgtatataaaccatttaaacttcgcttgaaaaatcagagtaagctagtccaatttaaacgatatttaagcactagaatcataacggaaagatctttttatattgttagtgtaactaaaagatcttcttctagcgaaaattattatttcctttttatttcttgtatatttacaaaactctgaaacccgttagaggcttcaccaagattcaagcatcaaagccactatatatatatcactcacacttgttaattaattatcagtatttgtttcttcatcatgatgaaaccattttctctagtactcgttcttgtcctctcatcatctttagcaagtgcaaccgcatcctccttattctcgcctccacttccattttcgctctcttccatcttcggtgggattatcggtaacagtgataatagcgagttagctaggatgtgttttccagacctaggagacggagaagcctgcgtggcggaaatcttcggttcattctttagtcctcaaattacgataggaccagaatgttgcaaggccattgttgagatcgacgaagactgtgctcaagccatttttaaaccactcagcaattctttctttagtagttctgtcaagcagtattgcacttacatcaatagttgattgaattttctttaggtttactttagtgcttgttttgtttaatgtcttttatttgtttcttgttttctatgttttatcaacactcaacagtaacttcattttaataagtttaaacaaaattttgaattggaataatatttcaccgaaggtgttggtacgtgttccatcaatcaatgaataaaaaaaaataagccaataaaggaagaaaagttgaagaatcaaattcgcctttgctgaaagttgacaaagaatattacttttcttggagagcaagtgagataaagagaattcactaatactctacgtgtgcaaatacatatcttgaatcttctatggctttcatcagtacacaatttaagatttcgactaaaagaaaaccaaaatgtattcgctcacatcactttaaaatcatgttttcaatatcaagtatattaaataattcttttcaaactatatgaggttactgaaatgttatgcacacaaaagaaataaaaagacaaaactattcaaaagaaatgactagtcattaatactctcagtaacaaagaattttaagaaaagaagcgagagagagagacctagtagtttcaagaatctccccatagaagaaaaagacaatcattaaatatctcgaattctgtgtgcgccaataatattctccaaagtctaaaccatcaaaccggttattatatacatataaattagactaccgtaatcaatttctacttagagatcatcgagagggcaagagagaaaaatgggaaaggcacgtacggtgggagtgggaatggactattctccgacgagcaaattagctctccggtgggcggcggagaatctccttgaagacggcgacaccgtcatcttgattcacgtccaaccacaaaacgccgatcatacccgcaaaatcctcttcgaggaaaccggttcacgtatttaacttactacatctctttaatatatattagtagagttaactccatattatgatcaaaatttgtattttgatcatttaaaagttacaaactaattattgcagcgctaattcctttggaggaatttagagaggttaatttgtctaaacagtatggacttgcttacgatcctgaggttcttgatgttcttgatactctctctagggctaaaaaggtaaatgttcactttcgtaattcgtaatcttacacaagttaacaactattgctttaatatcattttgattttctttcaaataatgatgtttaattcattgtaatataaactttaaacaaaattataggtgaaggttgtagcaaaggtgtattggggagatccaagggagaaactttgtgatgctgtcgaaaatctaaaactcgattccattgttcttggcagtcgaggtttgggttctctcaaaaggtaaattcttatgcttacttactatatatagtctagtttcgttggttaaaaaatttcgaatttcagtaaatttaggcaatatagcttcaaataattgaaactgatttggcttttctcaaattaattttagtatcacttatttcgttattctgtggttaatcaaaaggagaattggagtgataattaataattacgttatctgtggggttttttgttgttgttgtaggatcttgctgggtagtgtgagcaatcatgtggtgacaaatgcaacatgtcctgtcacagttgttaaggctaattaaagtgtctcttgttctttaattggacccagttaataacattagtagttacgtgtgtcactcatgcattgttttgacatttatacgtttgttgccttctacaaatttgtgtgaaactgattggtactgtttcattaataaatttcagttaaatgatatttactctctttttgtttgtgatttgtgaacgttacgtaaaaatcacaaaaaaaaataattagtttttctaattcattcatgaaaaatcttcgtggactaaacaaaaaagatgtgaaaaaacaatccccatgtttgatccagattaattcgatccgttaatcaaaagatggtcttaatgagcataattcggggataaagtcgaatatagaaatagttgttgaaaagagaaatgtttggattgaatcttgtcagcttgatgtgtggttgatcacatgaccaatctatgtatggaatatggatgtcgtgtgtgctgattcattcagatatgacaagtggtggatgggataattcacgatatgggccagattatgagtttgttttaacttgaatggcaggccgaatcataatggattcatgatcattatgtttgatcatagcctagttggacttgtatccctagatcatgatcaaagtgggcttataaacatggccgagatgggtagttctaaatcaatttgttggatcagaagaaatcaagaaagagacagtcgttggagcttttctgatctgcttttggatgatcacccattagattgaaaattaaatttttcattctccgctcgatggctgatttgtaaacttgttccttcatgatagaaatttatgggctaaatacagaaagtgaacgttagaatttggttttgggtagaagaacaactatcatatgattaaagattaatcagatgatctaaagatagttttggtgagtacagttcggaaatatagccgttgatgcatgatgtgtgactttcaaaaatagaaatagccgttggatttaaatttaaggtcaatgaacaactgtcagatatgcttaaaattaatctaatgatccaagaatggttttggtcaatacttcgagtatatatagttgctggtacgtgatatgtgaccttgcttcaaatataaaacgagccgttgaattttaaatttgggtggatgaacaacgtactgtcaggtatgatgattaagattaattcaatgatccaaaatccaaatattgtttcggtagacggtggtacttaattagtgagactttcaaatattaaaaagagatgttgaatttaaattttagtttgctcaaaagaaaaagtttctagtaaaaacaaaacaaattatgtttaattaaggtatgtaatatggttatgcataagactagtgttgatgagatgattcacgatgtcgtatggattggattatgagtattcttaaactcgaatgggttgccaaatcataatggcctcattaatttattgtactaaactgaattataatatatgttcttgagcgaaaaaaatccataatttataatttcctatctagctatattggattgatccggctgttgacaatctggtcctgatttgaatcggtttctcgaatcatgcaccgtaatcgtagtctagccatttaggattgtatcactaacagtagtgtcactttaaaatgttggagatttagactatgaatagtaatataaaccgcacccaaaaccgcactgcaacaggtaacagtatcaaaatctctctctatatatatgtattttcgttactatttgaaccgcaccgcacttctcccacaccgcaaaacgcagtcatcattcggacccttaagacaaaaataataataacaatttatatagaattttaccaaaattgatgtcaaaaagagaattttttattattattttaaaacctaaaaactaatacaatatagagacgtaagaaaaatgccatcttttttctttcctcatgctacacacctttagatcaatgtttcctatagattttacaatttttctttccacattactaatttgagtatttgcaatctgttgaataagttgtcattgttcttaaaaaggtacttttcaataaattgtcatttctatctatataatcagtgatatctttccattctcttattttataaataagttagcataagaaaatatataggactaaaaccatttaattaatatttaaaacactaattatgaatttgtttaattttttactaaaaatttatctgattagcacaagctttttgtaataaagtttacaaacctttttgtttgtacaatagacatttagctagatatcaaaatttaacatataaacaatagaaaacatttatgacaaaaaacaatttagaaaacatatcaaaaagcctaattgacacttgacattgttgaaactattgatttaacacattgtattttcatattatatataaatttatattcacctttcaaaaatacatttaataattataaactaaataaaaaatgtttgtttgacttgttttatttcagccttaaaaataaatcgaccaataatatttagaaagaaaatcttatctcaataatttaagttttgcttagatttaatttatttgttcacctcaatgcattttatacaaaacaaatattttatatttaatacatatgtgaattaaatattaccttttaacaaataatgtaattaatatcttttaacaaataattttacccactcaaatagtaatatctatatttccccccttcttccctttttatgaattaatgtatattttaaaaaaatatccttaagaccaccctttttcccctataaatactgattaacttgtgccttaacaaaaacaaaaaattattcgcaaacacaaaaaaaattgttagtgaagaacaaaatggataataatggtggtgggagctcaggcaatgaacaatacacttccggagacgccaagcaaaatgggaagaggacttgtcatcgccatacccctcaacagatccaaagacttgaagcgtaaaacctttattgtttttttcttgatttctaaactaataattgatattcttttattacaataattattatgataattgtttttgattttttgaatcaagttatttcaaggaatgtccccatcctgacgaaagacaacgaaaccaattatgtcgagagctgaaactcgagcctgaccaaatcaagttttggtttcagaacaagcgaactcagagcaaagtatatattcaacttggcaaatcctttttaaatatatcttcaataattttttccaaccaactaatatatatattttcatatgctatagactcaagaagatagatccactaacgtattacttcgtggagaaaacgagactctccaaagtgacaacgaggcaatgctcgatgcattaaaaagtgtgctctgtccagcttgtggaggccctccttttggcagagaagaacgcggacacaatctccaaaaactgcgtttcgaaaacgcccgccttaaagatcacgtaaacatatgatttgttccataaaactttcactatttctattttctttttggatctttatttgaccatcatcgtatttttcatttaaatttacgaacaaaaatatataaatctttaagaaattatattcgatatcttgaaaatgtatataaaactgtaaatattgattgtgaatatagtagatatacatatacatatatgccactaactatttctttttgtgtgaagcgtgacagaatctccaatttcgtagaccagcacaagcccaacgaaccaaccgtggaggactcattagcttatgttcctagccttgatcgcatctcgtacggaattaacggaggcaatatgtacgagccatctagctcatatggaccaccaaattttcaaatcatccaaccacgaccactagccgaaacggatatgagcctgttgtctgaaatcgcggcaagtgcggttgaagagctcaagcggctgtttttggctgaggaacaattttgggttaagtcgtgtatcgacgagacttatgtgattgatacagagagctatgagaggttctcgcatgcagtcaaacatttcagcagcactactgctcatgtcgagtcgtccaaagctgtcacggtggttcatgtagaagcgataaacttgatccaaatgttcttagatccggtatttatttgtttgtctattcttcgaaaaaaatattcttttgtttttacttttgaggtttggattaaaaatgtgaaaatggtacttgtttcttgtaggaaaaatggaaagagctttttccaacgattgtgaacaaggccaacacaattcatgtgctcggatcggggcttcctataagaggaaactgcaatgttttgcaagtggtaagaactatttttgtagtgttaacttcaaaatgttaccaatcaatattaacgtaacctacttctattttccttactgttaattgagtttaaggatttttttattcgaatttaggtttgaaggatattagataaggtttgtcttcatgatcaatagaatcactaacacatttggtgttttgaatgtgaataaaattcgatagatgtgggagcaactacacattctgtcgccactagtgccagcaagggaattcatggtcgtcaggtgctgccaagagatcgagaaagggatctggattattgctgacgtgtcacaccgtgctaactttgactttggcaatgctgcttgttacaaacgtccttctggttgcctcatccaagccttgcccgatgctcactccaaggtatatatctcttcatcgcctcttgattgagctcatatatgtctttttctatattgcatttgattgatgctatcaaaacattgtaggtaatgtggatagagcatgtggaagtggaccataaattggatacacataagatctatagagatcttttaagtggcgggtcaggctatggagctaagcgttggatcgtcacacttgagagaatgtgtgagaggatggctctctcctccatccaaacccttcctccaagtgaccggagcgaaggtacgtatcatctatacgactaacttaactaatgacttccaatagtgaaagtgaaaatgttatttttgtatcacttgagttgagtggtatgattgtatcattttgaatttacgagtcaaaaattgaatttacaaacaaattttttctgtttaactaaaaaaaataaaactaaacactagtcaatgttttcttcgatttctataaaatggattaggaaaaaattgcgagtcaaaatttggttgacaaataaacggaagtattttttccccaaaataagtgaatgtactggcacaagaaacataaaaaaaatcttttctcgtatatatctaaattatttctcgatattcaagatttctaattttaaattttagaaacaaaattttcgttctatttctttttgtagttgcttattttttttttaatcaaaagtatgacttatttacaaaatgttcacaaaaatgttgctttttttttgtcaaaacacaaaaatgttgcttatttaagattatttggtcttatcctgattttggtttttggagtttgaaaaaaatataaaaataaatgaattaaggtcacaggtcatatataatttaactcatctactatgatgctagtctaatcagctaaaaatatgttaagctggtcggataatttttattttatctctaggttctaaccctatgacatgcaacattattttactacagtaaattgtttgatattggttgtatcacgtatagtttttacaataatgtgacgtttgatcaagttatatattatattttggcagtcataacgacaggagaagcaagaaggagtgtaatgaaattaggtgagagaatggtgaagaatttcaacgaaatgctgaccatgtccggaaaaattgactttccgcagcagtcgaaaaatggagtgagagtctcgattcggatgaacattgaggccggtcaaccacccggtatagttgtcagtgcttcgtcttctctcgcaatccctctcactcctttgcaagtcttcgctttccttcaaaacctcgacactcgtcaacaggttctttcttgatctgcatgatcatcaaaatttctcaacttaaatcacgtattaacaacaaaaacgtttacgtgtaacagtgggacattctttcctatggaaccgtagtcaatgagatcgctcgcattgtcaccgggtcaagtgaaaccaactgcgttaccattctccgggtacatgtatatctctctctcttcaacggtcttttaactattaatcgtttgttggcaaattatataactctaataacctataatcgtcgtacatgtgtatatatacattagccaacgcacgaagagaataatgacaagatggtggttcaagactcatgcaaggatgatatgttgatgctgcaagactgctacatggacgccttgggaggcatgatcgtgtacgctcctatggacatggctacaatgcatttcgctgtctccggcgaagtagacccttcccatatcccaatccttccatctggtttcgtcatctcaagcgacggcaggcgatccacggtggaggacggtggaaccttactcacggtggcctttcagatccttgtctctggaaaggccaataggtcgagagaggtgaatgagaagtcggtggacacagtgagtgctttgatcagctccactattcaaaggatcaaaggtttgctcaattgtcctgaatgttgagtgagggaatatgctgtggaagattctcttttgtttttgttttgttttgagatatttctgtcgggggattttatgacctcgattggttatgatggttttatggacatgctttaagtcttaagatatttccgatcggtaagattacagaccgattgatgaaagtaataaaacaacccatcctatcatgggtttttcttattggttttggttggtttattctattggttataataatttactcacagtttgaagataaatgcttgataataatgacgaaatcgtaaatgtgattgaacatttgataaagaagaatattcataaaaatacactaattatttagttatatatttcacgaaaaattcataagtttatgaatgtttcagaaaataaataaactaatttagctttcagaaagtaagatcagctaacttttttgcaaatacaaaaacagacaatctgtatattcttgaaactcaacattcttaaaattcttaataaactcttacaatattccaaaaaaaatcttaaatttttcaaatttcagattcataaatattttatttttatttttatatattaactttgataatttggaataagatataagaataacatacataaagtatgtattttgaaactactttttttagtaaaactagaaaatgttatacacacaataataaatatgttcatgagtgtctttttttttggtgtaatgctatgagcttttacatgtgaacatatagcgtttctgaaatcaaacttttacctccttttttttttaaaaccacttttacctccttataaattgatctttatatgtattctcttagaaattagtttgcagtttgtatgcatggtcttataaaaaatactattatttaatcaattttataaataacattatttataaatctcttaatagtttaaagttaatttggttctgtttatgtaatatgttgggctattaagctgtgtaccatttatttctaacacaatcaatagagaaatattttatataaaaaaatcaaattctattattattatttatttaaaagaactgaaaaaaggaaacaatatattgacggtaataagaagaagccggacggacatggaaaggtgacacgtgtatattgacaattggctcagataagacgacagagatatatatatttgcggtaacaccacgcatcgtcacttcatcaccactactcccttggcctataaatatttctctgcttttaatttccaatttgctctgattcattcacaaataacaatcctctcttcgtttttgtttttcttttggatccaaagctctcttaaatctgtaaatcaacaatggccgccaccactgagaatctccctcaactcaaatccgccgtcgatggccttactgagatgaggttcgtgttctctgattagtctcgtttcttcctaaatctgttggatcttcatgattccagatctgctttttcgttattatttcgactgattttttttttaaatgtttcagtgagagtgagaagagcggattcatcagcctggtttcacgttacctgaggttcgtctttctctttctcgcttccgattgtgtttttgtgtggatgcttacttccgatatatcaatcgattggttgttgatcttctcatgaatttgtgacgatcaaacaatactgcctagtttatcatgctgtcggttattcctgatcgtgatttctggaattgctttcaatctgaacgattgttagacctaagtttaatcggatctggatatagatctgagttgttttcgtcgttgtttacataataacaacagactgatttgttccacaatcactttgtattgaattttgaagcggtgaggcacaacacattgagtggagtaagatccagactcctaccgatgaaatcgttgttccctacgagaaaatgacccctgtctcccaaggttttattattgaagcttttttggtttgtttcaatatgcttgcagtttctctgtgatactaattttaaaaataatgtagatgttgccgagaccaagaatctgttggacaaacttgttgtgttgaagcttaatggaggtcttggaacaacaatgggatgcactggcccgaagtaagcattttcttgcttgtctgttttagtctttttttcttttcaatcttattgtgtacagtttaaaatttgctatcatcgctagtgggtgtaatgctcaaattgaagatagtgaaccatgatccattgtgaattttttggcatagcaggcatgtactagtagtcagtctaagattcagggagtgaagaaattatagcttacttgtgtctgtgcaggtccgttatcgaagttcgtgatggtttgacatttcttgatctgattgttatccagattgaggtatggcttctttttttgtttcttactcttccctacttaatgtttgctaatctaatgatcaatatattgctcactcgcagaatctcaacaacaagtatggctgcaaggttccgttagttctcatgaactcgtttaatacacatgatgacacacataaggtacttctctttcactgtggatcacatttcttcacttctatatttctgctattcttcttggctgactgtttttgtcatattcagattgtggaaaagtacaccaactcaaatgttgacattcacacttttaaccaggtttgtgatgtcgatgcatatcaaattaggaaacgaaaatttcatttgtatgtaaaaactgacatcagatctgcaactactaacgtttacttggatattgtagagcaaatatccccgtgttgtggcagatgagtttgtgccatggcccagcaagggaaagaccgacaaggagggctggtatgatttcaaatatttatgtattagtttctttctttgttgggccttgttcttcattatcactcaagtttatcaacttcgtcaaaacgattgaaatctgtcattctgcagtttagataacaggaaacagactatcaaaacagtattcattacttaatcttgatactttaagtggctatggttcatgttcatattaagtcgcattttatcttcttatgcaagttagaactggttaatctacctacgtgatgaagtatcataactgataactgaattgtaatgccttgtgctctctaagatcagtccatgattgcagagaacaagaagttgtgaattttctaacaggttatactgaaatctatttgagaatacggcatgttttcaattatataagtttgatctgtttgctggttgaccatatgctgtagtcgtcgcagattttcttttttttttgcctttgtttgcgttttcattagagattacgtttgcatttaaagaatagcttctgttgtttatcagatcgcctactaataaattgtctttgtgaaggtatcctcccggtcatggtgatgtattcccagccctcatgaacagtggaaagctcgatactttcttatcacaggttctttctttagtgtagtcaactaccgtttttcccagcatctaagattgatgtccatgtttattgaaagttctgttttctgtgtctctcagggtaaggaatatgtgtttgttgccaattcagacaacttgggtgccatcgttgacttaagtatgtcttctttgtattttttctcgttcttgtttacacatagttttatatggttaatcagatatttttacatgaaattcccatactaactctcttgcttatctcgtctttcgtcaaattgctgtagcaatcctgaagcatttgatccagaacaagaacgaatactgcatggaggttacacccaaaaccttagctgatgtaaaggggggaactctcatttcttatgaaggcaaagtccagcttctggagattgctcaggttcctgatgaacatgtaagtctatacttccttgggtttcaatgtctttagagattgtttgaaactgttgtagcatattcattagagattcggcgaaagttggtataaacgagcttagtttagaaaatcatttcatggatgctttgcaaagcccttctttatgatgggagtatagtaaatgccaaatttgttaaagaacaatagaatgtgaactgtagacttttgtttgtgtcgtctttctgtttgcttcaacttgtatcatctgcttaaaagagttgttgcattcgtgttttgatccttgtggtaggtcaatgagttcaaatcaattgagaagttcaagatattcaacacaaacaacctgtaagtagatcacgtccctaatgatagtaaaacaaaataaacttatttgatacacactaactgtgtaagtttacagatgggttaacttgaaggccatcaaaaagcttgtggaagctgatgcacttaaaatggagatcattccaaacccaaaggtgcctgcgtggctaatgcacagttttttatttctgcaattttttcattcattattatctaaccaaagaaaaactgcaaattctattcaggaagttgatggagtcaaagttcttcaactggaaactgcagccggtgctgcgataagggtatacatgcctgtcctagtggcacgttttgaaatatagaatgcaaactctaatcttttcttaactcctttttcgtgtgattctgtctcaaaacagttctttgacaacgctatcggtgttaatgtacctcgctcacggttcttgccagtgaaggcaagttcagacttgctgctcgtccaggtaaactctatacaccacgtttaacaacgcaacagagtaacaaatatcttttgaaacatttgattaatgatttaagttttctttcttccacagtctgatctctacaccttagttgatggctttgtcactcgaaacaaagctagaactaacccctcgaacccgtcaattgaattgggacccgagttcaagaaggtaaatgaagaaaatgatttcctgacaagtcccatttgtcatttctatcttgactcttgagcctcacttagtgtgtctgtctaacaggtggctactttcttgagccggtttaagtccattcctagtatagtcgagctcgacagccttaaggtgtctggtgatgtctggtttggctcttccattgttctcaaggtatatatgtaaattgttcattagttcacaaggtggtgttgatatttatatatgctcagaatggtttcttttggatttaaagggcaaggtgactgtggcggcaaaatccggtgtgaagcttgaaattccggacagggccgtggtcgagaacaaggtaatgtaacgaatcatggttatgttcaaactccggatgttttctttttcgccacaattatggttgaccgtttgattatgtgttgaaaaactaataaatttatcactcaaacttgaaatttggttttaggcggttatgatcttggttcaggattttcagagtaatcaccaaaatgaaaattaggattgaatttgaggttttatcttttcggctaaaccgaattggcattctacatctttagtttaaacctaaattattttgaattaaaacttaccattgtgttttttttacagaacatcaatggtccagaagacctctgaataaaacaaattcaagtcttcttccctctctcatggaagacacatcttgatactcctttaattggtgtgaaaagatcacaagtggcacagcaaagcaagtttatgaagaaagaataaataatgtttctttttctttttgcagcttagcaaagtcttttcctctttggactttattttaattttgctctttgaattttcccaaaacatcacatttatatgttcgattatatttgggttctatccacaatcatttttctttttgataatccactctttctttccacatgctctttgcttggaaactgatggagtactagtttattacatttatgtcgtctactaatttagattatgtcactgatattcatacagtgtgacatgtttattttcggttttcgtccgtttgatttgtagaattaagttggggactaattcgtatactaatgaagggaactaacacaactactacttatgaaggaaaatgcaagaatgaatactaataaataagacgaatacaactttaattagagttctcattggctaatttgtagaataatcgcaaattcaagttacttgtgtagaattactacatcaccaagattcttattcaaattaattgtcgcgctcccgtgtaaaattattctacaagattcttatgacttctagtatgtaataatttttgcttacgagttttggaaacaaatagatttaattacaaaggtatcattcaaatgaaatagaaaaccacatagtagcctaccaaaaaaaaaaaaaaaacatagtaagatgttcacatgcatacactacacatacgtgtattgaatcttattggtaatctaacatcgtagattcttaattgcactttttaattattgtttttaaaattttcctacttttgtttaaacatgtcacgatctaaagcatgagatagctgtcggttacttgaaaaagtggaataaaaatattatgtgtcattgagataatgagatgttacgtacgcgtccaatttattatgatctaatacatcttatcagataagctcttctttattttccatctttattcaaatcttgacaccaaaaggaaagaatattttttattcaaatctataactcatagattgcatctccttcttactttgtttgattagattgtattagcctctgtcttgtcttttggttagtataagtattgataaattcctttgaccagcaagatatcatcactaaaagattttacattaccaagccatctccaatatcatcaggtcggttttctctcgatatcaattggttacgcatgcatctatcatatcttaaagtttattcttctttcattattcttaacccaaattttaatttttatggaacttactaaaacgttgacgatgatccctactgctagtttgttttgaggcatgcattgaaagtactctttgcggtgttccctcatatattacaggtcaagtgatgttgtttctaaccgcggctgtctgtttaatatgcttttacgtctacaagtccgtgaaaccgccgccgccaattccattgccggagaatgtttctgagatatctccaagaatcaagctcaacgatggcagatatttagcttacaaagaattagggtttcctaaagacaaagccaaaaataagattatcattctccatggattcgggagttccaagttagtggatttaaaaatcacacaggtattaataatatgaggattaaatgaaatgattacatgcatatattgcaaactagcttctttacatatcatgataactggagctactatatatgttcctatggctttcaggaaatgatcgacgaattcgagatatacttcttgttgttcgatagagctggttatggagaaagcgatcctcatccatcacgaacactaaaaacggatacatatgacatcgaagaacttgctgacaaattgcaaatcggtccaaagttccatgtcctaggaatgtcactcggggcttatccagtttacggctgtctcaagtacattcctcataggtatatcaatctcttacaagtagaatctaagaataacatttttggtcagatttaattgtgattatcacttagattaaaagctatatatcaaatatactatttatttacacatggatttacgtacatatcatattggcctagtaattatatcttttgaacttataagattaaattgaatatatttcgcatatataaattaaagttcatataatctttacctatgtgaattaatgtctctaacaatatgtatagactaagtggagcaacgttggtggttccgatactgaatttttggtggagttgtctgcctctaaacttgtcgatttcagcgttcaagaaattgccaattcaaaatcagtggacacttggagtcgcacactactttccatggttattatattggtggatgactcagaaatggttttccccatttagtcagaatcctagagaaactatgaccgagcgcgatatagagctcgcggataagcatacaaaacacgcatatattaaggtacctatatagagattgatttttaaaagtttatggagttttagactaaccttgtgttgttttagaccatttttcttatataatgaacttgatgatacattttagtgaaaaaagcacttacgaaagtgattgatttatgtggttcaggaatccgcactacgacaaggtgaatatgtgagcatgcaacgagacatcattgcgggttacgagaattgggagtttgatccaaccgaactgagcaatccattttcagatgataacaaagggtcagttcacatttggtgtgcactcgaagacaaacaaatttcgcatgaggttttactctacttatgtgataagcttccatggataaagcttcatgaagtccctgatgctggacatcttattatccatgagaagcagcattttgaagacattattaaagccgcttgtagttgaaggttaaaaaaaaaaacttaattcaatagtttgtgtgtggactggatttgaaagttgatattatataaaatatatgttcaatgtcacatatatatattttgttacaattaaattcattttactactaaatccagattttatatctgagtgtttttaatgtgtaattaataatgatatattatcaggtgttatagtttgtgtcaataaattttacttagcgctggagatatatacaatcatggttgacaaatgtgggtcaccgtgcaagaaagtctataatcttttgctttgaaactgctaccaccgtgccacgacacttggatcaaagttacaaagcagtttcttaaaatctatgaagataagtttgtttttctttctcttacagattctaaaaatgaaaatgtctaataaatccaaaaaatattcaatatgcaatataaataataaaggggagttacacaattgatataaatgcaaaaggacaaccaattcaataatagtaatgcaagataagttatcaagacatgtgtaacaaagagagaaggacaaaaagaaatttgtaaacaaaagtggtcatgctttacttgccaacaaaaataaatagtactacattattaagttgcttggaccaaagataccattacatcagcgcatttttctctctaataattgttgaaattgttaaacatatattagttcctgagtttcttcttctttcattttctttaaatcaattctagtcttttggttccaagacttataggctaaataatggtgcttctacttgtgattgtgggattaataagctattatgtctacaagtccataacaccgccgccaccgattccactgccggaaaatgtttccgagatatctccaagaatcaagctcaatgatggaaggcatttagcgtacaaggaattagggtttccaaaggacaaagccaaaaacaaaataataatcgtccacggaaatggaaattccaaagacgtcgatttatacatcacacaggtacacaaggattgaattaagaacgaaataaagaaagagaccgcaactattttaatactttttggtggtttatttgtacaattaatgattgttatgtataatgaataatactatttgcaatgataacgctcctctggctttcaggaaatgattgatgaattcaagatatactttttgttcttcgatagagctggttatggagaaagcgatcctaatccaacacgaacgctgaaaacagatacatacgatatcgaagaacttgctgacaaattgcaagtcggtccaaagttccacgttataggcatgtcacttggagcttaccctgtttacggttgcctcaaatacattcctaataggtaaatatatcaatcggttatctcttaagaacattatcaaaaaattgaaatattatttgtgatggtcacttctcaatacttatcaaaacaagttcttacgtaaaagacatttgctttatccatttgtgataagaattctcttgtttcatcctcatcgtttaattaccataagtccataagtgacgttatactataagaccaagtgaccgacttagatatttcacttatacaaataagattataatgtagtggtttgtatattagccttaattgtttttcttataacatcgataggctcagtggagcttcgttggttgttccgttagtgaatttttggtggagccgtgtgcctcaaaacttattgaatgcagcgatgaagaaattgccaattggatttcaattgacacttcgagtcgcacactactctccatggttgttatattggtggatgactcagaaatggttcccgaatagtcgaaatcccaaagatactatgaccgagcgcgacctagaactcgcggaaaagcataccaaacactcttatatcaaggtatatatattacgaactttatgatccactctcttttttttttttttttgaaagaagtaaacattcatgcatgaatgctattattactataggagtctgctttacgacaaggtggatatgtgaccacacaacaagacatcatagcgggttacgggaattgggaatttgatccaaccgaattgaagaatccgttttcggatagtaacaaagggtcggttcatatgtggtgtgcactcgaagacaaacaaatttcacgcgatgttttactctatatatgcgataaactgccatggataaagctccatgaggtccctgatggtggacattatattatccatgagaagcggcattttgaagccattatcaaagccgcttgtagtgactagtggaagatacattataacaaaaaaaaactctaaaagatttgtatctaaaatcagtttaagaaaaattatggctatgtaagtttcatgtgacaaagaacattatctaacctatttacaataatttatataaatctggtatgtcagatagtacagtttacaaaaaaaaaatcaaatgtcaaattgatccaaatgaaaaatatcatgacatacttttttgagcatgggagagagtcggatggagacacatgaacgaaaggtaaagttgacccaaaattgttactgaagtcctcactttgatcacgagatttgggttttgtgatttgggccttaccctaacccatttcgattgagggcattttagtcattttatataaaccgacaaaccggtaaaagcaaaatgttttcccactaaaagactgaaaaaaacactaaaccaaaattaaatcatcaaaaatcaaaatctctaaaatcaaaaattcgcattttctctctcgccggagagatgcaacggtttcttctacctttactcttccttgcactatcgccgccggcgatttgtcattactcttcctcaacctcttcaccttcttcgtcctccgtttcttccgacgcctcagaatggcgtccagctcgagccacctactacgccgctacgaatcctcgagacgcggtgggcggtgcgtgtggatacggagatctcgtcaaatctgggtacggtatggctactgttggtctaagcgagactctgtttgagcgtggtcagatctgtggtgcttgtttcgagctcagatgtgttgatgatctccgttggtgtatccctggaacttcaattatactcaccgctacgaatttctgtgctcctaattacggatttgatcccgacggtggtggtcattgtaatccacctaacaaacatttcgtgcttccgatcgaagcgtttgagaagatcgctatttggaaagctgggaacatgccggtgcagtatcgaaggtgcgtttctctccgctttttcccaatttgtttcgcgttttgttaaaaaaatgcgtttgcggtggtggggaacgcggttctgcttttagacgccactatcgatttaaaaaatccggcgatgcttttgcttttgtgtcttcttcgatatccgtgtgctttattatgtgagatgggtttaccctaaatctcttcctcaatatgcaatttactttattgcccctaatcgttttatcttagtgtgtacaagattctgagaaatggtagataggtttgctcatcatagttgagtagctttgctctcattttcatcttagccatgagaggactgaaattgactgtttctgtgaagttctaggcacaatgcggtaaactactatttaggttcatgatacaatggatcattagatcctttattagtttgtgaagtgttttggagctgagcctataaatagttagttgcatatcacttaagttatgagttatgacttacaaccatttttgttggcttttaccaaaacaggatcaactgtagaaaggaagggagcatgcggtttacagtcgatggtggaggcattttcatttcggttttgatcaccaatgttgcagggtccggtgatatagctgctgtgaagatcaaagggtcgagaaccgggtggttacctatgggtcgtaattggggacaaaattggcatattaatgctgatctcaggaaccaagctctctcatttgaagtaacttctagtgacaggtcaaccgtgacatcttacaatgtctccccgaaaaactggaattatggacagaccttcgaagggaaacaattcgagactccgtgagacagagacggacacattgagatacaatcccatgattctttttttccgggtcagaattttttgatggcaagtatatcgatcttggtctaaggttatctttagggttgaaaaggaaagaacttgggtcagacttttgcatttcatagttctctctctcccacgcataggtacaaaaactcaccaatgtactaagaacagtgatcacacaaacatcactattgtatctatttgtttacattactaaggagcgaaagcttccttcaagtgcttaaagctaatgatgagtactgagtcttatcgtaaaaagaatccaaaagggtactgtgatataacaagaatcagaatagctaaaggttataacttctcaaagtcaaaagatattaaacctattatagccatgaatgtaagttcacttacttctccaatgtgaagatcactcaggccaaaaggatcaccgtgtgttgtaaaattcctatgaacatcccacttctcttaaaactctacaagagaaccccaaacaaaataaaaggaaaaaaaacaaaaaaaaaacgtgtcaagaactcataaagattgatgagattcaataagcaacgcattgagcatgacatggacagcggcatcatagaccgcagagtcataatgcatcccgtcaagtgtacattgcggtccacagttccaggtaaacgactggatatcaagcaagataagaggaccacccatttgacgtaagatcttactctccccgagtgatctatcatactcatgccacaccgtatcactcatcttctccttcttctcatccgtattcaacatcccgttgatcaaaaccggcatcccaatccagaacagatgcacagatctaccggagaccgacccacctccttcttgctcctttggcgtaaggggcactagagactccacatgactactcaattgcctcaacctaaaaccaaaatctgaagcattgttcacatgaagcatatgccataacccagttcccatgatcacaacatcaggatactttttcatcttcttataagataccacaagatcatccaaatctttctcataaggagcccaaacaaaatcaagcttcatcccaatctccttaaccacaatgctgtaatcactatgtctcctaaacaaatcccctctaaccgaatccatagccttggaatccgaacccaaaacaagattcaacaaagacaaagccacgaatctcgcctgagaatcaccagcaacaacaacccacgatccattcaacaaatccgaaacatcgaacttatccaatttctgaaactcacaactcaaaactttcctcgatttcatccaatcccagttcttcacgaaataatcaagctttgttgagccattgttcctacgaacagactccggattcggtaccggtttaacatcccagacaatctgattaacctcgttgatacaagagatacgatgatcgtagacaacaacagaggaaacagaggcaacgatgtcggaaacggaagggaaataaggcgtgagatgaacacaaaccgcgagagaaataaacaaagcgccactaaagaagagcatcttgttcctgctcagatgccaaccagccattgccatgggaacgaagaggacgaaacaagctgctaatactcccaaatgaatcgctcctagcatctctcagactcagatttcggaatcagacacatctagatttccatctagacaaaaccaatttcatccagattcgaattaactctttttctctataatttaagaagaagctagggttacggatttggttcggtgaagagaatctatcaaaattgaaggtgaagatgaaaatttggtgagattgaaaggaacagaacaaccgtaggcttcttcttctttggttcgattttttgtatttaaaattttccatatttgtaagatctccattaatttatgatctcatctctctgactctcagacatggttcggctcactttagcctcattatggaactgggaactattctaacgtgcgctcaccgctgggaatcacgtgaccgcttttagattaatcataagttcctcggcccacggtcaagcccatttattcacgtgaccgcttgtagattgatcataagttactcggcccacgggaaagcccatttagcccacatcgttcaacaaatcaatgacactttccttatgtgtattttcatacgtacgatttcatcttggaatgacattaaattctgtagatccgcgttttcatcatataataaatggagaaaaaatcattataatcatttagacttctttttttatagctaaagttacatgtaatttcgtgatttttcttcacggtcttaagtcttggggatcttgtagactccgaaatttcataatagtttcaaccgatttttacatattaacttttaatttattactttctcattctaaccaaatttatatatttttgccaatgaggcaatgacccaatctaatggtggggctaatcataggactaatatgttattagtttatagaatgtgtgtgaacgttaaaaagaattaagtaaagaaccaaaagatggattcatgtgagggaaatgtctcaagaagggtatgtactatgtacacattgtagatatattaaagatatatatatatgtgtatatatatggtgatacaaagaagaaagagaatatggaatttggaataatgagagaaaaaggttatgacgatgatgagaaaggctgagaagtgattctcttgggttggcccatcaatagcttccaaggatttattcacatgttcacaactgctggatcccacatgatcatacatataaccatctcaaaaccatatgcttgttcaaattttatatatatatatatatatatatatatatatctgatcgatttcatttttccaaattttagataagtttttttttgataaatcaactttagataagttttatagtcgcctacaccaaatgtgactgtatgttcatatgattatatatagctttcgagtttcgaccaaaatgataaatactcaaactataatttcttatatccataagtctttggagtacgtaattggactttcggtcaatagtttttctatattggaacaaaagttttggtattttatatgacgacactaaatatggagaggaaaggatttctggccactcaattttttaatttttgtttcaaaatctccgaaatttcaattttttttcccgaatcacacaaccttacattaacagcctaatacactagaaaatatatgagcattaactgatggaacgaccataaaatggagttcatctttctattcgatatacgatatacaatatgaatatgagaaacagaaatagacatatataaatgacaaaataaaatgtaaaacactactagtataaatttacaacatcaagatatctatttttaaaaaagatctatgtacgtagatcggatggcaatgtgaagggaaacaaaggattcgcatgcaagtgggtacaaaagagacagttatttcagttagaagtgccgccaaataacaaaaaaaaaaaagaaaaaaaagaaagagagattgcaacagttttgggttaacccaagattcgatctcccatgcaaccaatagaaatctgacaagtgcacatatattccagaccgaccactctcggagaagcatgggataatataattgatgaagaaacacggtttacatttagggcggcaatttttgattaattattccggttaagtaccagaatctacacgtgatcatgttatttgttagcattttaattatctatcaatataaaaaaaacacttcgaacaatattatatatgcgtcggacagaaattgatgaattgtaaatattaattaaattttgaatttttttaacattatatgttattttgggatggggaccttccctttattcacttttgcatctccctttttcattacctctttatatataaccttgctctccaagccctcaacgaacacaaaacatatacctattctataatctcttcttcttcctctcgagtctcgattctctctctttctttctttgaaattgattcaaacaaaataacttcaagaacaacttgagattatatatatggctcctgtctcgttacctccaggtttccgattccatccaacagacgaggaactaattacttactatctaaaaagaaagatcaacggtctagaaatcgaacttgaagttatcgctgaagttgatctttacaagtgtgagccatgggacttaccaggtaatattaatttgacgtttcccttgtttatgcatgagatccacttaatcaaatatgatttaaattttttgaaaaatatgatttctgatcaacattaattacgcgattctactttagttatcaaattctgcatatattattcatttatatggatttaaattacaacatctgtaatcgttaagaattattattatttgtctaaaacccataggaacaagagagattgaagaaaagaataagaatatagcattgatgaagaaaccctaaatatactttagtctctaccgggaaaataccacatgtgcaattacacatactagttctgtaaataactattttattatttttttcatcattttcaccaaatcttttaggaattaaaatgtcaaaataatttttaaaaatgtttaaatataaaattgtaactcatgaaaacatgaatgccagcttaattgaatcataattttaatttacgtcatccaatatctgctgataaattacgttacttaaagtaatcaattatgaattcaataatagggaagtccttgcttccgagcaaagaccaagaatggtacttcttcagcccacgagaccggaagtatcccaacggctcaaggacaaaccgggcaactaaaggcggttattggaaggctacaggtaaagaccgccgagttagttggagagaccgagccataggaaccaagaagacattggtttactaccgtgggcgcgcgccacatggcataagaactggttgggtcatgcacgaatatcgacttgatgaaacagaatgtgagccttctgcatacggcatgcaggttcgttgctaactaactggattcgactacaatcattttaatattgtacatagcattaggaaaaaccatctaaattgaattttatatttgtaggacgcatatgcactttgtcgtgtgttcaaaaagattgttattgaagctaagccaagagatcaacatcggtcatatgtccacgcgatgtcgaatgtgagtggtaattgctcatcgagttttgacacttgttcggatctcgaaatcagttcaactactcatcaagttcaaaacacattccaaccgcgatttggcaacgagcgatttaactccaacgcaatcagcaacgaggattggtcacaatactacggttcttcttatagaccgttccctactccatataaggtatagctaatatttcaaagttttaaaatccatcattgattaccctataaagtttgatacatgaccatcgacatataacatatttttaataatgggttttctatattttcattcaggttaacacagagatcgaatgttcaatgttacaacacaatatatatctaccaccgttgcgtgtagagaactctgcgtttagtgattccgatttcttcacgagtatgactcacaacaacgaccatggcgttttcgatgactttacttttgctgcaagtaactccaaccacaataatagcgttggtgatcaagtgatccacgttggcaattatgatgaacaattaataacatctaaccgtcatatgaaccaggtatgcatatcagactattgaaataatatatgctgtatgttttatataccatttatatataattttaaacctaacatatagaattatatttatgcatttgaaaagactggttatataaaagagcagaagatcagatcgagtttggataatactgacgaagatccaggatttcatggtgagtatatatatataatttgggttcaaattcaagattgttatgatcgatgctcttcctatatctaacgataattacaaattgtttaatttacaggtaacaataccaatgacaacatagatatcgatgattttctctcgtttgatatatataacgaggacaacgtgaatcaaatagaagataatgaagacgtgaatacaaatgaaacccttgattcatcgggattcgaggtggttgaagaagaaactagatttaacaaccaaatgctcatctcgacatatcaaacgacaaagattctatatcaccaagtcgtaccttgtcacacgttgaaagttcacgtcaatcctattagtcacaatgtggaagagagaacattgttcattgaagaggacaaagattcttggttacaaagagctgagaagatcacgaagacaaaactaacactttttagtttaatggctcagcaatactacaaatgtcttgctatttttttctgattcttttctttttaaatttgttgatttatttatccctttttgataaaagggcatttacttagacacatatatgtatgtatactaatatttacatttaactgttgtacttcttactgttaaaaaatatttcttatacctataacaacaataaattagacgatccaaatttaaattagtatatcatcaaatatttgaatggagtacaagcgtcaagcggcttgactcaagccattaacggaggactacaagaactactagacaaattaataggcagccaattccatgagcttcttccaagccggtctagccgaaatctcattccaccaccggttgagattctctcgagacgtaaccaaaccactcaaactggtttcattcatgatatatctcataccgggcatatgactcaaatcagctaatgtgaattcatcaccgcccaagtaccggttcgtagctaaccggttctcatacacatccaggaccttgtcgaacttgacctttagctcctcaaccaaagcgacgtcgcatggcttaccagacttgggcttaaagacgacgttcataactaagggtagagccacagcgtagaaatagttattctcaacttccacccactggtccacaatggctcgtccctccaaagtcttgcccaataggtccgttccttggtccgcatactttgtcgcgtagtacctcgctatggctcgcgattcttgaaaccataaatcgaacatataaatagcttttctacatgtagtcatttaagagaaaaagcagcaaaatatttgagaatgtatcttaccaaaaagcttcagatatccatcttcaatagctggaacttgaccaaacggctaatacaagtatacaacgtaatgaataacacgttttctgtgataatactgaaaatattgtgacttatatacctgacgaagaagatgttgtggttttttctgttcaagtttatcgagatcgacatgaattacttcaaactcgatgtctttttccaaaaagcagagcaatactctttgtggattagctgcttttatctgcccatatactttgaccaccattttctgattatatgtttatacgtaactattgatatgaaattgtaaataccgacatgaatgtggatgtatgcatttataggccacaaaagttataaaatgtttatgagtgcctttgtctgctgtggatattaatcagtggtcattttttttttttttttcaaatccgttggacctttgagtaggtgagatcatgaaacgtgcttttagcatggaattcttgatttttaaaatgttttttgttgttgttctaattaaaattgtgaataataacgtttacaagagctgtgaattatttttcactatagtactggagatgtgtacagtagacgaaccaacatttaattacagttaacttataataagtgtcgatgtgaaacaaactttgaaggttactttgcgtatatattttggcattcatgaatgtttctgattgctctaatttgctaaatcaggtttctaattacatatatgtaaaattttgtaaatttaaaataaaatacaaaaggtatttgtttttgtacagtccaattatgtcaaatatgatacaagagactagagagtgttaagaactctaaatgccatgttaagcttcataattggatagtggtcaattcgcacacaaaaagaaagaaagaaaggcaaagaaggtttagacagggacacgccttccacggtagcgatccagcaactgattcagtgaccaatatatatagttggtaaaagtttgattggataaggcaaataagtctaaatagtaaaacagagagaagttgcaatgaatgtaccgatctgatgtatggttgctgcaaaagccagcctaatagaggtatcctttgaaggaagacggcaagtgtaggccagaaaccactttaaaattacagaagaataaaggaaagacatgagtcagcaaatcaaaactagaaatgaattagtaaaaccattaaatgttgttgaggagaagaaaacccacctgaagagcacaaggaacccatatgattcaagaagcaaaccgaaaataggccatccaaacacaaccaacaagaaacccaatccaaatgatatagtaccctgtatgtatatcaagaagatgtattattgtattaataatagtcatcaaattggaagcacaagggattcatgaaagaaccttaaaattctgccgtttagtaaagaattggattgctgggttgattccaatggttagagtcacaccagctaagaagaggatctgtccaaagagaccacagagacccttaaaaagccttgctaaaatcgtaaagaacacacaccaaagatggtataaatagacctacgttccccatggctatgagtcccttgtcaaacacaaatatcactcccaggaatgtaaagaacacaccaaatccagtcaaacctagccctatctctgccacatcaatcaaattccttaacgattcagcaattcaagatcaatggatactagttcattatcacatccctattcaaagagtttatgattggaacacttactttttaggtcattcatctccaaggaagccattgttaccgaaaaaattgcacaatcaaaaacctttaagagcaggaattcaaacaaatttaagatctgagaaagtgttatcttttgatctctgaaatcaatccaagagtttgaatcgatgaagaatggatcgtgccagtgaaaacttcgtcatcccatgggtctccacgtcatcttgacagcattatacaataatcattaagaaatttcaaaagaaccacctaactattaattatttcggaatacaccccaaaacatttctagactttagcattctacatataatttctgccatgaattggataaaacaaaaagtaaggtgtattttaatgacaaagaaaatacatgatggaatttgtactagttagtataagtgggtaaaatttgtaaatatgaaagctaagagacatgtaaatttgccgcaaaaaaaagaggctgtaaattaagaaagcccattgtaggcccaatatagataactgcgactcctctagtccagcccatcaatctctaagaatttagatttttcattttcttaattcatcaattttaattttcttagttcatcacatctaaaaatacagaacattattttaattttcttagttcatcacatctaaaaatacagaacattttcaattggtcagttacttgtatatatactgttaagtgctctctaaattaaactgaaacttacaaaattatcaaaagagtcaaaacactttaaagtaacaacaacttgtacaagattagaaaacaaaagatttgaaaaacatcgtcccaaacgaaacccggttctcttccggtttaggttcgagtgagcaaagccgaaatatgagccgccgagagcgtctgggctctcggaggcggtctgttaccggaaagtcgcggcggtctatcgttcccagcgagaaaaacgtcgtggacacttaaatttcgctccgatgcgccgccgcatcctgataatctacgacagtgagggctctctcgtcgctgcttcagctttgcgttgaatggattctcaggcttcgcgagatcttccacagttagcgcttctgccaacgttgtgaacgattgtgatttacctttgtaatgtttcgacaatcctctcctgttatcaaaatttcccaaacataaattcgtggtaggaagattaaaaagtttctttacaacgaaaaagatctcagaaattaattatacccctaaactataagattgtttaagaatacaccctaatgattggggtttgttctgacaattactaaagccaggggttaaaagcggaactttctgattctcattaccttgaagaagaagaagaactgcgacggtccgaatcatcaggggagtttggaaaagaagagggagagttaacaccttcatctgcgtccgcgtctacgtctctggtgtagtttccgcgtctgcgttcttcacccaacataagagactccatctgttcttgatagtgcattttttcttctaagcggcttctaattgattaagagttgagagaacagtggcatttatacgactataattattttaatgaatgtgtttatatagtcggcccgttattaaagtttatttacaatgtttacgcaatggatattcgaatttaaaacattatctaatgagctctgtttgtcaaataacatgtcacgcccatgaacatgggttctggttttgcggtctttatataataagtagggtatttttttatgtcagagataagatattttgggaatgatggaacaagatgacgacacgtggaaagagtgaagaaatggacggagtttaaatacttgtttacgtggtgggtggaaacagatggcacgaacaacgaggccatcgagaatctctgtgtaacgaatctaacgatacgtgtcgaactacgttgaacagattcaaagacttttgggccatgattgataaatgaactttattttatgtatttatggaccgtttctaaggccccttagcacatgatcgctttgaaaaaacatatcaagatgtgtaactaattggggagaaaaatggaaatacggaggaatctatacgttttcttcaccaaagagcaagtagaatgttttcctctactttgcttcttctctttccttattcctgcgtaaattaaatgaactaattttctactgcttcaactggtaagacacagagttagaataacctgttctttactctaataatattcctctaatcagggccacccaatcatataccctaagggtagattgcaaagccagatttgtgggctaggaatattcctatttcgttaacttaatacatagatgctaacatattgttcatgttccaaaaacaaccagatattataatttgtaaatcaaaatcacctttgatcactgctcagctaagtatggctatgtatctcctcccactaagatactggacatcaatctcaatctctacttcaagtccatacatttcgaaagtaagagtggccgaagttcaaacattttaaaagccaactacgagaactcagaatatgtgaaagccaaagaaaagaaaagaaaagaagtgtttcacaacaaggttcatggagaagcaaatacatgatcatcagtattctttccctaatctatctaaagcaacttaggatgtaccccacgcttaaactcaattatctagaacctcaaggacgattgattactctattctacgctaatcgatcatttagtaaacaaatgccgattgcttggtatgggtcaatctatggttcatgatcggttcttgtgtctaacaaagcatatcaaaagcacatactactagttcagatttcagatgcatcagtatatttgtataaaaagggaaatgcacctatgagacaatttggatttcacccggaaatcaataaccagacattgaacacaactaaacaaaagggttccctgattaccaaatctgtatccacaagctctaattcatagaatgcataagagaaatcacagtgggtgtggcacagaatcaattcaataaaaccatcaatcatgtgtgtgtcattaatgcataatgcctatcctgaagagaagattatagagtcaatcaaaattcaacaagaaacaatcacaatctggttacaaataagaatccaaacatagaaaagtaggataaaatccttcaatctccacaagataaaagacacatatcagaaacgttgaaaaagagaaaacctagccaaatgggaaagataaccaaaaaaggcattacactaattgaacctgagacgagacgatcaatccttgttcctgagcctctcgatcctctggttaagatgctcgatcttgacaaccaaattggtgactgagtaaaggatccagtagaacacaagtgcagccgcaatgagaagcgcgtttcgctgggatttcatcatggacttctggtgacgaagatgctctgacggtgtgcaggaatcgccatcgcacgaaggcatagtttcgtatttccagtagatgtccattaagaggaagagacagaaaggaactatggagagaaacggtttgaggagattacgcgtgacggcgactaatcccttgcggagtccgtcgagtcctggcatcgtcaatagcaccaccataatcgcttcagccgccgccgcgtaacctaaaaccacccactcgagcgccattatcaccggatcaagctagatctgaagtctcttctcttcctcgcaatcgcagcttgaattttctattttgcagactcattttttgctggggaagaaaagagaagatgtaaggaacgtgatacacgtggcggtcaacgcgtgtcgcacgtcgattaagagggaaaatgggcttaaatgggctgaatttgctaaaactcggcccaaaagaaaagtatagatatattaagtagtccgtttctttaaagtcggctttagattcacacagtgtcgatttgtcaagtaacggcgtcaaaagcgaaacggcaacgtttggtaggtgagacacgtggatcagatagtgttttgtctcctaatccaatctctttcaaagcatacataataaatgcatatatataagcacacattaaacggagttaaactcatcatacattactgactaaaagaagcaaaatcttgagtagaaacaaattttcctgtatctctctctcttgtaatctccgacgaagaaacacagttttatggcaaccaccagatcgaagagctttcagttgatcaccagcttaaggaaacacctagttaacacacgcgcttccacacgcgccaccgcctctgctctcttcccttcacggtatcaaacactatttctctttctactttccttcttccaaattatttgatgtttcttaacctaagtaagcaacaaataaagagagaaaatactcatttttctgtggaaacaataattaattcccatgaaatggattagcctatagtaggaccttgattataatgaaactgatatgaacatatatatctgaaatttttaactatcactggctcgttggtaaaacaattttgtattttccacttgattaagtacaagatgatattattcccagatctagaaagttcagaaatcagggtttcttctaggactacggattcagatcagttaagttatataatagttgtgtattttatgtattcaatgtcatatatttgctgaattcaaacgcaatggatctgaaaagaaccctttgatgtttgcaaaagtgtattttagttttaagtctgaaaaaacttgtttttgaaaatattaatatagtttattgaagataaatatattcgtacagaaagcataagcaatgtactagtgtacagtgcacaaaaaggcatatgccattaggcgtaaatggataataccaaaacaaatccagttcaggttttgacacgtggtagtttagtaagtttacatacatacccctgtcgaaaactcgcaggtaagagtgttattagcttgacccaaaactcaaatctcaaaactgtaaccaaatcatgatttttcatcttcaatatgaagccacatttagttacatgctgtgtagtccatcttttcgtaacagtgtaacacattatttttcatttatgatatgagtagacatgaggtggctgattttctcatagcgttaatttaagataagaatttggaccgacagctttgaagatatagaaatgttgatggagctgactatgacatatttggtgttacttgattttatttttaatttttaaagaaaaggcatttacggggtcactttttatgaaaaaccaaactttccatctttaataatatactaagacctgataaagaaaaaatctatataaagaccatcttcgtaataattcattctttttggggttgttgtgggtttgtggtggcaatgtctcacctacctagcaacaatctcccacccaacaggaaatttgtttttatttccttgatatgattaataaaattgataccgaaattatcatattaataaattgaggtcggttagatataaaattcgtctgaaatattctttttatttccttcctttttaacagtcggagtggacattcctcggcgtatgacaagaacgtggaggatgaattgcatgcaagtgcagtacctgacgaagttataaagccagattctgataaatattggtctcctcaccccaaaacaggagtcttcggtccctctacgactgagcacagcgccaccgccgagggtgcacaccaggacacagcagtgctggaggagaccgcctggtttcgcccaacaagtctcgaggattcggacaagactcaccatgtttgagtctctctttctctctgctttttactggcgtaatgttgtaataaagttctacgtaaacaaactgtaatgtcaaatagcgtcctcctgctatgtttgaacgcttatgtttaagtgattgattacgttgcccataaatattaaagaatcaaaatgaagtttggttttaatttggtacggttaatcaaccacgacaaatattaaaaagaatctccaaatgacaaaatcgataatatgtgtaacttgattaaccagtgaagattcataaatcaaataaacgcaaaaaagctctctaagactaataaactaaagctgaggctaaatcaaagatacatcaaaagctttctgaagagagaaaaataaaaatatacaaaacgaaccagtggtatattgttctacttcttcaccgatctgtaccaataagtaaccagagcctcctctctaagtaaattgttctccctacaactaaattttcccttagaatcatcacataataaaagcctgatggttgctcaaaaagacccatcaccccagaatttgtaatgccctaaaacgtgattctcaatctacgaaaaccagagaccagaaatggttatgtgtttagtacctgtaaatctcgttttcacttgagtagatctcttgttattgaactcttcttctctcgttaaaggctttcgcagttggctttgatggcggtctatttatcttctcaagtaatctgctatatactagtttgaccggtatgcaggccacagttggtggtcccggtaatacccgtctgttagagagctcgtgtgtccggtctcgtgacgccttcatcccattgtgtccttgttcgccgctgaatgacgatagtgcccttgtcttttggctagcagttgcatttgtgttcttcagcaacttcttttgctgctgctgatgctgttgctttctctctgcaggtggtcgcggaattcgcaatgaactgtttctcctcaccgagttatcatcattactaaaatgtcccaatccgagtttcttaacaagcggtttccttccctgatctgccagagaataatcataggttgcatcatcatccgcttctacggacgatgagaacggctgcagccgtggaacccgggaattactccgccttgcagtcttccaagcagagggcagaagaaaggttttgtcctggtaagttgtttcattaccaaagtaatcaattgtctgaatatatgactcggaggaaccatctgctaagacttcgacttcgaccggatgcccaatgattgctctgccatttaacttactcataagggagacaattgggacaggccctttctgatagcttcctcgcacttctaaatccacatccatcaatgaagaatacgtttttctgccaaaatgtcgttcagaaacatcaaactcctgacctaaaccttcgagtttttcctcccctcgcttcttcataccaatccggccttcccaagggtcatcatcccagtccagcatatcatggctgtagatgttcttacatctagatgcaaccacatttgagagctgataatcatcacctggtacaatcattctgtcaccgaactgcctttcgttgggatcagtgtcatcagttccatcgctcatatcatttatcccattaaaatctaacccataacccataggcttttggccaaatgcccttctcttatattcacaatatcttccatcttctagacgattacggtgcaattttctcttccgtgcagatcttcttggaagagtccggaagtttctttttcccttgtgctgccagttggaaaccgtactagcctcattattaggattttgggaataaaggtaggaagagtcgccagaaatagatgactcataatgatcttcctcactgcttgtactttcatcttctcctgacgtatgtctactaaaagtattgcgtcgctcggaatgacgcccagctcctgaaaggagaaatttcaaactctagttagggaataactaatacctatgcgacacatagaaaattgtggtctacgtaatcaaaaacattaattggttttagtgcagaggcatgatacaaattccagtcaaagaagaatcaaatatgaatatagtgttgacacaactgaaaaccaattttcgcaaaagtagaaaacatttagatgataagaaaaactagcttttagctgtccagaaatactttacctgacagcaagggaatgtcatcatcagtatcctcctccatatcagaagaatcagtttcagattcagaataatctgattccatatcttccaaaaaattaggagggtcataatctgaataacgagtatcaccaccggcaaaggaggaatgcattgcgtccctgtggcttagcaaattctcatgtaggtctgaaacatcattagattcacttggtgtaaacatatatttagtccttttagcctccgccctactcttagttttctcctttcctgaaacagagccaaaaatgcatatgaatttcatgtcaaaaagagccagaagccttaagtatccaaccatctaggaacaaaaacttggaagtttaaaagtacatcttaccgagggtataaatgggcctctccatgctatgatccccactggaagaagctgaagaattgcttctggcaagatacttaaaggaagtatcaggaccattggaacatgaaatctttcgctttgaagaggcggttctaagtccaaagtcctgcaagcctctcattcgaggcacagcctcatcctcacaacttggttgatcttcctctttatctctcagcaaatgcataacatcaccaacatggttggtccttagataatctgtggattcccgtgtcccattagaggtatcctgaaccctaactatagccattctctccttggttgcatcaagagagtcatctctagccttttcagggactagtttcccttctcttttcagcatttccttttccagttcaagggcatggagaatggcatcttctctccgagcatacttctctctcttttttattatcatcgcttgcgaagattctaccctctcaatgcattcatcaaaatcgccacaccgaaatggcttgacccgcttggatttctctaaattgtaccaatccctaagcacattaaaatacgaatgctttcagtaatcaatccaaaagaaaagagagaagttcacacagataaagaagagacttacacacttgcatcttctctcccgaggagcttcaccggagttccagatcgtggcgacgtgatatgcgtagagtcaagatcttcttgtccaagtatcctccccggccaccacgagccattcctcctcctcacccacacaatcgatcccacagtccaatcaaccgcacctgatcctggacttgccatccttgtctctccctctctacactcaagatcacactttctctacgggtttcttctacgtcactaaccacacacaagcctcaaaagtccaccattctccaagaaaaatctttctacggttgtgtattgatctacctgaaaatcagctccgccgccggtaatacagacgaatcccggcggatccaaaaccacaactgaaacagacggaagagaaggaagtgaatccggcgagaactaagctttccattcagatttggaaaactcccataaccctacgctctttaacgccggttaggttaaaacctttcctctctactttttccaccgtccctctataagctagctacgtaagcgagttctcgtcgtcctcgtctctctcgttctctctgaaacctccgcgtcctcgtctctctctcgttctctctgaaacctccgtgactctttcgccttctctctctctctctcctccggatgatggtgattgcgagcttcgcagttcaattaatttacacgcgctcctcaagagcgcgtgctttctacgttaccgaatcataggcccatcttacgatccaaaatatgggcttttatattttaggcccattaaattcaaaatttacgctgcaacggtcacttgtgcgcaagggagttagggtttatgttcgcctaatggtataaatatccttcatcttcggatctttagagacatagcagaaacgtcttgtttttcaactgtcattttctcaaccagatcaaactttttgttttcattttctctaattcgtcgccatggatttccacagtcttcctcgaagagatcttcaatttttctgtaagaggaacaaaatcccagccaatatgaccaatattgccatggccgatgctctcagagatcttgagattgtaagttgttgcctctcttttcttcagattttgttccagtagtcttcgcatcttgctttttctcagtaatatgaaaatgatttgagatcgatatcttgttaaccatctagagcgtgtcgttgtttgtggattcatctatttctgaaattgcttggacgattgataaattatggatgtttgttagagtatttgaatatgaaatcggaaagttcctcgaatggttttagatctggatggttgttcgattctgtttgagtccagtgcttttaaatcttatatgtttgatcttaacattttgatggttttgctttgcttgtgagttttacaatttgtaattagtagatccctgagagtctgaccattttgatttgttaggtggaaggtatggatgagttcatggatccatctcgtgaccagtctccaaccagtgttgcaagaaatttgccaagtgctgctcgaactgctgctagaacaactcgaaggaagtccaccaaggatgaaactcagtcatcagaattggtgacccgttcttgttatgtggtgagcaagtccttagctggagaaatggatcaagaaaacaaggacatgaatatgctccagaatccatcagtacctcagagccgtgctgtgaagttagatgtcaatgatatcatgcctgaagccaatgtgagcaaaactccagcggctagaagcacaagaagggctcaggccgctgcgtcttccaagaaggatgagtcggttcagcgggtttacagtaccagaaggtctgtcagattgttagaagaatccatggctgacctgagtttgaaaaccaatgtacctgtaaagaagcacgaagattctccagcaggtatgaaatccaatctctctctcgttttcaaaacagatgattgtcatgttattatatattgaatgagtttgtaatcaaaatcagttgtacaatgcaggttccaaattccaggcaaagtcagatgagaactcagaaaatactgacaagggtggagtaatgtcagggagagatttaaatgattccttggagaaggaatgggatggctcaaagaatgatccagatcttgatatattatatggtgatcttggtgatatcactttctttgatgcatccaccagtaaggaacatctgaatagaacaggtatacacacaaacaagcacacccttcaatgttttttgcttcactattttcttgttgcctttcttaatttccatgggggatttctttgcagattccagcacggtttcagcttcagatagttttgttctagtcaatgaacatgaaacttcgcaggaggatggttttgttgttgtagaccatgctacttctactaccaccacaaacactttggcctgcaacaaagaatcagagcctgagcaaatgaagattgattctgaatctgaatcagaggaaacagaatatgagactgatccatgggagggtgatgattttggtgttgctgttcacacaaaccaagaggcatttgagtctaaagtctcagctagtgataatgtgagtaaggttgactcagtggcaactgttctgatagctgatgaatcgaaagaactcgatttttcttcttcacctcttgctgtggaggaactcgaagaagacagcgatgaatggtctgattatgagataggcgaggtcgagttggaggaaaacagctgcgggtctgaagaatccattgaaattgaatcagaagaggctcctgtttcagataagaagactccagcttcttcctcttcatcaagtcttgctggtaatgagacaagaacttcgttgtctccatttgaagcagaatcaatcttagagagcgaggaggacaaggagatggctgttaacaacaatggagaggggaaagctgaggccgaggttaagaagacaaagaagaagaagacgattgatgaagagctcaaagatgtgagcatgaggcaactaacgaagatggtgaaagaacttgctatcaagagtaagcaacaacacaagggtcctgagtaatgaagaaaaactgttttagcctttttgaaatcatttccttctctcttggaaaaatgttgatgtttcttttgtttcctttagggtgttgttgtgttgttctttttttatagaaactcaaagagaagctctaatgacatctttttctttcaatctcattcgaaatttcttcatggctgcacttttcattatgccttgagaatttactaacattagattccagaagcagagccatgtgaagacaaaagaagaagaaaaacgcttccattacaaaagtttagagagattttcattttgttcagtggcgaagaagaagacttaggccatggaatctaaagtatataatggtgaaaagacagggagaaggaattagcagtgggtgcttcaaaatttgcagagtgccagagaactattgcttcatgaatgctgagaagaatgaatagactctgaaatgtggatgatgatgagcatatgaacttggaattatcattcattgaaacataagtgtagaggacacgtgaacgaaaagagtctctgtatacatgagtaagtaaggctaagccaaaaaggggattgagattatttgtcaatagaaacaatggaaagaaaagactttcaatactaaattatatccattcagattctattgttatggtcaaatcaaatatacgttgccatcatcactaatgaccgttgtgatcactaattgaccgttgtgatcaatttccttttttttgattaaaagcgaggatttccttttttcttcttctcaagtacctttccttataaatactcgtctaacaaactttgccaattttcgatcgccaatctcgtgaagccgatgatccatgtagaggtagagccactctctgcgaaactggccttcttccttgagaagaagatcgatcgtcacgtttcttagattgatcgccattctctcttgtgcattcgatatcctgtgactacttctacagtcgaaccctaatttcacatgatctccaccgcaacactttgtagacggcggctaatgatgagagggagaaaggcggactgttgaagttgacatccttgatgagaacaagaagaagaagaagcaaaggctcgtgatcgaaggatgtcgaagaagaagaagagagtcaacgaccgagaagaaagaaaagtcaacaacaaaggaaagaagttgggcttcaagtgttttggtctcaagaaaactaatgggttgaattttggttaagccccaaattgtttttgatgagaatctgagtcttcgaatgggccttctttgttaccacttctaacaaggtacattattttttttcattcttatttttgtttttatttcttttaaaaaattattttgggtaaaactaaaactaattaatttaaaacttttattaaaacatttaaaaaaacaaatttaaaacttaatctttaagaaaatagttaatttttttttaactaaaatcatgttaatttcactattacttttaaaaaattagtttaagtgttgtaattttaaaaacgtcgaaaattaaccgcgcttaggcatcccatccttaattagtccgtaagctctgcggtgttcgaagttcgacattgtttttacgttatatagatttgatacgtaaactcatttttaaaaataatagtgattttcactaaaaaaatttaacacagaataattttttaactaaaaccatgttaatttcactattactttttaaaaattagtttaagtattaaattttaaaaacgtccttagttggtccgtaagttttgtggtgtttgaagttcggcattgtattcaagtcatatagattttgactcttaaacttatttttaaaaaataatattgattttcactaaaagtttaaaacaaaattttgaaatcatttccttctctctttgaaaaatattgataattcttttgtttccttcggttgttgtatttttcttttttttttttttgtaatttttttttctatttcttttcatctcattcgtaatttcttcatggctttaaaaaaaaactcgatttagctgtattttatatgaactcaaaagagacaaactcggtagttaccaaatttatagtgcccgagctcaacaggggaagacagggacgtaaaaagatcaatcatctatcatagctataagggagactttaataatctcatgagaattttgcaatttttgtcagatttatacattttgtatccatcagaatttacaataaagctccaaagtcatattatgcaaaaaggagcctaattgatactaacattagctttaagaagcagagccatgtgaagacgaaagaaaaacaaaaacacttccattacaaaagtcttgagagattttcattagttttgtgatattaccatatcagtggccacgaagaagggtgtggccatggatgtaaagtatataatggtgagtagacaggagacaccatgagcttgatttggtactttcgtatgtcaatttagctagtcagggatttttttctttgcaaatggtaggggtgctaaaacgagggaccaactgatgagtaaccagcggctttaacctctttgagtgtagcggataaccagtctaagccttcatagagcccatctccttgaagagcacatgtgccttgtatatgccatttcctgttcttgagatcaagtaagccaagcccttcacatacttctcgaggagacatggctcctctctgaaattcataaagagttcagacgaattttggtaaatgagaacgaaaaaatatgaaataaggaaagctagagcctatgaacttttaccatgtcttgtttgtttgcaaacactagaatgacactgttgagcatgaatgggtcccttatgatatcctgaagaaatcaataagcagaggttatagaaacactgcagaaactaatttgacccaaagttttgtgcaaattttctaaggtacctgaaattcttgcttcgctttaccaatcctctctcggtccaaggagtctaccacgtatatctgcaaatgcatcgaccaatatcaatcaggaaaattccttacaaaacatgagaaatcatctgtcatgaagagaagagactctatgagttaactatctaactagaggcagcgtgaaaaataagtagagacttacaagtccatcggtattattgaagtaatgcctccacaagggcctcagcttctcttggccaccaacatcccaaactgtgaagatgacattcttgtactgaactttctcaacattgaaacctgtgtaagaaatttaaaatcctcagtaaacccgttgtaagataaatgagaaaacgcaaaaaaaataaaaatgcttgagcaatctgacctaccgattgtgggaacagtagacagaacttctcctatgtggagcttgtatagtatcgttgttttgccagccgcatccagacccagcataacgacctggcatctcaaaacaaaaaacacaagaaaaaaatcaccaaatctgaaaaatgtattcatcatatcatgcacagtgagaaaccacaccacatagattagtaatatatcaacaagaacaccacataatctgtaacagcacttaatatctagagttattgcacttgatagctaataagctgggtcaatacacaaaacaaaagctggactagctaacttgtgtgaatgatttcatggatacacaagtaacccaactgtctatgaaagtggattggctacatcaagattctaaacagtgtaggtactatactatagtagaagggaacttgaatcttcagggtacctaaaagtactagcaagagtttagattacaagcatatataccggacctaaaaagtaactctttgaacatataataaatcccaggatacatcaatgattagcacaaatcaaacactttttcatattatttcaaaatccgagtgtcgtcaaaacaatgaaagcgagtataacgattaacgatgggtaacacgcgattccgtccagtaaacgatcaaatacagaaatcaaatacagaagatggagagaaggagagtaccctcatctcctggttgccgaagaaggtatcgaaaagcttgcgaaaagtttgacccatctctcaccccaaaaaagcttaaacccccacagacgaattttactttctcttatcgataaaccaaaacagaaattgaaagtgaagaaacacagagagaatcaaagctaagatgatgatggtcgatttctccaggaattgcagagagtttcccaagaaagcaaaggttgcgttttcggtacaatggattccttatgtacagtatagagagattccacttggtcttacatttttatttcggtttacaagtctttgaaattaagaccggtttataaccggtttgaggttcgattaattttgagatcctaaacatttttcatttaatagtaacaaatccaacaaaaaagattgtaatttagaaaacctaacacttgtcttttctaagctttccatttctcaagatctctacaaaaaaaattccatttctcttttcgagagccttcttcttataaaatataaaaacaagacttaagaatcggccatgtcgtcttgaatttcgctgggagctataagtccaggaatcgaaagcattctttgtctctctctctccatttgggcagcagcttcctcagcatataaatctttgttatcctgaacaaaaataatccattcattagagtttttgatgaaatgtggtataaaagaagataccaatctaatctgtagcaattacttatatacctgagcagaaaattccttggactgtataaggaagtcgcgtatgttatccttaaatctgccaacatcgtttctcgactcgtaaagtccattcacaaactgtgtcacctgttttgttgtgttttgtcagtgttttattttcaatatcagtggcaatcgaagaattgaaaatcctctggtttagttcacgttacctctgttgtagtcatgttggggaatgatgagcttagaagcttggtggtgtactcaagcacaaaggcgacattatttgaataaggatgcggtaccgttgcagcatcccacaatggttctgccaatgatccgctctcaacctaaatattttattgatccgttaattccgcagtgactagccaagtggtagatttttatacaagtagtatacgtattatttaccaggctaaataagtgctgcaacaccaacacatgcaacttgaacccaggcttgtggaaggtatcggtcaagacagcaaatacttcttgctcaatttgcagaaagtatgtttggtagaatttgttacaaaagtcagatttctgccacaagtcaaagagcaacatgttaaatcatgcacacacataaagaggctaaaaatgccaacaaaacgagaaggaaattccaaaacctgaaagtttttcagcatctcgagcaagagattgagcccagtttcagcgatatttctttcagtatgcctaaatgcccagataactgaatccatcactagcttcagttgctgatgaagagacacaaaaacaagacaagctcagggataactagaaaactaataatatggaaaggtcgttattagctttctaagatcacgcaaagaatactaatgcaagaacataatcaccaacctcacttgacaactgtatcaacgcacggaaacaaaatgtagcaatagcacgaagtaacgagaaaaacttgagacggtgctctgggtaatcttcaaaattcttagtaatcatctgcagaaaaaagatgaaaacgaattcactagtcacttccatgtatgcatagaactacgactgagtatcacatagcattgtttataatatttcgaaagggtggactgatagcttaaaactgcacatgtgagaaatattttcaatggaccatagaatcagttacctccaatgtgcactggaaaacagcttcaaatatgaggggaacttcatctcgcattacaaccttgtatctacacgtgcacatcaacaagttgggtttagaagatagtagattttcatgttacatctagtggtaaaaattcttttgagattatacagtattgaacattttatgcatcaactagtttgattaatacatgatgataactaaaaatattcttacaagagcagaccaaacatcctggattaataatacaggctgatacagaaaagtgacatacttgttgattattgtcgcaaagagtgacaagacttctgattctcttgcatcaggaacatttcttgcatagtcgccaagtacttgatccatcattggtggaacaaactgttttccaatgtgtggctggttttcagctttatctaaaaacgtctctatcagcttaagaatttccctcttaacagacctgttccatcaagcataaagatgtagtattattccagtttcttatatagggacattaattttattttgtatataaaatgccctcctaccttaaaagtttaacaagagatgttctcgaagcgtatgggccaccattagcaatgctgcttgaaacgagttcactatacattctggtgcagtagaggaagaattaagtccataaacataatgagtgtatgtgtgtcttataacttttaactgcaatataagtgttgtataaagagtttacctgtaaacattcagcatatccaagaagatcaacgaaatttgagacaggaagaatgttcctagtgaagttgcaacgcgcgtatttgtctgcacaaaaatataagttacactatgcagctaaaccaaagtctaccgatgcaccagctcaaccataacgaatgctatttttatgtataaaattctaatacgttcaaaaagaaaagcaaatttcaactaaaactccgtaagattcagacctggaggatattaagcacagtacgtatcacatctggttccttgaggatatctgcactttgacgtgcttgtcctataatttctgcccatttctacatcatacaaaaaatacatttagtaagctattacaaaaaccaaagatgaacagtacctttttacttaacagacctgattcgggagagccatcaacctctggaggtattcccccctcttctgaggatctgattctgcctggatcatactaccaacctggagagagagacaaagagtgaggtcacgataacgaatagcttcccatctctataaaagagacacgactaaaaatacgtacagattcataaaatgtatgaatctgatgaggttgaagatctccgacgattgtagcaaggcctgatagaagttcagacacaaatggctcactttctccaacctgaaaagcacagaagaccctcattagatgataaagtaagaattaaaagtatcaaacggacgaatacattacctgaacaataacaaattttcgcttacacttctgaacaatttttaagaatgtgtcgcaagccatgtcctgaaaggaaaacgtagggtatcagcttgagcagattttagataaaccagacaacccatagaccagagggaaagcaacaaaatgagtcataacatttttatgaatatgagatgtgataaagctgtgggatttaaggctccgacggtttattagtaattgctaagtattataaagtaactatggtttgatgtgggtaatgtcaagtcactatggtttgcttagggagtctcatctatataagatgtctaagagaatgaagagagaggaatcgagtctttggtgaggtatcttagggggagtgggaggagctccatttacaaatcctcagttacttttgtatttcctgtctatgatctatcaaatctattttctataagctactcatatcaaaggtgtaataaatggatagtaattaaatcaaaatttccaaccggttctacttaatatgaaagatttaagcaagaaactgtaattcctaccgacttccaaatccaacttgaacaagggaagaattacctgaacaccaggatgcgtctcatgcataaattcaaacagcttatggacaactgtcttcaaaaacttccaatgggctcttaagaatcttgaatattgtccaacaacgtacctgaagcgaacaagaatgcaaagatcaatactcacccgaatcatgcatgaaacaaatgctagcagggaacaaggggtacttctagtgaaaatcccacattacataagtaccaacattccaagccaaaatcaacaataaaatgtgtaggatccatgatgtagaaacaaactcacatgatgttgctcgcaataacagctttattgtcttttcccttgacgacttcacataaacttaacaaatcacggataaccatcacgagaaatctgttttcctggaaaagaaagacagagttgagatgattagtaaaggacacaaactttgcaaaacactggtggtgaaaccagtcgaccataaatcaatgggagaccgagaccacttaagagcctactaacattagaaagatgctaccagataccaagaaccaaaaagtgctactgcatttaactgttgtttgttgaaaacacaattagacggacactgagagtggagatcttacctgttctactaccatggacccagaaatagacccaatagcccagcataaagtgtttagattgttccatgcccattcctccccgctcaactgtttgcttagcttactcaacatcttagaagtaaaagaaaaagaaaaagttgatatcaatacaacagggtcatccaagactcttaacaattaacacttcacaactattaatacttctacgtaataaatattgtagaaatttagggacactctactggtcttctcctctaaacaaggagatacctttcgtaggcactatactttatcataatactccacatatttcacagcatatacaaccattaccacgcattaactattgtaaagaactttaaacgtaaattttgaacaaaatcattctagagtccagaggataaggaaaatctggcatccctcaaaataagtacctgtttttcggtatcttcatgatcaaggtgtgagaggtagattaatgtctcccgcattatctgcaatggtgtaaactatgaaatgcgaataccttatgtttgaaacaaaaacgtaagatcatataatcgaacttcctcatcaaaaggagtagcaacgagaggaaaaagtgtgtcaaattttctctccaaaatcatgggtcaagaaaaaaagagtgtcaaaaagaagctaatttgtacaaatccatgctgtgtggaggacatcgtatatgttctataacagaataactaatgataggccatatgttcagttggtaccttatactggacaagaacatcattatccttcatagtttcacgaacaatgttcccattttcgtcctcaacaattaacacttcttcaggcttagccgtgcgactaatcatgagtccccttaattttgacattggatctgaataaagtttttgccgctcagtgacttcagatttaacaccatcaactgtactaggaaggaaagccatctggcaataggtaaatcaaaacacagggtaagcatcaaggcaaagttcaactactactatatataatcctgatttccattttataaaagaacataaagaaatcatacttgcaatccaaacagacttggagttagtgcagggtgacacgcatgatgtcgcgtcccaaacaactccaacactaatgaattccaatagtccaaacaaacctgttcactcgtaagcaagcaaaagctgtcagtttccaaagcgtcaacagataacatgggaccattctgataattaatataaatatactgaaacctaaaactgcatcaagtatcaacagaaaaatgtattaacaactgtaattcacataccttgaatacttcagtgtcatcaacatacgatatgctaatgagatatcccagacccgcaagtaatagagaaatattttcgggtgcagattctaggatttttatatgtaactgcaaacgaaaacatagagcacattattgtgtttgaaatgcataaaatatatgaaagataaaagactagaaaaacaaatgccaaccatcatccctcgttacacatccaaagcctaaaataccaggaaaacaacctgacatatctaactcaacaaagaaagagaattaccttgaaaaacgaagtgaaaaacagtgccaagttctggataaaagcctaaaggtaaagaagatatacagtcattatctcgaaatgttacagtaaaaatggaacggccagaaacctaatgcacagaaaaacacttgcctgttcttcactacttccagttgaatatgcctcagggatatttaaatttaaagggagaattgcctgcagacatgaaaacaagtatgggcatcaatcaagaagcaacagtaacatgaagtcaatctacatgtagtacagaaccagtaaaccaccataaggagtacattaactaattaaaagtaaaactctatagtaggacatcactgaacaaggccatgaaaacaaatagaagtaacaaaacaaagataacagcactacctgcaactgattcatgaaaatgctgtacatcttgacatattgcatatcgtagaagtccccaaaattaagagatgcaacctgccagaaaaaaaaaaaaggtagttagataatgacagtaaaatagtgacaagtaggtaaagctgaactaaaaaccggcatacctctgacaaacattgaagtgtgagattcctatatgctggaacagggaagaatttaagtaggatctccagctgcgaataaccagatcagtaatgcgggattttgttattaaagacttgttaacctctttcattcacttgatccaaatatattaccaaaggggactcaaatatgtatcccaacggaatccaagaaagataggcatgcaatgcagagagtgtagcacgtataagctcttgtctttgggaagctgagaggacatataggcataactcgtgaatgagttgaaactcgctgcatataagaaagcagtataaatcagtaaagcagttcgtttttatgtattgattctaataaagtaaacttcttgaaaagtctaacttgcctgtttagagactgtttcagttcttttatcttttgctgagtcatctctccttttgagaaatcaaagacctcttcacttaggagctaaacaagaagaaatgttatttaagtacaccatgaacttaattaatgcaaaggcacttaagactgaacttactttcaaaatagccatgcaattctcacagatagtttcactagtcttagcagctataactaaatcaggaataaagcttttccactttgccggccactcctgtttcacgatctgtacacagataacattatatgttattcccaaaaactaaacaaacaatttcaataaattggcaggagcaaaatctttcaggcgaaattggctttagcaaagccttaccagagaaaacatcagaagtaagtagatagtgaacacaaaagaaggactcaatacaaatatgtattattagcaggaaaccccgaagatacctgaaccaggatgatatttaacttgttgacataaagcctttccgttctgaaagatgcttcatcccttgacagctacacagcaaattcagtatcaaaacgattcagttaacttaacatcttagttctaaccaaaaaacaacctaatggctctccaaataatatacctgcacaatgacatcagagatgtaatttttcattccatcacgttgttcaacgggtaatgcattccacctatattttataacaccttccagcacctgaaattatacgatggaagacaactaaatagaatgctaatgctgtcttctttggaatggatgtagtgggacattatatataacaacgggaatgctaaataaagagaagagcaggtataagagaacactaaaacactgacctgaagggcaaaaaatttggtatgcgtactactggtgttctgtagaatgtgaacaacttgaagccaagtatcaggattagctttcaaatcccgcaagatattatccgcagaagctctctgcaaggtgttttcaaacattcttatctcattgaaagcacacatatgcaaacatcgtttttacacacaaattacattgtttagtgtttttccagataacaagaacagccacaaacaatcgaaacctatctctaacccaggaaaaagaattaagcaaaactcatccaattcgtatcgcaaatactaaaccctcgcctaacccccaaatcgatagaacgcattaacagtgaataagagaccgcttaatgtggtggcgatactcgttcatcgttaaaattctcagagaaattatgataaacaacgggactcacttcttccttagatccggtagagtaaaaggcctcaacagtggcatcgagtaaaacgacgtcaatcggctgactcaagtctcttaacttctcggcagccatggcggagaggatgcgcaaattctagaagaagagactcgatacgagagtgaaatcaatggagggagacaaagttcgagagagagggagagagtttttttttgggtagagcggtacggaggagaggcagtttaaatattgagagaggtttttgaaagacagcttaagattgacgcaggcgacgctgagaaaaaggcctgacttctaattttgttttctcttctttttttttcgttgaccgcctcagggtttgaatttgtatactctacagtctacgctactcaaatatttactaggattgtttattttattcaaagatttactttaaggaaagattattataaaatgaaatgcaatcatatagattaatcaaatttccaacactttttgaggttttacaaaaaaaaacattattaagttttatttttaaataagctatattcaatcactaagttgtagaactttattatttttatttaatgatgttcattattagattttgtatgatattattatataaaataaaattgagtgttttttttttttttggatttatgtatttatgtcatattattatgtttgcattaattaattaatagcattttccccaaatattaactttactttctttctttttttgaacacggaactttactaagtagtagtattcatttgatcccatgaaatctaagctaaggagtaagcttggaaaaaccttaacaataggagatctatcattatattgaaatcgagtttaccattcgtgaagatatgattataatacgttgtgtactcttagcttgtaaaatggctaatgggatttactaagagaggaagagaagtgaactgttaatgttatgatcatcaaatgctttgaggaaagtgggaaaaacagatttagctatgaagctaatgcatagcaaattggaatgcgtagtgttaaaacttaaaaggcctttttttttttttttttgggttttataatgcgtagtgatttccttttttttgataacatatacaaaatgaatttcctttttttatttttgaacaactccttatgaataaatacacatcatctcttcttattcactgagaaatcaaaattacaaccctatgaatgtatgatctaatgctttgaggaaagtgggaaaagcagatttaaatcttgtatttcttgatataccaaatcatagtagaaaatgtatattcatatgcttctctgccacatcatcatggggaaggccatagcgagcaagtggcccaggtaaacacaaagcgtagcccaacaaatacaaaacgatgcgtttagcaatcgtcatcatgtcccttgttatttcgacaacgaaatcaaatcccgattccgagagagagagagcgatagcggaagacgatggctttgacggtggcgaagagtgcgttggaggcgattagagagaaaggtctcggcggtttcatgaggatgatccgagaagaaggcttcatgttagttctctgtctctcttttccaatctctcttcctctgcttaatttcttcaggattataccctcgatttcattagttagatcccaaataatctagaaatttacaagaattttcggtgtttgttgaagtttgtttgcaatgaatggttatcattcttcggtttttttcactcaaatgttaaattttcttgatgtgaaatgaaaatcaaacactttgtttttggtgaacatcaattttgaacggtgatggtgatgcttgaaattggcataatgtttctggttgcttataagtctaagatcttattgtttgtattccgaggtaatcactagtttatggaatttctctaattgcttctttcaattttttttcttcattgcaggagatgcctaccagatgggaacctcttgtaagtaatttatctttgataattagtgcttagtgtttcacttctttgtggattacgaatatgattcaagtggttgttcaagagttctttacagaccaagttcattttcatattcttatatgtgtatgttgttgtgtgagcgaacataattttgtcagattcattatactgtgaacagagctcgccaattcttgaacagcttactattctttgacttggactgctgatagatgttatgttagttgattttggagttcagtaaagaaacagtgacagtaaatgatggttggtattccagagatagtgtagttacatgtttgaaggaattgacaatattatgccataaggctattcaagttgatgaggaataagagctcaaagattggtgaggcctgttaatggtgatgaaattggcctacaaagtagtcttgaaacttgaaagatcttaagagtcaaaatttatgtgcctctttcaccaagtctataagctggatttgtcgttctcataggctctagatagttggtgcatttggctgaatatagagaaccttttcctcagatcatttctttatgcgtaatatacatataacatatacttagtgttgcttctatgttgtgtattgagatgttggaagcatgtatatatgggtcacatagtatatacacagtatgcttgaatattgtgtcttattaatagtttccccattctttatattgtagcttgctgttgagtcgtattttctgatcaatactgttttatttctatatttgatgaaggcaaactaaaatacataacataggagcgacacttgttggtgttgacaagttcggtaacaaatactaccagaagctaggcgatactcaatacggtatgtagttcctttaacttcatgttttacctatataaaatcatgctttaacctaaaaaaattgatgccactgtaggattcatgatatttgttactaaatattcagggaataacccttttaatattgacttcaaatgtttgtttattctgagtggtacagtcatggaaattgtagccactcactcagcatttgttatttgttagctcactgcatgtatcttaatagaatgtttagtcaagaggcttttacattgaaacaagcaatcactttgtgaacaggtaggcacagatgggtagagtatgcttcaaaggatcgttacaacgcatctcaagtaccagctgaatggcacgggtggcttcatttcatcactgatcacactggcgatgaggtaaaaccaagagccatttcaaattcgctgtctcgttcaatcaatagataatatattgccttgtaacttgataataaataccaatgtctctgtttcaagctcttgagtttgaaaccaaaaaggtatgggcttgagcataaagagaacttctctggagaaggtgatgcatacatctaccattcgaagggacataccttgaacccgggacaaaagaactggactcggtaccaatcatgggtacccaccaagactcagtaagaagatgatattttggttttacgctctgcgagactttctctcgagtgatttgttgttttgtttctgtgtcattttaataaaagctgtcttggatctaaagctggacaattgggtttcggatctggaattgtaattgttactgtgtaataatttgctgattattaagtttcttgtttcttcacctctggctaggaaagtagaaaagttctaataagtagaagtatttaaaaatatattaatcaaataacttcatcgagaaaaatatctttcaagattttttttttcttcgaaaatcttcaaagaaaattgaatacagagtttatgatctaaaaacaaaaaacaaaaaaaaaatcttccaacaaaatcttaatactattaatacatctaaatgagagatttttcccaaaacggattatgataaccagataaatcgaacgcagtgccagcaacaaaacgtttttaatggtaattaaaaatttaaacgagatcagcaccacgttttttaattatccttcttctgtcgtttttatggtcaactttgttataaaaaaaaattataatctttctaaacaaaaaaaaacgaaactggaattttgattaacagaaacatccaatatcaacatttaattggttttacaatttaaaaacaaaaagggtttcacagtttgactctctctatttatgctaacacactattaagactaatttcctatttttttaattgaaaatcagaatcttaatttgaaattaagctccgactatttaaagcttgtccactgttccgttaacatctataatcaccctggcatacatacttgtcgtctcccttcctcacgtttctctcctctgcaaattcgaagctccgttgagctcgaatcagagaagtagctatttcgtacaaccccagaacgatatatttttttctgggtttccttgaacataccacactcacggtcacgggatccataccaagcttccgtagccatggggtttgatcccgagaaccaatcgatctcttccgttggacaggtttcgcttttctcattatcgtcttcttttccccattcttctttcggtttaggtttccgatagcaaattgtactgatttttgttggttcttctcccggtcggctttgaagacttttgattgcaatgtatatcttagggtttggcttgattttagatatcctttttatgaagtgattgtggattttgatgtctctgtaatgtgtggagcttgtgaaaattgggatttcaattttaagaccttagcttctgggttttggaataacgattctatcctaaatctctctaatttggtatcaagtcactttctgatgcaaaattcctgaaactatatattatgtaggttgttggtgattcttcttcaggtgggattactgctgaaaaggaacctttgttaaaggaaaaccacagcccagagaactactctgttcttgcagccattcctccgtgagtctctctcgttctctcttgtttattagtcatcaatttgtggtcccagattgttttgtttatttgctatttattgtttgttactactatttctgctgaaagcaagtgggaatcttttggatatgcacatgatactgatttttctaaaagcatgctaagaacgtaagaacgtaacaagtcatttattgcaggtttctctttccagctcttggagcattgctttttggttatgaaattggtgcaacatcttgtgctatcatgtctcttaaggtaatggtttaaccttgtctaaaactgtgcttctatactcaagtttgatttttttagctttctcatatctttagcagttaaatgacgctacttcatagttcatgcctgcatttgcactgccattacgtttccttggatttctcctgcatagttgttatgcatgtacatctgttcgattgtctaagcctattaaattctgaatgactaatctgcttttgcctcagtcgcctactctaagtggaatttcatggtacgacttgtcttcagtggatgttggtataattgtgagtctacctttcttggatcttctacatgttggttattgcactattttttgttcttattttctccctaaattgggaagctgtgatctttcttgtggaaggacaaagaaatttgcttacgacaattttcatacttttgtgcagaccagtggctcactgtatggtgccttaattggctccattgttgcatttagtgttgccgacattataggttggtttttctcaactgtcttcatctgagtatgtagcagcagtctccttcatctgaaagaaattgaattgttggactaaattttcaaggaaggagaaaggagctgattttggctgcattcttgtatcttgttggagccattgtgactgtagtagcacctgtcttttccatactgataattggacgagttacgtatggcatggggattggactggtaagataaatcacacatctttattgtttgcctgctaaaatgtgcatcatgcatttgactaagtagttaatcatagtcaacctttccacgaatagctacttggtagaaatatgcttcacgctattactgaacatgtgttatccaatgcatccatatactaccagtctatcactcatagaccaacctggcagtgtttgcattcttctgtattcatatattggcttactccttcgatttattgattggtggaattcgggacagagtttacccctatatcgagacagtctgagatatataattcatcctattcttattctcctgtctcactctattttacgaagttgagagccattgtttataaatattgtttactgttcaaatcaagatgtttgttctactgtgagtgaatccatgcagctagggagtacaattttaagcattctttttaactggaaagttgatatgtttccttgcatttagaccatgcacgcggctccaatgtacattgcagagactgctccaagtcaaatacgtggacggatgatatcactaaaggaattctccactgtccttgggatggttgtaagttctcgaagctctgaggattttggaaatttattgccccgtttgaagttacagttttgattccctccattttgaaacctttctgtctaccaagttaaactgacacataattttgtgaaggggggttatggaatcggtagcctttggattacggttatttctggttggcgttacatgtacgcaacaattctcccttttccagttattatgggaactggaatgtgttggctaccagcatctccgaggtggcttttactgcgcgctctccagggacaaggaaatggggagaatcttcaacaggctgcgattagatctctttgtcgccttagagggtctgtcatagctgactcagcagctgaacaagtaaacgaaatattggctgaactttcccttgtgggtgaagacaaagaagctacatttggtgaattatttcgaggcaaatgcttgaaagctctcactatagcaggagggttagtcttgttccaacaggttggtgcagtcaattcatcaaacattccttaagaaaatgaacaataactaaatatatttttattttcgaatgacagataactgggcaaccaagtgtactatattatgcaccatcaatactacaggtttttcttttcatctctacttaagttgaattttttgcactaggaggaaactcgtgatagaaaatcttaacttctttttaccaaaaaattacgtgttagactgccggcttttctgctgcagctgatgcaactcggatctcaattctgctcggcctattgaaggtattcatattcttccatctggtttgacatgtcagatccttttagcaaaaaattatgaaaggattgatacgcgttgtagtacaactggaaatataaatgatatattcctttcgaagacttgatgtgatccttttactgttgcagttggttatgacaggagtttctgtgatagttatcgacagagttggaaggagacctttacttctttgtggtgttagcggaatggtattttatgtcttctattattaattgtttgttccaataagtttcgattacatgaatcggaagctaaacgatccaaaaatatactcgtgtgtaacaggtgatctcattgttcctcctgggatcctactacatgttttataaaaatgtaccagctgttgctgtagctgcattgctactgtatgtaggctgttaccaggttaaattttcttacagatttttctgatcaaagttccattccgtacaatgtcatctgcggctttgtattttcagtaaattttttgatatgatcttaagaggctttccatcaatcttgcagctgtcctttggccctattggttggctgatgatttcagagatatttcccttaaaattaagaggtagaggaatcagtctagcagtgcttgtgaattttggcgcaaacgcacttgtgacattcgctttctcaccgctaaaggtaaagaaacttcttctctttaaatagattccttacatagaactaaactataactttggaagaacaatgtttaacgagagattccccacatagctcgcatacatcttgctagttccttcttatcttctggttttccgggagagattattgaacttttgaggtcttaactcacttggtattgtttgcaggagctgttaggagctggaatactgttctgtgcatttggagtgatatgtgtcgtgtctctcttcttcatatactacattgtgccagagacaaagggtctcactcttgaagaaattgaagccaaatgtctctaaaaggttactcatcttagctccactttctgtgctgcttcattgcttgaggatctaaatcgcaaacgcaccagccgcatgtgtagtcactagtcagccatttatcgcggaattttcactgtttggatatcttttaaagaatggttgtatctagcggcaaaatttggtgcgttggaaaagttttaaaattcgaaagtttgcttaatttgtattttaaaacacgcattcaaaattttgtgattgtatgaaaataatgtgagattcaaaattttatgaaacaatattgtaacgtcgtcagtgattattattacacgaaacatattatgacgtcataacaagaaacataaataaggtcataaggaaatcaaatcattgtacgattcacaaaagcctataaatacaatcacgtcctcaacgtaggaagaacacaaagatcatcttttgtggtaaaggaacctaaaccggagagaaaaatggcaacctcaggcaatgcgacggtggccaataagcaggtcatactgcgagattacgtcaccggtttccccaaggaatcagacctcatcttcaccgattccaccatcgatttaaagattccggagggatccaagacggttctggtgaagaatctctacttgtcttgcgatccttacatgcgcattcgcatggggaagcccgatcccggcactgctgcgctcgctccacattacattcctggcgaggtacaaaaacgacgtccatagttcacgcatgttctagattgttacggatcaacacgattttgttacgtttcgagcttgtttgttacccacgttttgtgcaaaacaatatcactattaaaacagagatgaatttggaaacgttgttttcaaatttagaaacattgcaatgtttcttttgaatactgtgtgatctaagaaattgtacctttatgattagaagtgattttctcttacttacagtctctggtgctaaaggttttgatgttttgtttgcagccaatttatgggttttcagtgtcaaaagtgatagattctgggcatccagattacaaaaagggagacttactttggggattagttggatggggggagtacagtcttatcactccagatttttcacattacaagatccaacacaccgatgttcccttatcctactacactggacttctcggtatgttatctctgcttctcttttgttcatgtatgtaattcacttgatagtgagaaagctggctatatacaatgcttgatgtacctctctctatgattattggcatgatagaatggtcttagaagctcctaatcatgtagaatagttgttttggttgctaacatatctaataacttggtcaaaactctacaagtttcagtagtttactggtagtcttagaagcatcgctctgtttctgacaggtatgcccggtatgactgcctatgctggattttatgaaatatgttctcctaagaaaggagaaaccgtattcgtgtcagctgcgtctggtgcagttggtcagctcgtgggacaatttgcaaagattatgggctgctatgttgttggaagtgcaggcagtaatgaaaaggtaaccagaattttcttggactctagctattgatccatttccttatcaagagattcacttgtccccttttttctttctccgttgagttttgttataggttgatcttctcaagaacaaattcgggtttgatgatgcattcaattacaaagcagagccagaccttaatgctgccctgaagaggtcagtatactttgagaatgtaggagacaaaatgtgatatagagatctgattcaaaactatgatatctttcttctcacaaggtgtttcccggaaggaatcgacatatactttgagaatgtaggaggcaaaatgctagacgcagtgctcctaaacatgaaactacacggccgtatcgcagtatgtggtatgatctcacagtacaaccttgaggaccaagaaggtgtacacaacctagcaaacgtgatctacaagcggattcggattaaagggttcgtggtctctgattacttcgacaaacacttgaagttcctggattttgtgcttccgtatataagagaagggaagataacgtatgttgaggatgtagttgaaggacttgagaacggaccttcagctttgcttggactattccatggtaagaacgtcggcaaacaactcatagcggttgctcgtgaatgaatcagacgtctttagttggagaatgagttacaagaatttgtttagttgtgtcggaagtttattcttacaacttgaaaataaagcctcttttcataggcgtaactacaattgcatttttggttgtttattttgattctttcattggtctattctacaattttgtacctatagtaaataatataaactcacaatttttatacggatattctgagggatgtttttttttttgaaaaacaagttcaaaatatttcattattttcgatcagaatcaaaaatattttcaaaaatgttcgtttttttttgcattttccaagaaattaaaaaatcgaagaatatgtgcttcaaataagtgggcttatatgtactaaagcccaaataaatgcgttgtttggtacagcttcacgaacaatctctctctcgatagattcttcttacctctgaatttctcgttgttggaacaatggcgtcgaatctcctgaaagccctaatccgatctcagattcttccatcttccaggaggaatttcagtgtggcgaccacacagcttggcattccaacagacgatctagtcggcaatcacaccgccaaatggatgcaggtaatcttcgcgatcatgagtccttagttttctagctctttcgcatcccaaataaatatgtacgaggacttgtatcgtgaatttaatctgggaattacactaatttactcgggaattagtctcgacgatctcccctagggttagatcgtgatttggcatgtttacgatttactgattcggtttcgtagtcgattcattctgctgaaattgtgttcctgtcatatgaactggaatttggaaatcacagggaattgttcatttctgaaaactcttgctagtcagtcttgataactgaagatatttgtttcgatgttgaatcagtggtcttgatatctgttcgaaactgcttagaacttgttttggatttttgaggacattaggtttactattacatgggaaatttgtggttgacgaaagaaaactatctgacctaaaatctgttcgttgggaaacttaggcttccattcatgtggccatgtttttacatgtctttgactatcatccagtgcaaaacaataattaaagccaaagggcttgagagcagaagaggagtagaagaaaatattctcattcttttctcatgagttgtgctatctatattgctcattttaagggtataaccattaccttcatagctatggtcttggagttagttcctttcgctgatgaattttgggcggtagaaaatgacgtatgttagtttactgttaacttttatatttgttagtcaaatcaataagttgggttgagctttctcctttatgttgtcactaccctttgaccagatcagcttaccctttttatcagtgcttgagaaaattgtgatgaagagctgattcatcacatactattcctagtttaagatggcagctctgctttcattgaaaactagtgatgtaatctagtgaattttttttgtttgctgagactttcaaacctgtatatataacataaattgcataggctctataccagtcctttctggtaaattatgaagtttctgtatcacattttgttttcttttgccacattcctacaggatagaagcaagaaatcacctatggaactgattagtgaggttccacctatcaaagttgatggaaggattgttgcttgtgaaggaggtctgtctcctcttctcctcagtcgctcaagatatttggtttagtgatcatataaatgggcacaacagaaattgatatataaattgacttttgtcttacttgcagacaccaatccggccctaggtcatccaatcgagttcatatgcctcgacctaaatgagcctgcgatctgcaagtactgcggccttcgttatgttcaagatcatcaccattgaggcaaattctgaaagtgaactgctggtctctctcccctttttattgcatttttaagtttgtgtattgtttttttctggtgtgcctactacatcttcagctatattatctaataaaggattcgatcaaagtcgggtaagtttgatttttgtttgatctcacttcagcacttgtcatgttgtaacattcaatctctgatatcactgtcttttacatgccattgagctcaaaaaacagcaatggcctttttctgctaccaagatcatatgaaagttaaattttaaacaaatacaatttattgagtttttccctcttgaaaattcgttaataagataatcttcttcagttttttatagtgtggttataatttgattgcggaagtgagcaaattcacataattctcgaaaatatttgaaagcgtaagaactagacaaatagtgagcccaacaaatatttactatgcttacagggcctataaagcccactaataggcttttgaaatcgaattgcacgtgaggcgcatgtgccatttaaaattgaagacgcgaatagataaaatatcctactcgcacctgtagcgcgttaacgccacggagcccaaacggctggactagtacagggatttcgtcgtttttcagcaaaataaaaataataggcgcgtggagatatttctttttgttttaaactcatcgcctgaatcatttaccgtcaaacaaagcgaggtgaagaagataactatttctttgaagaagataactgggtgatgtgagcacaatctgatttgagttactgatttaacttttacaacgtcatttccatctcgaatccaaatttgatcaaagtttgagtaactgagatatttttgaattttgagtatgtatatttttcttttgtatcttgtaaccaaagtattattattatcgctacaatcttcaacgaaatatttagatatatttctcagatttatttaaagtagtttagtttgagctccgtcagacaattaatttaaagcaataagacaagtacaaaacctctccttaaccaaaaaaggagaaacaataggaatcaaaatctctacttaaacctccaaaccaacatcagagatttttgtgccccttggcaaaagtgtgaacatgataccatttgactcacttttggtatataaactcatcattttgaatcgactccagccaatttccttctctgttgatgctctgcaactttgtaatcaacaacctctctgaaaagcatagagtccaacacacagtcctcacttccatacacagctgcttgaacacttgccatcagtttcgcaatttctctacctgaaaacccttcggtttttgcagccgcttcctttaagagctcctccgtgacaccctttatctcgatcttctgctgttctttcttgaagaggcggtcgaacaaacccggcttgcttggaccagcctcagctatgtacttttctagatagaggtttaaaagcttgaaccgctcttcttctccaggtaaggggaattcgagaacttcatcgacacggtcagccacagctgagtctaagtcaccaggtcggtttgtagctagtgctaagactatgtctttggattgatcacccgtgcggaagagaagagcatttagagcactcctttgggcttcactcatgtatgttttgttcctcctgttaaatttcgatgaacacatcaaaaccataaacaaagtgttgaaatgatcagcctgtgattatgatatgagtattagcacttactcgcacaaaaatgcatcggcttcatcaatgaagagcaataaacctctcttagactttttgccccaatcaaacagttcgtgaatctttgtaacagcctgagctccaaggggagcaacatctccaccagtcatcagtgcataatccaaaccctacacgaagtacggaagttaggaaagtaagaatagataggaacaaaactccgagaatctcatgagcaacctaaatctaagagctcaagttcaactttcaaatgtaatcatggaaatcagcaaccaccatcttctgctctaccgtcctaattctgtctgctagagactccatggtctatttgggtgtcttataacaatttttgtaataacttttttatatatatggaaagaatacatacagatttacgagccagctctctggccgccattgtttttcctgttcctggaggaccgtggagaagaatatttcggaaaggagcctggtggagttttgtgttggcggttgaggtagctaggtgctcaattctctttgctagcggaggatgcaaaataacatcaccgaacctttttccatttttggaagctgactccttaccccgcaatgtggacattacacgagaaagcgaaccagaccaagggtacttgcctcttgatgattctcggattaacgatggttgtcctaatattctgtccacatagctccagataacctttgcaccttctctgcaacaagcattcagcaaccggctaagtctatatttcactactgtagaaaaaatgactgacaggtaatagaatcaagaaatgtaaaacgagaaatttgctagtcaatggcgtaaacacttcctcaacccttcaacaagaactcacgattatggcaaaaaatattgtcaacattcggactacatctctagtctttacctcgttgtgtagattccagctgccagagcagttacacccccaacagcgacaatcagtttattttgatccgtcagaatagcacgtaaaccgcctaggaaacaagaataaagtgtcaaacacctgttaaaacaattagtattttcatttatttatgcaacgtaaagattatgaggtcacacatctattctaattactaattcttgatacccgaacattcaccacacagggatttacaatgtttagttaaaacctgccaaaaaatgactgaagccaacaagaatataacaacagtgagactatgtatggatataaatctcacacctccaatatggtcgaatgttgtgtttatggcagcaacccatttctctctttctgcatttgcacgatcaacaagcattctcctgtttacatcttcagcaagcctagcttcatgggctcttccttccgcttctgctatagctttgaccctgatggtctcacgttcaatctcagccttctccctctcagtttggcgtctctgcgcctggatctgttcctcagtagctcgtcgagcttgttcctgcctaattgctgaatcttcttgcattttcacaagttcttgatttcttgttctatggaactcattctcggcctgtaaaacgatatacacatcacacaacaaaagctgttagagagaagaaacgaagctaacagtgttgaaaaattgttttgaggatttacatgcctgcatcctctttcttgccaagtcatcttcataacgggccatctgcgattttgtctgtgcttggtgctgagcaagctttttctgttcatcatatattaccttatgcctctcctgtaaaatggaacatgtcaggcacacaactttgttgccaagaagcagctaaaccgagtaataatattaatcaatatgtatcatagtgaccattggaagcagattttgtcacaagacactattttcaactttactaagataacagcataatcgttatgccacagttgctaactcatttctattaggtagccattagttgttaacacaattgttcaagaatatataaacagacatccaaatattggttaagaaacttaaagttagatgatctcacagtttcagcttgggcttgcatagctttaaactcttgcgccttcgttgcaaactcagtttgctttgtctcttcttgctgcttaatactttcaaaaacctaccagaaccaaatacacaacaactgtgagcttaaccacgattgataaacaaacagaaatagaacaattctgagatccaacacagatgctaccattttcaatcacttttaggttcatcatacaaattataacctaattgaaacattcttctgtagcctttcctaaacctaagcatgattcgatttcacaaaatttctaactatagaaagagagaaaaaggttcaagacctttttcgcgtaagaggaatggttaatctctttcaaggctttagcacctcgctccagtgcctccggatcgaaaccaccggaacttgtcctcggattatcattgcgagctcgcggaggagctgaagattcttcaccagccaacgacggtggaggaggagaagcctgctgctgaggattcgcagaagtagagaacccagagagattgaagggaccatctgcagaagcgactttagatttcgcaagagaagccgaagctgctagggctgaaatcaaaccaatcgcacatttctgagccattattcctgggaaacgagacttagggttcttcgagattcgagaatactgtaagaaaatgtgatttatgtagaagaaattggcttggagaagaagaaattcgaagtcggaatatctgttgccattagaaatctcaaagtcgacgagaaggttctcaaggtttaggtagggtttcggcgggacaagtgttggatcggtttctggataacttgacccgataacccgacccgttttgtttccttttccttaaaaggtttatgaaagcaaataaattaaaacttaacaaaactttggcacttgaatttgaactgaataaataattaacagtagtagcataaataattccatcaacagataaaagattacaaaatttaaaaagacaaataaaaaatgtcctttcccaaccaaataaaaaaacaaaaaataaaagacaatgagagaagttctttgacttgctctatattttggctcaactatacttgtgtgtttcttggccaatctctgtctccatctttagaaaggactaaagaaagagaatttttgagaaaccaaacctatgaatcatgggaaagtgaaagatcctccgatttgagtggaaccagcaggtggattaatggcaacccaaagcagagatatggtgatggcaacaagtccagaccagacatatacaatggtcggagtccttcctcttcttcccataagccctttagcgaatggataaagatgagccagtacccagaaactgaagaacactcctccaatcaacttactccactgcggaatcacactgtatatcgtcctgctaaacccgaccgcgatggcgattaggttcaccatcatgattgtgattggtgggatcatgagggatgtccatttcacaatgtagagatccgcaaattcgtcgtctacatcctctcctccggatttagatgtcaatgtgaatgagatttcgattccggcaacaactttgagcagcccttggataaccgcggctaagtgagcgcttgttcctccaatgagccagaactgctcgtttcgccaccattcctcgagtgagattcctgaccatttgatctcgaggagagcgagtaagcagagcgtaatggagatgattaagaggtagacaaggaatgtgacattgagtgtttggactatgaactggcctgagaatagggagagagctgggaggaagcagtagactatgaggaagaatgatgtgaacgggtagattccaacgtttaggtaagcgattctctggaggattttcattctcgggctagcaaagaaggcattgtttcttgagaagaagatctctaccgagccagtagcccatcggagaacctggtgaagcctatccgtcaagttgattggagctgtgccacggaaagcatcccttttggtcacacagtaaaccgatttccagcctcggttatgcattctataacctgtgaccacatcttccgtgacagatccataaatccaaccgatccgagatccccactcggttttatcctcgtaccaacaagagatgacggctatggcttctgccacagttgatgcatcaagaagctcgcgaggaatggtgagagctccgggtggtcgtccgttttgcacagctgggtgatccgcaagaggacgaccttggaactcggcaaccgggattgaatcgataaggaaagtggagtttccgaatttcttcggaaccaaagaaagattcatctcttcatcatcatctgagtcaccacccattctcaaagatcggttttcttctggcacacggcttttcttcttcttgcgagagaagcagcaactgcagaatccgggatggtgttctttagcccgaggtggatcgaatccgtacaacgcgattcttctaaagagacaacccgttccgacataaacaggacccatcaacccatcaagagctctcatgttcacatcaaagaagactgtgttgtgattcgcataacgatctgatgggtcaataccttcaaaccgttgtgggaactgaacatagcaaagccggtcaccacctcgatccatcatgaaacacattccttctcttaaagcttgagagttgtatatgtaatgatcacaatcaagattgagtatgaatggaccgttggacataattgcagaagctcggaccagggcattcatggctcctgctttcttgttatgatcataacccggtcgcttctcacgcgaaacatagacaagaagcggaagacgaatgtcaacatctgtaagatctaagaacccttcagacactccatgtaatggctcatcacttggcggcttcaacatcacctgcatttatcaaaattttgaaaaacaatgatcttagagttggcatagaaactgaaccaaaccatattgcaagcaaaataagtaaacctaaagtaaccaaaatttgtcaaactaaatcgaaccgaaaatttgttataagataattcacaactgaaccaaactccggctccagttcagttatgaatgaaataaaatgcccttaaccaaataagtataaacaactgaacttaacaaattgtacctgaatgataccagcatggtcactacgggaatggtcaggaccagaatttatccaagttccaggccaatgagtaccatcagccatccatgtagctttaggaatcttgactggctctactatctcttcatctctgttttgtctttgcagcttcatggccttaatctcttcccttgcgtgataagcatcagaacggcgcctgatcgagtcaggcaagctgttgatcctaaccttaaactcatcatactcacgcttcacccgtcttcgatccttaacaaaatcagccttcactttgttcttgtaaggatctcttttaagactaaagtatgaatccggattcctcggctcgatattgtgtttacgacagaaaggaacccacatgtttgcaaaactcgctgcttcagccatggcttcgaatgtcaaaagcgctcctccatcatctgatacatagcaagcaagcttttctacagggtagtcagcagcgagaatcgataaaatggtgttggaagtgacaagaggaggttctttctctggatctgctgtagatacaaacatatccagtcctgggagatcagatttcccagtcgggttgctcggtgtaggtgtttcaaatttttctttaagaacattgagatccgtagctctgttaatcggacacagctttggaagctgatcaagtagccaagataaggcgaaccaaagctcacaaaccacagacattccccatagccatattgcatctgggtttttgtgcttaatcctccacatcaagaaaagcgcaagaacaacaattcggataagtatcaaaagcctgcaagagaaaaccaaatttgtcagtaaaagtttgaacaaaatggcgatattttgaaataagaacaaactttttcacctgtaaggactaataacagctgcaggaatctgcagtttccgagtaagtggtctccacggtctgctcatcagatcctgcggccccataccgtggccattcccatccttgtcactcccgaaattcccgtcttttgtccagaaagcattaccgaaaccgtaagtcccactagtctcaaacaaccatctattgtgatcaaaatccccggtttgactcctcatcaaaccagacttagttgacttcatcaatgacaatctcctgtccatcttggacccgcccgctggtggcggaagcataggccgttgctgcttgttgttatcagcaaaatccgccaaatccgtgttcctgtaaggctccttacacccgggacacatcccaccggttttcacagcatccataaagcaatccctacagattttgaaatcacactcacagggaagaagatcttgacctctctcatcactcatcaccttgacatcacaaccaggaaccgcgcaagaagatcctttagcacctgccatctgcggatggctagtctcagtatcgatcactttttccataagatgagcccgagtgacgctgttaaaaccgcccgtgaacaaggaattcgagacatactgctcctcaaccttctgagagatggacggatccataggttggttatccggagttggaggaatgtgaaccgaatagccagttaaatcaacacttccaagttcgctatcgagatcatctctggagtagttgacatatcggccagagggagtcctgcgggcaaatgtcacagaatttgacacaggctgctggtgcctctcagcttcagcagcatcagagtttgttgatagattggatctactgttcatgaaatgattattagacgccattgtctaataataacactatccaccggactttgtagccggcagatccctgaaacaaagcaaaacagtaatattggtcaaatcttctactcattgttacaaatcacacaagatctttaactccaaatcatcaagaggtgaacaaacagaacatcaatagatctaaagcttcaagaagaacaaatctaatcataaataaaccataaaagacatcaaaaaagtaatgataattgataaaatcataaccccaccaaaagaggagaggcttaagagggaaaatctaaattcaaaatctactggatccttccacattccgagtataagacaatctctcacacaaacgaaacaagagatcaaggatggtacagtacctgagagtctgtaacagagcaaagttaagcttcagatcttcttcaaccgatagatattttagacagagagagagagagagagaagaaaatgatttcttaatttaacaaatcgattgtgaaggaatcaactgtgatcgtgttgcccaaactaattaaggagaagaaaaagaagagacgaggaatgggacttagtcgtgagcaaatacatcagcactactactgctttactaatacacgttatgatggcaacgataacccccaatttttttattgtggagatctctaggaaattattaaaataataataagaaaatcgaagaagaaagacgaggatgaaagaagaagatctcttagctctttgattgttttttttataactgaaatagtaagcttttgagacggtaacagtgacgacgactgtcaaaacgccggcgagagaagaaaccggcggagatttctttttctttttaaccttttgaaatcctttttgtgttgaggttttcggacaaggtagcgaattaaaaggctccattttattttattattataaataacgcgttcgattcgatgtataaaaaatgaaaatttgggaaaggagaagcggagggtactttggggaaagtcagtaaggaaacgcggaagttaggggtattttggagattttatcgatagcatgaatttcttttggtccgcaatattaggttgattattttaacgtgtgttttctatacaccgtccgtcaaaaaacgtcaatcacgcatgtgttatggaaagcaagtaaattaccaccaaataattctggtttaattaaagattattattgttcctgctgtcgacatccaaaccagttcaataactgaagacgttggtcttatttatccggttctttcaatatcaccggtttaattcgatggttttctatatagagatgtgctggactcaaaatcaatcatcctaggctacaatcgtcagtttttatggccactgatcaatgttgcaaatctttgccacttcaagtaacatcattagataattaacaagtcaaccgaaagaaaacagattacaaatcactttaaaacaatcccccacacaaaagttggtaagatcaagacaaagaggaaacagatacaggttttgcaactggtctggtttgagacggttttcaagccgattaaagaacactaaactcaagtcgaattccaaggaggcgttgttcttcagagactttcattgtggaatcgacttcttcttacacaagaatagcttcacattgcaactatagaactcgttgtactcttccatctcatccaagacaagtttagacacttcacggttcttcataacctgttgtgtaacaccatcctcttcacaattaatatagatcttcatctcctttaaacacgaaaagtaatccaagaaatgctctatcaggtacttctctttcattgttactccaaacccattaatctctaccactttcactggacaagatttgagcgaacggcctttgtcctttcggaaaatgcagtcacaagcatccccgcatttatctgtcacatggtgcacgataccctgaaagcagaaacaagacagcagggttaagtatgaactgcatgctttgtccaagtagtttcatggtttgtattcccacctcaaatattagagtttctaaacgtggacaattccgtagaagaactggcactgcttgccatcctcgatcctcgtcactgtaaataagtaactttttaacgttgttgaacactggcatcgactcacagcatacagaaagcaactgaaaacaaacaagtaagacaataccgcaaccagacatattacaattaatatcagcactcagcagagcagaaagaataaaacagaaaatctgacctcgagagtatcaggacacaagtgaagttcctgaacattttgtatgccattcatgagcttcaccacattgccaaagtggcgaacgacatcatactctaacaaatcattacttggccctcttactcgcttgatttgatcgtcatttgctctaagggcgagtcgagccagagacaagtttttcatattaactaatggatagtcctccgcaacaaaatcagtgtagacaaaggaaagcagatttggagtatcaaaagaaatgctcttaggattttcagagcggatgccagtaatatggagcgttgtgagggttgcacttgacacggtttcatcagaatcaagccactgcatattagacatttgtaattcttcaagcacagggaaacaaggaagaagctcctgaagctcatcatcacaaaaaaccctcacaccgtaaacacaaagacttttaagcattggtaaggaagtgccttcagctccaggccaccaatcaatattaaatgcactttttaatttcagattgactagtgtctcactcacgaacaactcttcaggcagataataaccatatcccaaatcaatggtgagatcaatgtctgaaacatcacgctgcagcacctcacacaaccaacgattcacacgagctggaggaacaccagtttcacacttgagagagaacttacgaatggaagaattgccctgaagagacaatactctatccacaaaatccatgaaactctgaagaataccgtctctttcccgcttaccctcttccggatgaagaaactcagagtcatcaaagtcaagattagggacaagtgcaaacagattacgccacttcttagacagaacagatgtggaagcagactcctttgtggtaagaaaggacaatataagacaacgaacctcgtctggtaaactgctcaacagatccatcttctctgaagagaaaaaaatacacaacgcaaagcaaagaaatcaatttcccaaaccaaacagttccactcgaaattgaagcagagagattgtttattttgagactgagagcaacatcataccttgctacagaggccaatcttcaaattagggcaatgaaacgtcgatgagagaatagcgactgactgagactggaagagacggagtgcggaatttattggtattttggtgatttttatcgataaaatttaattaattattctaatgtgatttgacgtgttatactgtttggtttttgtatacatgtgattatacttttatttcaatcccaacatgaaaatattatgcaactgaaaaagtaaaacccactctaaacgacttgctctaaccatcatgtaaaccaagttaagaaagttaccaacgacttcctttcaccatttactgtgacctcctcgtatgaaggaagctt

SEQ ID NO: 1267 - DNA, 110804 bp, Arabidopsis thaliana
aagctttttaggaacataaaaaagatagcaacaaagaccaatgccgctactcctcctacaacaatcgccaacgacttccccgtgtttacttttgaaccttcttctgtcaaaagaaacaattcgcaacttaagtacataatcaactgatatttgttttggttcagttttctttaataactgtacgtaccgtggtatgaatcattgggaagttcatgtgggtgatatgtataaccgacgtggcacccttctaagtatatttgtccggctatggaccaccgacactcttctgctgctgctgccgcggctgaacttatgcactcgccgcaatcgcaagcttcaacgtggccgtcgcattgagccacaacgtggaggagcttgtagctatcctcatagaatccgtgaccgtcaacaactcctgtttcggctgcagtgagtgcctccgtcctcatctcttcgaatccggggaaagtctccgcggtagctccatcgcatatcttgtggatgagaccgtgttccggggtctcaaataacttgtacttgtgatgattattaacttcttccaaaaataacaagaatcatatttattttacgtaatgaatcgtttactttaatgtgaattcaacttaatttgtttatcactatccttcaatttttctcgcgagtggaaaatttatatacctaagaaataatatattttttgataaaagtataagaaattttactataagaccaaataagtaagaaattttccaaccatttttttctgtacacgattttatgattttttgtcaacaacaaagatgaatacttacgagcgccaggggtatcaatacgttcgaatttgtatatcaaatgacatcctcgaagatgaatacgagctgacgtggcatttccacacgatctagacgaaatttcacgaagatcaccaacacatttatggcagatctcactcggataatcttctctgcattggaaccatccagagacagcgtgtttttcgttaccaactagagtcttcaagaatttagatcgagaggattctgattcgagtttgcgtaagaaagaagaaagggcttgtgcacgaagaaagagattctgattcgagtaatttggagattttgttgttgctttttggaggatgtttgcgtccaatggatcgcattgtttgaaaacaagagtgtcgtaatcaagttgagaagtgttgatgatagagggaagagacagaatgattagggctagggtttgtgtgaggagagagatcaagtggacaaccatgtttgagtcaaaactacagggaagagagatatatttttaattcattgaatatatacattggtgaatggagagggaagttgtggtagattagattttgtctacgtatgtctaccacttgtctacatatgttaaagatttagttgtgacttaggaggtcgtcaagcgcacgtgctaagcacaccaacgatttcttgatcttttcttcttgttggtatgaatatgatcctagaggttagtttaacaattttctaatgattttatgtatagtgaaacagtaatattattcacaatttgtggaactggctgatccaaaatatgttaaaaatgacattcggctactagcggaggtctgattcttagcctaacccttattcaattcttttaatactactagtgttggtttgaagtaagagaataataatgtacgtaaatgtatgtaatttgaaagtaagaaaagctttcgatgaagtcttagacagtaacaaactaacaaacatatccgctcaactaaatttacctaacaaatttccatagttttcaaccaagatttaaattaaaaatacactggaaattctaaacaaccctaaattatgttttttttttgttgtgtgagagcgaaatagtcggaattagagtaagaccaatcaaattttaaatatttatcgtaacttttatttcaagttgctttatatgatgtcttgaatctcaattgccttgccaagaaaaacaagcgctgacatatataaaaagcctaaaattacagaagaaaaatacaaagagctagaagaaaaagaaattcccctgttcttccgtaaatatcgttaattcgttatgacagagtttcattctctttgactagatctttatttttttctttacaccgatacaagtcaaaactcttaacaaacaaatatttagatcaacatagaccaaagagtcaaagaaataatgtctgtctccataaagtctccaacttttataacaaattttccgttgaatatgacagtaaataaaccaacggtctagttcttatcatgtctaaaaaccacaagctccttcctcatcttacgctcccctctttacctctccttttattctccttctcattctcctctcaacaactgatcgtataatcattctcacggagacgagtgaccaaaacaaggtctcccgcttcttgcgaagattaaacgaatccatttagattttaaaaaccacacaaaaaaaatatgggtcggctcaagttcgcatgtccggttcttgagatcaatttaatctcagctcaagacttagcccctgtctcaagaaacatgaaaacgtattccgtcgcttggatcaacaccgatcctatgagaaaactcaccacgcgtgttgatcaatccaacagagctaaccctatatggaacgagaagtttgtgtttcgtgtcaacgacaagattctctacgttgacgcatcagcgattgtgattgagatctacgcagcggcttgggctaaagatgctcttgttggtactgtgaatgttcttctcagcgatctttttgctccttggtctggttttggtgatggtaacgacggtggtggtgggaataacaacatgaggcttgtgactcttcagattcgtcgtccttcagggaggctacaagggtttttacgtctcggtgttgcacttcttgacggtggtcaacggagtatgcctttatctattgaggttttcgatggaagtcgaaaaggagagaggaatagtgttaaaagagaccaagaggcttcaagaatgatgcatcgccgtacgaatagcgatcaaacggatttaaccacgtctacgaatgattacggtgtgaaaacaggggttgttactggcaatggaggagaggtggtggtggtggcggtattgttgttggtgcggatagtatggttaatggttcgctttgtagctctgatattggaccatcagcgtctgtggttgcggctgcgattgcgcaagggctttacaatagacagaaaacagcggttaaagcggctaacaaagaggacgcaagttcgatacttgaagggaaaacagagggaattgagcatagagttgaacggtggagagcagagaaaaatggcacgggtggagcgggtggagcggctggatcaagcgatgattctagcgggaaaggaggagcgggaaggagaagaaggaggaggagaagaaaggagaaacaacaagggaggagaaacggtggaggagagggtaagaaagggttgttttcatgttttggaaacgtgtttggatgtgagatttcgataacatgtggcggtggaagcggcggagaaggagacagcacaaagaagagatataataacaataaagtagtaaatcttagtgctgtagacgaaacgtttagtcattctgcgacttgagataagagaaaatgtttacttatttttggtttcttttggtggtgtaaaacgtttgatgatgggttaaaccatacagatttgaaagtattgaggttaaaacgtatgaataaactttcccgttacatttctggtaaatggactaatttgaatatttgtataatactggggttattgtgaaaagcttttaaagaaagggaaaagaaaagagagctttttgagaaacgcattaacacaccataacttcatcatcaaccttctcctctttcttacgcaattacaacttcaacgcctctctatctcttcgccgtgaatgtcgagatagtcgtaagctctctgcttttcaaatttctctcaaattgaggtagagagagagggcacagagatagagagagaggggcataggaaacggtgattttcccagttcccggaggaacaatcggctgatttctctgtaatcgaagaatctaaacctcacccactcgaaatcagctcgtgggttttggggggtctctattaatttccaaattctggagaaaaatcttgtatttcttcaagatgtttgggtgtgattgtttttactggagcagaggaatctccgagttggattcggaatcgtccgagccaaagcccttctcacttccggctcctcttcctagttggccgcaaggtacaaaaaactttctttactggaaattgctaatttatctataatttcaaattgaagttgcaagattctgtatatggaattgagtttttcagctaggcttggtctaatcaaataattgagctgacaagttataatatcgatactttatctttcatgcgtacataagataaggttaattatttatggatccttccttggttaatgacaatcttatctaattgtttggcttaattttatataattgtttagagagagaattaatttctggtttattgaaatttgaaagggtagactgaggaagatgctttggaatattctgcatgggttgttccgttgtctacttgtcttgttcattcttctttggttgactctgattcaagatttttgtatacacaagttaatttcaagccttaaagagactttctatttttgctataattagatatgattggttttgttaagttttattggctcaataatgtaagcaatgataatgttgtctctctgatcatagaaaaaaaggctctatcttaaatgtgttgaagagtagatggatatggtatcatgttatttaatactcttctatgggacaaaaacttaagttttgtttgatggaaataaatctcggtattggtaatgaatttgaagctgatgaatttgtacttttgaatgcatcaagctaagcgccttcttgttttactgtttcaatctatcaattgttctatatagaagtgtttttagttctttgatgctgaaagtgatgtacttttctgttactgtcaatctctttgcaggtaaaggttttgccacaggaagaattagcctaggagaaatagaagtggtgaaaatcaccaagttccatcgagtttggagctctgattcatcacacgacaaatcaaaacgtgctacattttacagagccgatgacattccagaaggattccattgccttggtcactattgccagccaaccgatcagcccttgagaggttatgtacttgcagctcggactagcaaagccgtcaatgctgatgatttcccgcccttgaaaaagcctgtgagttattctttagtttggagtgcagattcagagaaaaatggtggtggttatttctggctacctaatcctccggttggttacagagcaatgggagttattgtaacccatgaaccaggtgaacctgaaacagaggaggtcagatgtgtaagagaggatcttacagagagttgtgaaacctctgagatgatacttgaggtgggttcttcgaagaagtcgaacggctctagttctccttttagtgtatggagcacccgaccttgcgagagagggatgctgtcacaaggtgtcgctgttgggtcattcttttgctgcacgtatgatctgtcgtctgagaggacggtccctgatatcggatgcttaaagaatcttgatccgaccttacacgcgatgccaaatctcgaccaggtccatgcggttatcgaacacttcggaccaacagtctacttccacccagaagaggcttacatgccttcatctgtacaatggttctttaagaatggagctttgttgtaccggtcagggaaatcagaaggtcaaccgattaactccacgggctcgaacttgcctgctggaggatgcaatgatatggatttctggatagatcttcctgaagacgaagaagcaaagagtaatctcaagaaaggaaaccttgaaagctcggagctttacgttcatgtgaaaccagcacttggtggaactttcaccgacatcgttatgtggattttctgcccctttaatggcccagccacgctcaaaatcggcctattcacgttacctatgacccgcataggagaacatgtcggtgattgggaacatttcactttccgcatatgtaatttctctggtgagctttggcaaatgttcttttctcagcatagtggtggtggttgggttgatgcatcagatattgagtttgtgaaagataacaaaccggctgtgtactcatctaaacacggacatgcgagtttccctcatccaggaatgtacctccaaggctcgtcaaagctcgggattggagtcagaaacgatgttgcaaaaagcaagtacattgtggattcaagccaaaggtatgtgatagtagcagctgagtatttaggtaaaggagctgtgatagagccgtgctggttacagtatatgagagaatggggtccgaccattgcatatgattcagggtctgagatcaataagatcatgaatcttcttcctttggttgttaggttctctattgagaacattgttgatttgtttcccattgctctttatggagaagaaggtcccacagggccaaaggagaaagataactgggaaggagatgagatgtgctgaaagaagacaaacctctttgtgatcaagacggtttaatggaagatgaagtctcttgttgaatcggagggttttgatctctactctactagtaattgtgactaatatgtaatttacagtatactagaatagggtttgatcttggtggttgtaatttgttgatgtaagacctaaaacgctgtgtttgcggctgtaatcagctgcgacagctcatgagcaatatgaatgattgattttgttgtactgctatcttctcgtatctctctgtgttctttacgctattggttagattgaattcataaccacccccaactgttccggtttgacacatcgttccggttagtgtgtagtattggacgaaatcggttattgataattcggttccgataatcggttttaataatgtgtatattgtaaacttgaaccgttctctagtctctatctctttctctttcttctgataaacctctcggcactgcgctgtgtagtgagctttcacttccgtcgttagctgcagtttaaaatccggcgaattgcggacggagaattcaatcatatagcattattgaggagctgaaatggaggttgtgacaaagatatggtgttgattttcacttcgccgttattgctgcgatggatttcatttccgcttcttccttatcttcacccttttccacacagttgtctccgatttatttgagctcaggtatagtatcgttaaagcctagacatcgagtcaaaaatcgaaactttgggtctagagaatccaataataaatctaggaaaattgtgcccattagaggctgctttggtttttccgggagttttttgaggtcgaaacagtctgattacggtagtgaagctgtttcggaatcattgagattatgtggagagggaaatgagcttgtgctatcttccgagtataatagcgcaaagacgagagagagcgtaatacagtttgttaccaagcctctagtttacgccttgttttgtattgcaattggactttctccgattcgctcttttcaagctccagctttagctgtgcctttcgtcagtgatgttatttggaagaaaaagaaagagagagtgagagagaaagaggtggttttgaaagcagttgatcatgagttctcggattatactcggagattgttggagacagtctcggttttactgaagactattgagatagttagaaaggaaaatggagaggttgctgaagtgggagcggctttggatgcagttaaggtggagaaggagaaactgcagaaggagataatgagtgggttatatcgtgatatgaggcggttgaggaaggagagagatttgttaatgaaacgagctgataaaattgtagatgaggccctaagtttgaagaaacagagtgaaaaactgttgagaaaaggtgctagggagaaaatggagaaactggaagagagtgtggatattatggagagcgagtacaataagatatgggaaagaatagatgagattgatgatatcattttaaagaaagagacaacaacattgagttttggggttagggagcttattttcattgaaagagagtgtgtagagttggttaagagcttcaaccgagaattgaatcaaaaaagttttgaaaggtgatatctctagccatgattttagcagatataatattattctaccttacctatagctgagattttggttgccctttaatgaggatattttaacagttgattgtcataagctcatctttttgcaagatttctctttgcattcatcttattgcgtgcacttctagcggtgatggtaatgttgtatcttttacttgttagattaccaattatcttgtttgtactcctgcacctagtctaactgtatctttttgttggcttttatatatgtttttaacatgtctatgctgtttttcctgtcgacataaatgtttcatgtttcacttacaagatcaattgattttctggttgtagtgttcctgaaagctccattacaaaactctcgaggtctgagattaagcaggaattagtgaacgctcaaagaaagcacttggaacaaatgatactgcccaatgttttggaactagaggaggttgatccctttttcgatcgtgactcagtggatttttctctacgcatcaaaaaacgccttgaggaatcaaaaaagctgcagagagatcttcagaatcgtatcagaaaacgtatgaaaaagtttggtgaagaaaagctttttgttcaaaagactccagaaggtgaagctgtcaagggatttcctgaagcagaggtgaaatggatgtttggagagaaagaggtggttgttccgaaagctatccagctccatctacgccatggttggaaaaagtggcaggaagaagcaaaagccgatttaaaacagaaacttttggaagatgttgattttggcaaacaatatattgcgcagagacaggtaacttttggcttatgatatgaagtactagcccaaaagtatgtggtgtgtttaatatggtggatggaacaatgctttatgtttttcatggtagataaattacactcttagccttgcgattagcataattaatctatagctttgtattcttgggtgatggaaacctcaagaattgccttggtgttggtaggttctgaagttttttttttatatatattgaatatgcaatttcatgtgttatcttctcgagctataaagtaaatcagtttacttgggcaagtgagaagcacttaatttttttttggctcgctgtaatacgtaaaatgagacagttttagttgaaaccttgttgaaaagtttatgtacatatgtgtcttttgcagagtttattttcccatgtattgatcattcaccaattagttaatgaatttttaaaatctgaaggaacaagttctcctggatcgagatagagttgtttcgaagacttggtataacgaagacaaaagtaggtgggagatggaccctatggctgttccctacgcagtttccaggaagctgattgacagtgccaggattaggcatgattatgctgtaatgtatgttgcattaaaaggagatgacaaggagttttacgttgatatcaaggttgaccagttgaagtccttctctatttgatggatttttaagtttaggcttttaacttttgtctatggttgtaggaatatgagatgctatttgagaaatttggagggtttgatgctctgtacctcaaaatgcttgcttgtggaatcccaacttctgttcatctgatgtggatacccatgtcagagctaagtcttcaacaacagtttctgttggttacaagggtggtttctcgagtctttaacgcattgaggaagactcaagttgtatcaaatgcgaaggatacagtattagagaaaataaggaatataaacgatgacattatgatggcggttgtgtttccagttatcgaatttatcattccttaccaggtataatgtacgctcgctggatattttcctcctgtttccctgtgtcttttctttttgttttatgacttttttctgatacagttaaggctgcgtctgggaatggcttggccagaagaaatagaacagactgttggctcaacatggtacttacaatggcagtctgaagcagaaatgaatttcaagtcccgcaatacagaagattttcagtggttcctctggtttctaattcgaagttctatatacgggtttgttttgtatcacgttttccgctttctaaaaagaaaggttccaagacttcttggctatggacccttccgccgagatcccaacgtacggaaattctggagagtggtatgtaacttttctttctccttatgcttctctttccaacactctcaatttgcgtgagcagtagtattgtagctagtacacttacagttgattactaaaatcagtttgatttgttttgcagaaatcatatttcacttatagaaaaaggagaatcaaacaaaagagaaaggctggaatcgaccccataaaaactgcattcgacagaatgaagagagtgaaaaatccacctatcccattaaagaactttgctagtattgagtctatgagagaagaaatcaacgaggttgtggcatttttacagaatccaaaggcatttcaggagatgggagcccgcgcacctcgggtatgttgctttacggttgtgtgcttattttgtgggatagtgtccgattgtaagcatgcttattcacgctgcagggcgttcttattgtgggtgagagaggaacgggaaagacgtcactggcgctcgctatagcagccgaagcaagagtgcctgttgtcaatgttgaagctcaagagttggaagctgggctatgggttggtcaaagtgcagcgaatgtcagggaactctttcaaactgcaagagacttggttagcttctttgcctcagatttttttgttgattcattcattttcatagatattaaattttgagttctcatgatattcaggttccgaatcttatgtacatcagtttcaatgtcatcttatgttctgatgtttactgtgatgactaggcacctgtaatcatttttgtggaggattttgacctctttgctggtgtacgcgggaagtttgtacatacaaaacagcaagatcatgaatcgttcattaatcagcttcttgttgaacttgatgggtaagagccaatttctatgttgattaaaaattaagaccagatttgaagcattcatagcggtttctcaaagtagcattctcctttttccggttgacttttctgatgtcattccactttataatttctacttatgcagctttgagaaacaggatggcgtagttttgatggcgacgacacgaaatcataagcaaattgatgaggcgctaagaaggccaggtcgtatggatagagtattccatcttcaaagtccaactgaaatggaaagggagaggattttacacaacgctgcagaagaaaccatggaccgagaactcgttgatctagtggattggcgtaaggtgatcttaagctttgcaaagttgtttatatgtgctagcgattatatatgtttttacctattgtctattttcttttgcacctccaaagttttgatggttcatttctattatggttgtgagtactatatcatgtcgtgtttcttctttcttgggtttatctctctgtagttctgttccactattttaataaccagttcatggttacaggtttcagagaagacaactttattaagaccgatagaactgaaacttgttccaatggctctcgaaagtagtgccttcagaagcaaatttctggacactgacgaacttctgagttacgttagctggtttgcggtaagaaatttgtcattttcgtcgcctaaggtcaaaccattttttgttcatttcttagtatggtttcatcaggtgatttctttctcttttctgacagacgtttagccatatagtgcccccatggctgcgaaaaactaaagttgcaaagacaatgggcaaaatgcttgtgaatcatcttggacttaacttaaccaaagatgatttggagaatgtggttgatctgatggaaccatatggacaaataagtaatggaatagaacttttgaatcctactgttgattggacgagggagacaaagttcccacatgctgtctgggcggctggtcgtgctctcatcacacttctaataccaaactttgatgttgtggaaaatctttggcttgagcctagttcctgggaaggaattgggtgtacaaaaatcaccaaggtcacaagtggaggctccgcgattgggaacacggaatcaagatcatatcttgaaaagaagctcgttttctgctttggatctcacattgcatcccaaatgcttcttcctcccggagatgaaaattttctttcttcttcagaaataactaaagcgcaggaggtaaactctgtctactgttttgcggtatgctgtcatctacatacttaatgtttcgtttccccatgattattatttgtgtcttgcaacagattgcaacacgtatggtgcttcaatatggctggggacccgatgacagtcctgcagtatactatgctactaacgcggtaaccttcattgttttacttgaaattggttccattccaagactaaatgtctgataccactgaaccaacatgttgaatactgaacatgatgattcgatcttacatacagtttgcattcattctgatgtctcatctggtcagttgattgaccttatacttttttttctttctgtttggtttatttgattcgaatgagcaggtttcagctttgagtatggggaacaatcacgaatatgaaatggcgggtaaagttgaaaaggtttgttttgctctctagtttccaatacgttcttaatatctgccagtgtcattggtgcctctctagtgttcgcaattttctatcttcagcttcgcttttcagttggttcaagcattgtccaaggctaaaatacataacctctctaatgtcatcttgttcctctacagtctctaatgtcatcttattcctttacagatttatgacttagcgtacgaaaaggcaaagggaatgctccttaaaaatcgacgtgtccttgagaaaatcacagaggagctactcgaatttgagattttaactcataaggtacgaagtttggatcaacttagagtgaaggatgttccaaacaacctctctgcatataaaatatcatcaattttgtttcctcgtaatggtttgcaggatttggaaagaattgttcatgagaatggtgggattcgggagaaggaacctttctttctatcaggaaccaattacaatgaggcaagtgatacgaccatcaatcccatttttattaaaagatgcatgtagtaggaaacctgtagccattttctgttgatccatataaagcttagtgcttacagttttttcttttttgtttgtttgcaggcattgtcaaggagttttcttgatgttggagatccgccagaaactgcacttcttagtgcaccaacctaagagcaatgaagatgattccatattttgatgatagagtttcttagcatatcttacttatctactatgtattatgtggcaaaacaaatgttataaaataaacatttatatttatatgccattagaaaatctttgaaacagatgacaaaaaaaaaaagatatatatttgaaaatcttatcacttatgcttcagagcaccttgcaatcagatggttcctcaaaggtctagaaaaaccgtgacacgacgggaacaagtcaatctgcttcctctgctgacaatgtaactcacggcacaacttatatctcagagtatttgttctttcttgtgttattatatcattgtttttttctaaatgatttttgtcatatcaagttggttccttcatcacgtagttgtaacccatatcacaagaaaatatcttaaattagcgtaatactaacatgaatacacagtaaatgaaccaacttatgatctccgagtttagttttatttttatgttattatatcatttttattgcgtattcatgttcttacaacaagttttattttgattttggaaataaaaacatcatggcttaattaacccatagtaaggttcttgtagaaataaatctccatttctccagagaacttcttggataacaacctatatattggataatcgttggataaactgatagtcgttagatagtcagggccgtcaccgaaagtgaacttgtagtattcgttagtttgctcgatggcgaacgtactggcattgtctgacgtagattcagatccgttgaggactacttcaccttctgaagaagttctctgaactactctccaaaacccggattcaccgcagggacggggatctacgaacttaatcttgagtttggctgattcacgtacgactgtctctgatttgtttgataacacaaacataaccggtgtgggtgctgccatatttggatgagtgaccattaacggttgctgtgggcaggagttgggatcattagatctccatttctttcggcagatccacatgttgtaatccgacgtcatgaagctgatgtagtacggaacgttgggcttaacctgatctccttcgccgtcataaaccacgtagttaccctcaacaacaccggatgttgttgttattgcaacgagcaagagagagatcaacatcgatcggaatgttttcatcttttgtgttgtttcttattttcttgcttttgtgtaatcttgtgttgagttccttttatagagattatggacatatataatgggttggttacaatggtatccattctttaattttcgtcttctttctagtccacatgttagaacttgcttcttaaagtttctaaacattttcttttctccttgctatctggatctggtttacgggtcgatctacgtcaaatctagctactagttaagaattgattaaacacacgctccacacgagctaatagtgttaagtttcataaacttccaatatatcgtgagttattgatccatgcatgatcctagctcttatatgaccctttgagatgatgataatatagctcaggaagagaatgacaaaagtgtcataaataattttacttattgacaatgagttggccacatatcccttgtataccattcaatgtattatgatcagacttcacttcagatgtaagatatttctcacatataaatggttaatgtacaaactggcatttatagagattagaaaaataatggattcaatgccactcacaaacacttcttttcccctaacaatatggagacgcacaggtggatttaggtcaatgcgacttactaattgagaaataaacacgcttcaggcaatcgagcgagtagtttggagtggactttctaattgaccaaagacaaataaatcaacaactctttaaatatacatgtaaagtatgaattaccttaagaaggtatacacgaataaatgcttacgtttgctctacgtaatctaagattatcatgagatgagactttgaatgttaaagagcctttacactaattttgatcgtttgtagtttgtcatcttgttttgtttcgaagagatcaatactgctcttctgaaaatcgaatcaatcatagatttcaattctgacaagtttaggaaagtatcttggagattaggatgactcagagttttgttcttatttcagtattttttctaattgattttggtcattccttccttcatcacgtagtttgtaacccatatcatgtttcacaacaagtttttgatatacaagagtcgattaaactttttggcaatcgcatttagtaatatatatatatatattgtaaaagagaaagcaaaaataaataaaaacaacttaaatagtagtgtaatactaattactaacatgaatacgcaatagatgaaccaactttatgatctccgagtttagtttgtttgattatcatgttattacaacaagttttatttgattttagaaatgaaaacattatataaaaaggtaagtgaaaacagaacattttagccttcactcgtagtcaggttcttgtagaaataaatctccatctctccagataacctcttcgataacaacctatatatcggatagtcgttggtcatactgatagtcgttggatagtcaccgtcaccgaaagtaaacttgtagtattcgttagttttgtggatggcgaatgtgctgtcattgtgtgacatagatttagatccgttgaggaatacttcaccttctgaagagtttctctgaactactttccaaaacccggatttaccacactgacggggacctacgaacttaatcttaagtttggctgattcacgtacgacatctgacttgtttgctaatacaaacataactggtgttggtgctgctaaatttggatgagtgaccattaacggttgttgtgggcatgagttgggatcagtagatccatattgcattcggcagatccacatgttgtaatccgacgtcatgaagctgatgtaatatggaacgttgggcttaaccggatctccttcgccgtcataaactacgtcgttaccctcactaaccacaccggatgttgttgttattgcaacgaacaagaaagagatcatcatcaattggaatgttttcatctttgtgttgtttctgatcttcttgcttttgtgttcttgtcttgagtttccttttatagagattatggacataatgggttggttacaatacacgttcttttttgtcttctttctactcctcatgttgaccttgcttcttaacaatttattttttccttaccatatggatctggtttacagagtggatctgagtcaaagctataatactagttaaaaatgattaaaacacacgctccaaacatagtattaaggccttgaatgagtgtggtttttaaactagtttttagttttaattttttctaaaatctattttgtagccattcaagattttgaaaaaacaagttttcctaaaatataggaaatctagtttttgagtgttttaacaatttttcaaagaaaaccaaaatctatgttttgggagtttctctctcaaaaacaatcgatcacattttttattttatttttagatttgttttgtaaaaaaaatactatccattaacataaaaaccaaaatctaaacaaattaccattcaagttttttaagaaactaaaatctacaccaaaaacaaaacccaagaaaatcaaaaactaaaaaccaaaaaccaaaatccaaaatccaaaaaccattttaaaaactacaaacattcatggccttaggatacagcatgcatgaattgatccatgatccatgcatattccttgtatataaccatttgagatgatgatattggctcactccgacaatataccttctttttttcacgttcactctcacgaagagaatgactaatatgtcataattaatttgacatattttaccaattaccaccatgctgacgatgaattgaccacatatccctcttgtatatcacatataaatggtcaatgtcttataatgtaagatatttctcacatataaatggttaatgcacaattcttacaacttacaagtttaggaacgttaaaaaaaaaatggtacatgttttgtcccctttgttaccaattaccatgtcttcgaatttgttttaattcggctggcttggtgttaccaaggaattttggttccggtttggttttggttaaataaaaacattggttttatttctgtagttgaggttcggtttggtttaagttggtttaactctctatcactgttctttagcaaggagcgattaaagcgaagaacagagtttgtggatgggaaagaattgatttttctgttcgttctccagttttgttcttatggaatgtgttgaatgtaaacgctaataatcatcagtttgtggatggcgaatctgctgtatcttcagctttcttcttgcgtcgtcagaggcagattctgttctctaaactgcgattttgatctctgcccaaatatcgtgagccgcggttcctttgattgccgcgcctcccgcggtcctagctgggaggaggagctcttccgcgacgaaggttttgcttcgtttgagttcggaaaccgtaaaaagaagaggccttggtggcttgatgatgatgatgacgatgacgacaacgatgattggatgaatgaagaagaagaagactggtctatggtttttgaggtattacttcttctttttggaatttaagaactgtaatgttgaatctcactttaaagttgctcactttagattcacaatggtttatgtttagttgttagctctgtttagccaattttagaggttttgttttaattgcaggtatttagaacattgagttggatgcttgcaccaattggcatatctttgcttcttggaacagattcaaacgcgggtgtaatggcattagcagttcctttagtgcaatctgtgttgtctcttgtggttagtaaagtttggagcaggccaagcattaggtctatgaaaagaagtagaagagatacattttcgagatctgcgagtgtaagtagtggaagaacaaggaaagctaggcaaggaggaaacatgaggggtggtgtagataagggaggatacaagtcatggatagtaggagatgatgattctaacagcatgggtactggctatggaggatgggatgatctagatacgctaagggagattagaaatgacaatccattaaacgagaatgttcgtccaaaacaacagtttgaaagaaaggctactcggcggtggagagttaaggagaagccattgctcttgaggatgctaattgctgccttcccttttttgggttcatggaccaaattgttgttttgacaagggatttatctaagtccttatacacgcggtttgaaaaaggacaagagtttctctcgcggttggtcgtcaaatgaattcaatcttcctggaatcataaaggttagctttcaattatcttggaacttagaagttagaatacacctcttacttgtgataactatgcatattctgtaagttgagaatatatgcctgtcagatttttgtttctataaatacaaacgtgtaatagttcttgttttgtacagcctaattagtatcttcattttttatataaccagcactaataattggtgatggcgtaccagatgctgctgctactgtttctttagtatgtgagatttaagattacatactcttctactttatctagtcaggtagcaatactgctagaatatatgctttcacatttatttgcttcacatgttatatttaaacattcaaagggttctttatttgtttttattagtgataggaaccaatggcctcatgataagaatctttgataaagactattttaagagtaaagaacaatatcagttaatagggaatccttcatttagcaagtttctttagtacgaaacaggagttcatatctctgctttacgcgtgatttgatctactgttttccagataaacagaagtttcaaagtgaaacgaatattggcatgtgccgattgtttgttctatgagaaacaaagaagttacatctgaaaacataatctaggaagggctttacacgtatcctaagcattatctttttggtttctcttctatattttattgtctgaatatagagtcttttatgcttcgtggtgataaagactaacccaaaactagattgtagttaggaaaaattatggagaagtaggaggatcgaacttgtagtgtttgtctatgaaaagtgatacatcccaagtgcagctaagtcccttggggatggtcacaaggtctcctgcaccaaactctacaaactcagatgacccttttggatacaccttcacctttcccttcaccaaatagcatgtctctctttcttcaaataccaatgcatatttccccggctgacaagaccatctgttttgtcagagagattcatcatgttattaccaataaattgaggaatggaaaaagtgaaaatctatgtagttagtagtaataggagcagagcatgtgcatgtttgatacttacttaggccatgacatgactccaaggtcagataaccttctgctcgaagggttgttttcgattacaatattcattttggaagaggaataaggtgagaattcgacgatgtttcaatgttattagatagaacagaaagaaacagtgagaacaaagataagaagaaagtaggtatatgagatgtatttatatggtgaaggacggagtagttggtctgcatgtgtatgtatttataaaaccaggtatgaataaagtgacttcttcttttttcccttctattgaaagggataataggagagaggaggaatctttaaagaaacactttgacccaggatagatacaaaaccaagtcaacaaatacattcattaagcttattgtgttagatagtccttctagaagtggttcatactacaaattctctggttttctatttttcttgattgcattaatctgattaagaaagtttctcctctagaaggcaaaatgctgagctagtctctcaacaagctttaatgatctatccagatcaagtctccaaccacatggaccccttctgttttgtccccgcgtccactatgctttccttttcacagtgttaacgagtcttctgagctgaaactcagacacaagtctccggacaatgtagccaccatgtgaattctgcagtgatcaagtgggtacactcgagaggattaatataggatctaacttttttcagctgttttatgcactattagtctagatttgtgtagcttgaggatcagttattcagctgttgcgatcgcactattaatctggtatctggatttgtgtagttttgagatcagttacacagtaactaatcgatagttattctgtgaagagtattcatatcttcagtgtatttgttatatggttttggtttttagtttcgaaaatgtttgactgattcttcattagaagatacgtgataattccggacattgatttgtgtagccccctcaagtttggctgcttcctcaactggctctgcttgtttttttttttattctaacatgccatggcatgtgaggattattggttgtttctagtatatatgtatctcctaatatatgcatgcataaattcacatatcctcaaatttgaatgctagtatatttgcaattttctgtctctgtagtatgaacaagtgataaagaatggcagataggttcagaatgaaaaaaaaaaaaaaaaaaaaaaaaactccatgtgaacacccttgtgaatttgagaacagggtcttgctttggtttggtctggtcatatttccacacatcgaaaacctttactctcagatctcgaagaaagtttgtacacaaaagcttggtgttttactgagttcctaattttccacttacatttccaaggaagttgacaattttctacatcggacatgtttgggatcagtggtaaattaaatcctaatgatcttaaaatcaacagcttttgttttgggaataagttaaaatttcagggtaataatctattcatctgtatgatcttataagcttgattttatttatcatttataactagagctacactcttgtttatctaatcaaatacaaatctcaaaggtatggtgtatataggaaatattcgaactcaatcctttatttttaggttcaagcacccaaacattgccgtatcaaaccaatacacatgaaaagccaactaaaaatttggtttgtctaaacataacaaatttgaactttcactaattagatgctttgaaaagtgaagtatagatataaacaactcaaaagtgtaggatatataattccactctaaacacttgcatgaccaaaagtttttaagatctagggtcacgaattttggctgcaaaaggaattgaggattttgacaccaaaacaaaggaattaaggatacttcatagaacaaaaagaaaagatactcactagttacgaatgcacagaaaagtaaatataagtaattattattaattcaggtttacttctggttcggtttaaggtttataaagagtagaagtagatgatctctggcgaggtatcatttggaaaaggaaagaaacgaattcgattcagttttagactaatctagttgggttgattaaccagtgctggatcacaatgcaaaggagcttggaatcgatcttctctccagaattccattgtgttagaatgctccaattctgtttggtttaaccaaaccaaagtcgaattgattcggaaactttgttgaattttaatgagcttttcaaattcattctcatgggtcaagtttgttgatcatttgggcttgtgagatgtttgtggagtcctaacgcaagcagagagcccaaaacaaaaccatgattttccatagtggtacagtgaagtttttattttgggccattctgtttctttgatataattttatatttaaaaagtctattttcttctacagaaaaactttgtgttggttggtttttgtttacggatagacatcatttaattttactgtataactttacgaataaagacactgatatattttcacctttatggtaacgaattttatcaaaaaaaagaagaaaaaaaagtaactaattaaatagccggaaaaggttggtatgatttggagatgatattttacgttttttttttaatgtatttttcaaaaaatcaaaattcataaatcatgatgcagtcggacagggtagcttcatcatgttaatttatgacgtgagttggttgagttggtagatctcttaatttcacttctatctctctctctccaataattttatttatacagaaaattacttagtagtataaaaatcaagacaaatgaaaagtcttcttttgatcattcttgagtaattagtggaatgtattctgaattatccatttatgcatcgtaatttgttaagtcaacattttcaagtctcatgtattaacaaacataaggtgtatatgattaattaacaagtagtataattgctcttttaccaatttcatgaaaacatcaaatggtttgtgtaattttatcctagaaaatatcaagcataacccgcatttcaagaaaacaaattaaaatacattttataattacacaccaaccaaattgaacaacactcctactataaaatacatcaagattttcaaaaagtatggtattgaacacgacccattacattgacatcaatggctctaattgttatatacaccttctttttttttttgaatgcttttctctttctttctggatgctttatttatgtaatattccagctttgaaaattcgtaggtagtacgcgttaatgtgataacgttcaaaggggaggcatagttggacagaaaaagtttatccaaaaatatatatttaaccaattgaacttctcgtaattgaacatttagatggcatgagtttgacattgtataaatcttagtgaagtctagtttaaatttatccatccatcagctgatggaaacatttttagttttcaatattaaatattatgtcatgtaaaacccatgacaaaaaaaggagaggatatgattgatgagccgcctaaattcacgtatgttacgttaactatatagcatatagatatttcacatattaaccaagtagttcgaaatggatgggttatacaatatggtttctttggggaccgtccggtcactgcatctcgatttgtgacattggatataaacacaaaactacacaaaaatggagatgaagaacggtaaagattagtttctttggatcgatatacatatacctaatcacttcaaaatttacacgtagattgcagacattgagatcagtaaccgtcaatcaaaaaaattatgtcacatcgaatttcaatggttgaaagataattccattttaggagaacaagcagtagtacaatttctaacatttattacatccaaacaacaaacaagaccaatttttatggtgtatcagttggcagcctctattaatgtctctattttcttaaaatcacaccaacaacgaaaaaaaaaaaaaaaaaaaaacagatacacattacttattgaaccctaaacctattgtcagtgtatatatataacacacactctccatatgctctcatatcatacgtcaatttataaacgtttcttctcattcgtcatctagtcccattctctgtccataacaatgaatatcaattgttctccattagggtttctaatttcactcttcttcattgttacttttcttgcaccacaagtcaaatctagggctttctttgtctttggtgactctctcgtcgacaatggaaacaacgactacctcgtcaccactgcccgtgccgacaattacccgtatggtatcgactacccgacccgtagacccaccggacgtttctctaacggccttaacattcccgacattatcagtaagcatatttgattcaagcatggttatacgatataatggttcgttaatcaatctttaatgtttgtttaatatgtctctctctctactaggtgaggctataggcatgccgtcgactttgccgtaccttagcccgcatctcaccggagaaaatcttctagtcggtgctaattttgcctccgcaggaattggaatcctcaacgacactggaattcaattcgtaagcatatccaatcaattttaaaattcttgcattaaatacgcattcaagtgttgctgatattaatgcacgacacgacaagacgtgtttaccctctccattaactctcgtgtcgagggtaatattgcctcagaagtaagaaaacgaaaaaaaaaatacacataagatcatcctcaataactgagggtatattcgtcttcttgacatgttactccgcgaaaactcaaaaacacgtgattgacaacattatccttgatttctcaatgaaaaccagtgttaacacgaaggttaatttagtcttctcactaatattttgatgacgtgactttttagttcaaccgctgtcgattcactgcttgtaattttctaaacgcagtcgtttgatagcttagtgtgttaattatgttttttgtttttgcaggtaaacataattagaatttctaaacagatggaatacttcgaacagtaccagctacgagtgagtgcattgatcggaccagaagctacacaacagctagttaaccaagctcttgtcctaattacactcggtggtaatgatttcgtcaacaattattatctaattccgttttcagctcgttctcgccaatacgcgttaccagactacgttgtgtatctcatttccgaatacggaaagattctcagagtaagtttaaaaaattatatattgtcttctttttaacgtatatatactaaatttgtacatatgtcatgtaacaaattgggggcttaccacgaaataaccttaaatcatgcaatcttgtactaatttttgctacaataccatttagtttattaacttgttgcctcactaaaggaaattgcatttaatatgtgaactctcaaataattactttcgttatgtcactacgtacatagttaatgtcatgattctcttgaatagagtgatcataagttcataacgtacgtacaaaaaatgatggggcaaatttaatagctttttctttgttcacttaatgatgtacttagttctcctttgatggtgtatgattacatttgttttcttgtttggtcttcattgaaatagaaactctacgaactgggtgcaagacgagttttggtaactggaactggtgcaatgggatgtgctcccgcggagctggctcagcatagccgcaatggcgagtgctatggcgccctccaaacagcagccgctttgttcaatccgcaattagttgatttgatcgcatcagtcaatgctgaaattggtcaagacgtgtttgtagcagccaatgcctatcaaatgaacatggattatctatctaatcctgaacaatttggtaattacaacccatctctttataactttttttggtaattggttataaatataattgtttaataatagttgaaaaatatcgaaagggttaagtcattgatttcaaaagaaaaaaaataacacttcagtcaaaatttggtccaaaaagtcttaatgataagcataaaaggaccaattttttggagttattatatatagttgtagtgttgtacgaaaacttataaatgagcacgaccactttgtaggaccatcttttcatagatgttatagcatttatacacaatattgttttttcaaacttttccattaaaaacattgtattaatgatataagtaattaataagtatgtgtcggtttctatacattatcagtattatttcattgtttcaacaagaagaactgtctggtctttaaatagttcaatttgaatggggtaattttttttcatgattgatctctctcgaaaatgttcataacagattatagctatatagctaataattgaaagcatatgcttggattgtggatataatatattcgacaagtgttaaaattttaaatattgataattttgtgtggtgtatttgtagggtttgtgacatcgaaggtggcatgttgtggacaaggaccgtacaatggcataggactatgcacaccagtctcgaatttgtgtccgaatagagacttatatgcgttttgggatgcgtttcatccgacagagaaagccaataggatcatcgttaatcagatcctgactggttcctccaagtatatgcaccctatgaatcttagcacggccatgctattggattcttctaaaatctagtttaagtgatttctgtcaactaaatgtcaggtcattccttctgtactttgcattgttgttaatgtgttgattaataagttcaatggctacaattagtttaagcatgcaagagagtttttattgtcggtcgtctagtttgatgtctttgcttgttgtatcttgttattttttttattttataaaagaaccgttgtatcttggttagcttagtttagtcttttttggtttgtatgccaattatatcatgtaatatttgaaaacttgtagtgattgatatatgattttcttttctattcgagatgattgatacaactctatatggttaatatgaactacgagcgttaaacttgaataaaaacaaatctatctaattcaacccgaacccgtataagaagaaaacaagattcgataacaagaaagaaaaaagatttgttgattaaagtaaactttgttttcttttatatacgtatatagaattatgaaaaataatataaacctttttttgtctggaaattgaggatctactcgattgaaaccaaaattgagataaacctaatccacattaattgattcagtttaatcaaaaccaaccaaaatgcatgcatggtaactgaaaactcatggctataaacgatagtacttcactaacaaaaagcataacatacatacacaaagggtttcatctcaattaatacagtaatcatttaaagggtatatatgacttatgagccaataattattgttttccgtcaaccatgagccattaattatttgctctaaatgtactgtattctgtatttaggttcagaagagtaataaaccctcgcagctcttaagaaaattgattactaaaataattatcgatattatgatgatatggcgaaatcacgtgcgaaaaatgaatatatgtgagaaaatttaagagtggcagcagatgacttaactctccagttaaaacgcaaccgattttttttttttccctttaatttgaaaaaaaagaaaagaagaagaagtctattttaaaatatgaggagtcacagtttaactcttatttatttctttgccggactatattatatacacgaagaattaatactgttgcatgttattgtaatgatatgtgtctctgtacttttcggaaaaatccttgtcgctatacattactgtggcaacggatcattaacatgtgaaggatgggaagagtacagaagaaagtttgttgaggtattccgcagacattgaaatgtgaataataataaaggaattgagttctagttggtgaagtgggtgaaacttgtatgtacattgtatttaaaatttaatagagagacatagagaagtttaatattctttcactattaaaaatatagtatatatattctttcacaattgacattttttttttttttttttttcacaattgatggacccttattaatttatcatagcgtcaaaccataagccaattttaaattgtgacattcctcgtttatgaaaacacgaaacgaccttattattgataatttgaggtattgagcctttaatctatattcttgaagtttttggaaaaaagaaaagaaaagaaaaaactattttttgaagttttacctgtggataaatctctaaaatcaaagacatgtcagacaaggtaactaccaaaatttcatcactaaattaatgtaagacatttctttgttcccaaaaaaagaaaaaaagtaagacatttcagatattaatgggccagtgggtgtacttttagatttttttataaattaggcctcattcgtattgggcccaatgggctactaaaacagtttcacgattgtttttttttttttttttttttaatttttaatatgtatgtgggatatttggctataaattatgtaaaaaatttcacgatagattgttgaatttttgaatttcgagttaaaatatcttcaaattacctcacatttacaaaaaggtagaactgttgaaaaactaatgctctataaaacactagacaataacaaaatacgtaatgcgtaaagaacctaaattatgattttatttatctttcttcctttttccgtgagtataagccatttttcatagtaaagcattacgaatacgacattgaacactactgacatataaagtagtagattttgatgggttaacttgtatgcttaatttgcttaagcatgaacttcaatgcttttataaaagtacttcatgagaatattcctcgttctatactagcagatgggttcgatagtgattttacaaccgttcaacaaaacctttaaacccaaaaaaccaaagaatgaaagtatctaaacttgattatacatttcttgtctaaattatcaaataacatactctcttttgtttacttataaacgatatgaaagaaataaataaaaagaacatagaatcttattatgatctagaagaattaattaaagaaatatatatatattttttttcatttctactcatgtttcttatacattctttaaatttgttcaccattttgatttacttgttctcatattagtttgttatacaactcacttagaataatgtagattacatttcagccaaattcatgtaaaagatgcttttctttgtgatgtttttaaaatgctttcttttcactttttttctttcttaactataaatcttgatgcaatgcctaccttcttagaacataagatcttctttaaaatccaaaatcgtaggccactatttcattatacttatgtaatatatgtgatacagatacatctatatacaaattaaacacgaaaccatacatgcacggtgtgatcacacacgcacacacatagaaacataaacacgcaataatttctatacagtttaatttcatttttaacttacttctttttttttggtgaagattcttgagagaaaagaaatcgaagatggcaacaaaatccaccggaggtaccgagaaaaccaagtcgatagaagtgaagaagaaactaatcaacgtgttgatcgtcgatgatgatccattaaaccgtagactccacgagatgatcatcaaaacgatcggaggaatttctcagactgcaaagaatggcgaggaggcagtgatcctccaccgtgacggcgaagcatctttcgaccttattctaatggataaggaaatgcctgagagggatggagtttcggtacttaatgatcttgaatcttaatctgcttaccaaatagacaatttaagtgggtcgatcatcactatacttaaaaacctcctctttaatatagtttttatgttctttgttgatttaatttagacaactaagaagctaagagaaatgaaagtgacgtcaatgatcgttggggtaacgtcagtagctgaccaagaagaagagcgtaaggcttttatggaagctgggctcaaccattgcttggaaaaacccttaaccaaggccaagatcttcccgctcattagccacctcttcgatgcttgatggatgaaggctcattaatgtatctatattttcaatcatgaaatcacctacacgtgtatttgacacaaaaatctgcatttgttgtgatatagggtttctcatatctatgtttgatttattttcttatcgtccgaggtaaaatcatgcaagtcatttcttttggctaataaaatattaaaataaggttttctcttgttgaatgagctaatttacttcatatggctcatgcaaatctccatatcagttaactttaaaaaaattatacatagtttcgcgataaattctaaattttaaataactatcacatttactaaaaataaaataatgtatgtatgtaaatatgtaatgtaactggctaatttaattgaataattataatacttacaaaaataatatatatcgcgaatctgactatatttatgttttgtttatcttattcaaaaagatgaaaatataaacactttactagctatatctattttcttttctctatttttcaaaaacataatttacataatatttcatattatttcaattccagtttacgttccatatttttaatgtatatatattttattcttgttcttcgcatatatacgtcatattattttgtccaatactatatgtcattaagaagatagggtactactactgggtacatcatatcttactttggatttgataaggtttgtgtaaataagagtaaattctattttcaacggcgtgtatcatcttagccaaatttgattaagcattgtgtgctatacactcagaaagtacctatactaatgttgcactataaataataattattacaaatttttaatcaagaaactagctatgggtctaaagatcagaacataaaatgtaatttttttttcttctaattttgactttataacacaatttttttggacatctttttatttatttatttagaaacgttaaatttttatttgatatctgttttgaattaaatcagaaaaagaacatcaaacaaaaatttaacgtttctgaatttctttggttgtgaccacatttcttgcagccgtataactcgtgactctaaatcttaaaagctttggttgtgtaagtgtttgaagtggagttatattctacactttaattttgagttgttttgtttgaactctatatctgtacttcacttttcaaagcatctactatgtctctctggaaagttcaaatttgttatatataggcaaaccaattcttcacttggcttttcaggtgtattggtttgattcggaaatgcttgggaggttgaaccgaagaacaaaggattgatgagttcgaatattttctatatataccatagctttttgagattatgatttgtttagataaacaagatcgtgttgtgttatttgtctctgcttctttatttaacatacgtatggcatcgtaacatcttcatatgtttgtaaatacaattattttcacttttgttttgatattactttcgaaaatatatgaaagtgttatctataaactatatcaggaatcagtggttcaacaattaatgatatccaagaaaaacgctgtgtattataatgtggattacgaaagttctgacaaaatttgtgtgaaattttgtatgtccgctttttctgttttctttcttatgcattttcgatcattttatctgaaatgtgttacaattaaactaaatattcctctactacataactcaagctcacattttttttttttgttacttcggcgcaaagtcttcaaacactaattaacaagatttcccgtgtggatgcttagcatttttctccaccctaactaagatggaaaaattactcataccagtaaacgaaactattcgtaaaaactgatttcctttttgtaagtgtagaacaaataatttttttcaccgacaacttccatttttttactatctctaaaattttcaacacgtattccaagtatttccttttattttgagtaatactcttgtttccaaaaataagagttaacatgattagcttatatacttgatcttttgggttcttgttgtgattatatgaatgatgaagacaaagaagaaagaatcgagaggagaaattgggaagaacatgtcgttgatatataagaagaaactaacggtgttggtcgttgacgatgatccatcttgtcgtacactccacatgggaatcattcaaatggctggaggattcccttacatggtgaaaaacggcgagaaataagaagctacgtgacatgaatgtgacgtcaatgatcgtggggatgacgtcacatgaggacgagactagggcattcatggaagctggagttgaccactgcttgtcaaagcccttaacctttggaaagatcgcatccatcattgaccatctcaaaaccgcataatctaccgattaacaaaatattacttggtttagttcggttatgtgactactgatataaatcttgttcaatgcaatttggtctagttcggttctgtctggttcaatccaattaactcacgtgatctgcacatgatcatcgtctacattttaattaaataaaaatctaaatttcaaatcactttatccattccccagtaaaaaaaaagtttcagactttggcaaaaaaaaaatgtcactcttgttcctcaatcctccgtttccctccaattcaatccacccaattcctcgtcgtgccgccggaatatcctccattcgatgctcaatttctgcaccggagaagaaaccgaggaggaggaggaagcagaagcgcggcgacggagctgagaatgacgactctttgtctttcggaagtggtgaagctgtctccgctctggagaggagtctccgcctcacttttatggacgagcttatggaacgagctagaaatcgagatacttcaggtgtttctgaggttatctatgacatgattgctgctgggcttagccctggacctcgttctttccatggtttggttgtagctcacgcgcttaacggcgacgaacaaggcgcggtatatgcttctctctatagcttaaattaaagacgtagactttatgtttttaagaaatcatacaatgctggagcttaaactaaatcgaatttgaattgttgtgctttatagaacttgagttatggtttaagactttacaaattttttgtatcaaaattagaactttactctttctcatagcttattgagtgtgtttgaactgaaagattgcttcttttttttttgcttggtgtgtgtttgtgtgtgattgcagatgcactcgctgagaaaggagctaggtgcaggccaacgtccgcttcctgagactatgattgctttggttcgtctctctggttcgaaagggaatgctacgagaggcctagaaatcctcgccgctatggaaaagcttaagtatgacattcgtcaagcttggctcattcttgttggtattctctcttactactaagactatgtgttagaatcaaatggttgttgcttgtgtctaccaggattgaggttactgagtaatcgtttataatttgattgtggtcttttatagaggagctcatgaggatcaatcacttggaagatgcgaataaagttttcttgaagggtgcaagaggtgggatgagagcaacagatcagctttatgatttgatgattgaagaagattgcaaagctggagatcattctaatgccttagacatctcttacgaaatggaggcagctggtagaatggccacaacatttcatttcaactgtcttcttagtgtgcaggtttgttatgtttttttttagaacgtatacacacacttcttctttgtataatgaagatggtaagtctttttgttgacatcaactacatttttctttgcttccgttgtgtaggctacatgtgggattcccgaggtagcttatgctacattcgaaaatatggagtacggtgaaggttgtatgtttttcttagctaatttccgcttcaattgtttggtttagttgttgcctgatggcttttgacatggcttgatgtaatcttgatttggtagtatttatgaagcctgacactgagacatataactgggtgattcaagcctacactagagccgagtcatatgataggtaattcttatgagtttttgattgcacacatttctcttagaagtggacaaattttcaggtagcctgttgcatgaatcacagggttcaggatgttgctgaattacttggaatgatggttgaggaccacaaacgtgtgcagccaaatgtgaagacttatgcgtaagagaatcattatttctgtattgtactcatttctaccaactttgcatttctacctgttctattgtaaaaatcctaatatgatctgtatgatgatccatttcaggctcttagttgagtgcttcaccaaatattgtgtcgtgaaggaagcgattagacattttcgtgctcttaaaaactttgaaggaggaacagtaattttacacaatgcagggaattttgaggatcctctctctttgtatctcagggctttgtgtcgagaaggtatgcatacacttgtacctgtgtcaatataatatgcagaggcatatgttgaacaccttctgggagatcatgagaacttatgattaaaacgatttatgattatggttctctatttcccttatttctgtttttatacttaagcgttatatttgttgatttttaggacatgctaaatttactgtctttaaacggtaccctctacctttgaaccaggaagaattgttgagcttattgatgctttagatgcaatgcgcaaagataaccaacctatacctccaagagccatgattatgagcagaaagtatcgaacactagtcagctcatggattgaaccattgcaagaagaagctgaacttggctatgagattgattatttagcgaggtaaaaacttgagttctgcgtggtttgactggaattttgttgatcagattctatcctcccatttacaagttatacgctaatgctctgttctaattgtcagaaaggaagtatagtgtctttttttacatgttgtcttgatatactaagattcgcattctgtaaacattttcaggtacatagaggaagggggacttactggtgaacgcaagcgttgggtacctcgaagagggaaaactcctttagatcccgatgcttctggttttatatactcaaaccctattgaaacatcctttaaacagagatgccttgaagattggaaagttcaccataggaagctcttgagaaccttacagagtgaaggtcttccagttctaggagatgcatcagaatctgattacatgagagtggtggagagattacggaacataataaaaggtcctgcactgaatcttttgaagccgaaagcagcaagcaagatggttgtatcagagttaaaggaagaactcgaagctcagggtttgccaattgatggaacaagaaatgtgctttaccagcgtgtccaaaaagcaaggagaataaacaaatctcgaggtcgacctctttgggttcctccaattgaagaagaagaggaggaggtaaatttatgcttatgctctttctttcattcgggtaaacatgcatctttagtacttgttacatctaaaaaagtttgtttttgatataggtcgatgaagaagtagacgatttaatatgtcgaatcaagctacatgaaggagacacagagttctggaaacgtcggtttcttggagaaggcttgattgaaacttcagttgaatccaaggaaacgactgaatcagtggttacaggtgaatcggagaaagcgattgaagatatttcaaaagaagctgacaatgaggaggatgatgatgaggaggaacaagaaggagatgaggatgatgatgaaaatgaagaggaagaagtggttgttccagaaactgagaatcgagcagaaggagaagatttagtgaagaataaggcagctgacgcgaagaagcatcttcaaatgattggagtccaactcttgaaagaatccgatgaagcaaacagaacaaagaaacgtgggaagagggcatctcgtatgacacttgaggttagtacgtataacacactatgatatggttatgatttaagtagacacatgattatgaatttgatagtttaagcatgttttcacaatgccgattacctccatatcaggatgatgcagatgaggattggttccctgaggaaccatttgaagcattcaaagaaatgagggaaagaaaagtgttcgatgtggctgacatgtatacaatagcagacgtttggggttggacatgggagaaggattttaagaacaaaactccaaggaaatggtcacaagagtgggaagtcgagttggcaattgtgctcatgacaaaggcaggagttccttcaagcctctaaagcattattacacaaattgttttatgatccttcatgttaataataatgataaatttgtgtaggtgattgaattgggtggaattccaacgattggtgattgtgcagtgatattacgagctgctttaagagctcccatgccttcagccttcttgaagatcttgcagacgacacacagtcttggctactcatttggcaggtaactcagttacaacctctctttgggtttagtctgttagagaagctagtctaaggcgttcgatatgactaaacttgactataaacaatgacatttgaatacacgtggtaaaaatctgttgcagcccgttgtacgatgagatcatcacattgtgtttggaccttggagaacttgatgcagccatcgccatagttgcagatatggaaaccacagggatcactgtccctgatcaaacccttgacaaggtcatatctgctagacaatctaatgagagtccgcggtctgagcctgaagagccagcatcaacagtaagctcttagttatcatatcctcttctgcttgttgtgaagtctctataagaaacagaaatcggtagaaggagctgaatctgtcttagttatgaaagttttgttcattataagtacaagtcatgtagttccgagtgtagaacagtttttactagtgttgcaccaggtccctccagtctgatacttaattctttagtgttggatctttctatataagaaacgcaaatagcaagacgcagctgaattggtcttactaacaaacgttttgttcacgaaaaagataggaagaaacaaatgaacgatagtaacaaaagttagaaaatcctcatcatattgcataagataggaagaaacaaaataaggatagtaatcttattcaatgagaaaaagagtgagtaaacgaaggaggctaaattaggctttaaaattcgtttgcttcttcagaccctcgaggactcgttttttccatttattatcctcctgcttggttcgctttataaaggcggcaactctcaacatgttttggtcatatcgacgctgttctagaatgggttttcgtttccttttgcctcccggaggttgtttgatttgcattgaatttggaacgtaagggcacaaatgtggcctacactttatgccggctacatgtactcggagatccaattctctaaaatatccagtttttccaatgatgttgactctgtggtgatcaaaaaccatggagactttcttctcctcgtcaatgaagaaactcccatgtatatatgcaatcggcatgtcagccaatggtcctgtatccatttccaagatcttgctccacgacactttatcatactcgatcttagtcgtgatccatatctcaaactcatatggattccagtcgttgtgcgtaagtaaagccgcaagcttctcttctctaacacaagataaagtcacatagtcatcatggccagcgctaaacggtagacgcaaaagtggcccaaatctctcacttgtgaaatcaaaacagattatgtgatcgtcgattttgtttattgcgttactttttgtagcacaaaagtaggtatttcccttgagagaaacaccacgctgataacacgatactatccaatatggagggacatcaagagttgtccataaatcggtttcaatatcgtagatttcataccatgaaaaccggttttcgggtgcgtggttcacggccgaagagatgtaatgatctataaacctcaagactttgtggctacgacaagagttgttcttgttcacgtaccctagagcgtacctgtacatgtccatatcctgttctacgcggtgctgcttctttactaatgtgcagcttcataaagctctgactttgggataaagcgtacaacgttttgcaagttaatttcaatgtcctcatatacttcatgggaagtctagatacaatatcctctatcaaatcccttggaagatttaagatcatcgttgtcgttttctcaagttgcaacaaggtttttttttttttaaccttaaaaaagtgttcttcttttcctctgatttttttcccgcagaagactatacataggaatttgaagttgggcccaatcgtgggcttcagaatcttctcttgttttctttttggtaatcacattcataacatccaagttctttaccaacaatgaccatttgtatggggagagcatcaagtttgtatgaagctgggctaactatgggcttattggaatttaaaacagtatcttaaattccatctttaattgaaacatttgataagtggaagctgccaaaacacgcgtccatctttaattaaaatcaaatgtgaattgttttcatttttgtgacatttaatatttacttctagaaaaagaagatcaagtaaacatgcagttaagttcaaataagattagaattgtgatacccttgaattcgatttagtatgcaatttttttgtatttaaagaaaatatattggagtagacaaagagaggaagatattgtaaattttttgttattttcttttctcaatatatttaaggtaattaatcaggattacgttttattgttggcacatttaatgcctttgcggcactatttgggaaagattaaagattgtttttgggtggattgtaaattacaacctttgagaagaaaacactgttgcgtcttagacacgtgttaactaaagacaaaagaatttggttttgtccagatttttgttgactctttgaccccgatacgtaaaatcaacggcgttgaaatttacacgtgtcaaatattaagtctaattatatgtgtgaaatcttgattggtcggaaagaggaaattgaaaaaaaggcaaataaaagctaaagaggaaagacgaagctacagcttctgaggtcggaaaaaacgaattttgataatttagggttttgcccttttcttctctcttgcgttatcatcggtgttttgattctccggccaagtcccggagacttgtgatctgggggaatttggtgttcaatttcattaagacgcgatgatctcgtccaaaaacggagctgccatgatctcccgacctgtctttctttccgatcgagttgatgaagtcttctctagaaagcttgatttgtctgtctcttcttcgtcttcttcgagcctcctccagcagttcaataagactcatgaaggttctgatttgtcacgagcttaaatttttgttttttttcgatgtcccttctttgtgtaatcgcatcttcacagctgatccttgtggaagttagtttccatctgttttactaagaacactaggttgtgcgatctaattttccttttctaggtataattgttatgttacaattcaaagatcattagatttggtgaaatcaaacttgctactaactgctacttgacttttgggaattctacttttgggcgagcaaagtttttagctttgttatttggtttgttcgttttaggataaaaaagctaacttcttttgggagaatgtgactggtaatgattgtgctgatgtttactgtaagcgtttcgtgcaggtgatgatgacgcacgcctggctcttgctcatcagctatacaaaggaggcgatttcaaacaagccctggagcacagcaacatggtttaccagagaaacccattacgcactgataatcttcttctaattggtgctatttattaccaggtactatttttctccttatctcattagtcattactctatcctcttgttttcggttaattagttgtttacttgtatggtatataccgtgcagcttcaagagtatgatatgtgcatagctcgaaatgaagaagctcttcgtattcaacctcagtttgctgagtgttatggaaacatggcaaacgcgtggaaggtgaatggcttggtctttgtctgatcaggtggttttattgccaatacatatattcttatatctgtaatctgctatttccaggaaaaaggggacactgatcgtgcaatccgctactatttaattgcaattgaggttgtgctatatccaatttatgcttctcgatatctgctattcacttctcatcctatactgatgcttttacctttcttcatttccccttgcttacactttcttttcaatataattcttcagctgaggcccaattttgctgatgcttggtcgaacttggcaagtgcatacatgcgaaagggaagactcagtgaggcaacacaatgctgtcagcaggccctctcattgaatccacttctggtaattgactttatgatccttctttttaagttttctgtctcactactgctgggagattcactgtctatcttcttttgttagtcttctcacctggtaatgtaaactgttcttaggttgacgcacatagtaatctggggaatctgatgaaggctcaaggattgattcatgaagtaagtctttcgaattagtctatttaagttattctgttactgttccaacccgattatctgcaattttcttgtgtcctagttatggatgcggcccctaattctacaattgattgatcaaagttttgtcattgcagaagaacttttaattgaaccaaaatatattataattaaatggacggtgacgtgatgcactaggaatatagcatcacatctgtagtcattttactggtttatcaactgcaattactaatagatgcattcatttttctgtgttgtactgtgtcataatccacaatcaatacagacatcaagttgttactgaaaggcaagcagggatgatcgtcagtcttatagtcagtgtctactgccagagtccaaatagttagaatgtaatattttgtgcaggcatacagttgttaccttgaagctgttcgtatacaaccaacatttgctattgcatggtcgaatcttgctggtcttttcatggagtcaggtgatctcaacagagcccttcaatactacaaggtatgcttcattctctcctagaaagatcctgttgacattgtgttatgtgtgcgtttgtcccccagattaaattctttatgttttaactatgttggctgattttcttaatttaccaggaagctgtgaagttgaaacctgcattccctgatgcatatttaaatttaggaaacgtgtataaggtatgtctacgtatagtgtgttaagatatgttcagtgcaataatgttttctggacaatagtagtaacaaaattttatatttctatgtcttaaggccctcgggagacctactgaagcgatcatgtgttatcagcatgccttacagatgcggccaaattctgcaatggcatttggtgagtgtaatttgatcaactaaatgctcagctgaaataaaatatacttgccaagtaaatgcgtgacgtctttcataattgacatataactactaaatgcagggaatatagccagtatatactatgagcaaggtcaactagatttagcaattcgacactacaagcaggctctctcccgggatccacgatttttggaggcttacaataacttggttagcatcaacaacacacattttgtgggttttgtgtctgaactataattctcagtatctaacatatgatattttttgcatttggaacttgaagggtaatgcattgaaggatattgggcgagttgatgaagcagttcggtgttataatgtatgtgtgttttccatctgagacttactagtgaatttgcgtattactcacaaacctgtggttatactgcagcaatgtcttgctttacaaccaaatcatccacaagccatggctaatcttggaaacatttatatggagtggtatgtgatcctttctttctttttgctagatagaaaagactaaatgaccataaaatccatttcacaacttgaaacaggaatatgatgggtcctgcttcctcattattcaaggctactctggctgtaactacagggctatctgctccgttcaataaccttgctataatttacaagcaacaggtagctacgtgctccattatcaatttttaatcatttttgtagtcttgctcatgtttgacaaatttagcttgttttcttctcctttactacagggaaattactcggatgctatatcctgctataatgaggttcttcgtattgacccattggcagctgacgctctggttaatagagggaatacttacaaagagatcgggagggtaactgaagcaattcaggattacatgcatgctataaacttccggcctacaatggctgaagctcacgcaaacctggcctcagcttacaaggataggtaaccattgtctttatctttcatttattaggtataccagacacatgttcaaataccgcttagctaagaacagagccaaaacatctttaccttgaacgaaaagatctgactcgagaagaattttgtgtatttcatggttcttgaatagcttatggtgtcatatatcttaaaattacttacaattttcctacttcactagaagcctttatatctctacgtacagttcttaaggtggtttcgtgttaggctcttgttttctgggatttagaacatttaagatgtggcagtataacaatgagttaatgaccaccttttaactgaggagttagtatgtttgaccagaaaaatatttgttctactattaatgtatttgttgcaccttcttgcataagcagtgggcatgtagaagctgccattacgagctataagcaggccttgcttctacgaccagacttcccagaagcaacgtgcaaccttctacacaccttacaggtatttatttttcctggtttgatgtcacacgtctgttatgatagcttctttcttctctacttgttaattctcccttcgtctccattttttctttcctgctgctgaaccagtgtgtatgctgttgggaggaccgtagcaaaatgttcgctgaagttgaaagcattattaggaggcaaataaatgtaagtatttacgccacacaaaatttgtggtacttatatactattacagattaaggtgatagcatatcctattgatcctatcttcagatgtcggtccttccaagtgtccagcccttccatgcaatagcatatcctattgaccctattcttgcccttgaaatcaggtttgaggctgattttttaatactcaatactcatgaaaatacatgtttatattatctttatgtatatgcctatttcttataaatcccctattttttcagtcgtaaatacgctgcacactgctccataatcgcttctcgttttggactacctccttttacccatccagctgggctccctgtaaaacgtgagggaggatttaagagattaaggattggatacgtgagcagtgattttggtaaccatccgttgtcacacctcatgggatcagtgtttgggatgcacaacagagaaaacgttgaggtttgtatcctgcacttggatacttgttgatccatttcttaggtctgctctgattttatatcgagagtttgagttcttcaacccagtgttttctagtgaggctataaaattcgtacatgctgggtttagttcttatgatggtaggaatgtatggaaccgtacgggtcctgtgtgtggaatatagaactttagtaattgatggtatatcattctgtatctgcctatcctgtttttggcttttcagcaaagtaaatcacattttttcccaggttttctgctatgctctgagtgcaaatgataatactgagtggagacagcgaatccagtcagaagccgagcatttcctggacgtttctgctatgtcatctgatgctatcgccaaaattataaaccaagacaaaatccagatcctcatcaatctaaacggttataccaaggcatgcatgctctgaacatttcagaaactttttactctggagctgtacccattcctatggaaatgtttttgctaacattgtttggtttaacctatgcagggggctagaaatgaaatatttgccatgcagcctgctccgatccaggtttcatatatgggcttcccgggtaccactggagcaacctatattgactatctagtgactgatgaggtttgcaattgaattatagttttctagatatcttcagaacattttttttttccaaccttattttttctctatgtcatgactggttactctcttttacttttcagttcgtgtctcctctgcaatatgcacatatttactcagagaagctggtccaccttccccattgctactttgtcaatgattacaagcaggtatgctccgagaaagttttctttaccatgttattgtacattcatcaggtccacagttatttttataaaactcatcgtataaatgctgtttgcagaaaaatcaggatgtgttggatccaaattcgaagcccaagcgatcagactatggacttcctgaagacaaattcatatttgcatgcttcaaccaactgtacaaaatggatcctgagatcgttaatacttggtaaacgtttttccttagctttgcaagtttgtttggaaatttacgtatgacaccttacaccatcatgataccataaataacactctgtatagatgtaaatttatacatgcacaaactgatttgtttttatttttttataggtgcaacattcttaaacgagtacccaacagtgctctttggcttctccgttttccagcagccggagagatgaggtttcgcacatgtacgtttggttccattcaatcgcctagcatttccttgttctttctgctttctctatcgtttataaccttatttttttgaccttatatccagatgctgctgcccaaggtgtacagcctgatcaaattatcttcactgatgttgccatgaagagtgaacatatcaggcgaagtgtccttgccgatgtaatcctcgacacgtgagttcttttgcctctcaactcgatttatctctacttcaagatatatttaaaaaacaacacaaaaactcaattctgccacaagtttaccttcccctaccctgtcctgtgtcattaggcccctgtgcaatggacacacaacaggaacagatgtactgtgggctggtgtaccaatgataacgttaccacttgagaaaatggcaactcgagtggctggatcactctgccttgcaactggtctgggccatgggatgattgttaacaggtacgtctcagcaaaaaccaactggtacatgtgttcagtatcctctgttttcatgtatgttgatgagatatctctataacaattgtgaaccagcttggaggagtacgaagagaaggctgtctctttggcactgaacaagccaaaacttcaggcactgactaaggaattgagggctagccgcttaacctgtcctctattcgacaccatgcgttgggttagtcttccgcactttctgactctatatctctcttctgcgttttatttcctaaccaatgagttctcttggtttacaggtgaagaatctggagaggtcatacttcaaaatgtggaacctccattgctctgggcagcagccacaacacttcaaggtgttggaaaacgacctagaattcccacatgacagataaacaaggagggaaagacaactgaaacacatgaggacccggcattgtaaataaaaaaccgaagagaattagtagcagaaatattgataaattatcagagctagagaagattattattgtttgagctgtgtactatatatataaaacaaagctggctgtgttatctctgttttccattaccggagcatgtgcaatatcccaatgtaacattacatgaaaacatatatatatatatatatattgatcatttgaaccaaaacggatcgtttagctcccaatttctttataaagcttcttatcaattcctatcgattgttaaccagatgcaaacaacgaaagtgtttttccatctaatcgaaattgacgaaacccgttggttaaccagaaatctagccggttaatctaagctatgtagtaataaatcatcatgtaacaggccatagttaccctaattttatgggccttcaaattcagccgatcatcatgttgaccaataaaagcttaacggattagagttttttgctcttctcatgtaatcaaatccctgcagaaaaagcacaaaaatcataaaaccctagcaatggcgacccaaccggcgaaagagtctgttcaatgtttcggaaggaagaagacggcaacagcagtcacctactgcaaacggggctcgggcatgattaagctcaacggttcgccgatcgagctttatcagccagagatcctccgattcaagatcttcgagccagtccttctcctcgggaaacaccgtttcgccggagttgacatgaggatccgtgccacgggcggtggtaacacatctcgggtctacgcaatccgtcagagtatcgctaaggccctcgttgcttactaccagaagtacgttgatgagcagtcgaagaaggagatcaaggacatcttgatgaggtacgataggactcttcttgttgcggatccgagaaggtgcgagtcgaagaagtttggtggtcctggtgctcgtgctcgtttccagaagagttaccgttagattctggtttgattttttgtttctgtatcaacgttttgggattatgatgttgaaattgtgagacttggtttctcttttgcgttttattttcaatggttattggataatgtttctactatcgaaaagttctcacaagctgtgtttagtgtttacgtagaatgctattgattcttcgttcttcttctccctctcactttgcaatttcagcctcctctaaatcgttgcaaaggaaacgttgaacataaactgaggttaatgcgtttactctctaatatgctggttgctgaatcagttagttagttgaggattcaattttagtttcagcttctagaatcttcaaatgaccgaactaccctgtgatactaactctctacaacttcataatcatcacaaacatctctgaggtgagcagagagattgagatggtatgttatgatttccttgacatggtttctcgcgtttataatgtgtgcttagctgttgatatgtctaagctcagccacttaagagtctcctactaaaagtggatttcagctgcttctctcagctacaaaacattcgcactataaacaaaaaagtcatctacgtcaaagatttgaaagttttacattaagatttaatagaattgatctgtatccaactcccactaacataatgtctaggtgtggttaggtggaaatgaaatgttgaaaactattaacattatataatcaaaaagagcaaagctggtggatgtgaagtgggaacaggaatcattatcatttccacataagacagcggaggagtcacaatggttcataaagtttccatgaaacgataactaggaagcttcctctgttttcaccattctcagtcaatggagtcaatgctgtgtggtcaacaaaagtacaaagcctcttaatctgtaattccttgctccacatatagcgctctgttattaatcatggattcttgaatcctctctccaccatatactaataatggattcttcttttttactcgaaactgttgctgctgcaacaggcttcttcacacttttgggtacaatactttttatggtttacagaaaattcaaagaccatcgagaaaacaaagaaaatgattcttcttcttcaacacaaccgtctccttcaccacctctgtcgtctttatctctcacgcgaaaatacgatgtctttccaagcttccgcggggaagatgtccgcaaagacttcctcagtcacattcagaaggagtttcaaagacaaggaatcacaccatttgttgataacaatatcaagagaggagaatctatcggtccagaactcattcgggcgattagagggtccaagatcgcaatcatcttgctctccaagaactacgcttcttcaagctggtgcttagacgaattggtggagatcataaagtgcaaggaagaaatgggtcaaacagtgatagtcattttctacaaagtggatccatctcttgtaaagaagctgaccggtgatttcgggaaggtattcagaaacacttgtaagggtaaagaaagagaaaacattgaaagatggagagaagctttcaaaaaagtagcaacaatagctggttacgattcaagaaaatggttagttcttttgatctttaattgaccactcttaatcgtttgcgttatagatataggtaaatcttttaaaccagaatagtactaataatgttttcttgatatgcatgcaaaatcttatgatgtgtatgtaacatgttgtgtgttgcacctccctttaattttacacagggataacgaatcgggcatgatcgaaaaaatagtcagtgatatttcggaaatgctgaatcattcgacgccgtcacgtgattttgacgatttgattgggatgggagatcacatggaaaagatgaaaccattgttagacatagactcagatgaaatgaagacgataggaatatggggtcctcctggggttggcaaaaccaccattgctagatctttatataatcaacactcggacaaatttcaactgagtgtctttatggagagtatcaaaaccgcgtacacaataccagcgtgttccgatgactactatgaaaagttgcaactacaacaacggtttctgtctcaaataaccaaccaggaaaatgtccagatcccacatttaggagttgcacaagaaaggttgaacgacaagaaagttcttgttgttattgatgatgtgaatcagtcagtacaagtagatgccttggcgaaagaaaatgattggctaggtcctgggagtcggattatcatcacaacccaagaccgaggaattttgagggcgcatgggatcgaacatatttacgaggtggattatcccaactatgaagaggcccttcaaatcttttgcatgcatgcttttggtcaaaagtccccatatgatggttttgaggagcttgctcaacaagttacaacactttcgggtagacttcctttgggacttaaggttatgggatcctatttccggggaatgaccaagcaggagtggacaatggcactaccaagggtaaggactcaccttgacggaaaaattgagagcattctaaaactcagttacgatgccttatgtgatgtagataaaagtttgttccttcatctagcttgctctttccacaatgatgataccgagttagtagaacagcagcttggaaagaagttctcggatttgaggcaagggcttcacgtcttagctgagaaatcgcttatacatatggatttaagactgatacgtatgcatgttctgctggcacaacttggtagagaaattgttcgtaaacaatccattcatgagcctggacaacgtcaatttttggttgatgcaacagatattcgtgaagtactcactgatgatacagtaagttttgacatatattttttcttcctttattgttcttatcatttgacaactaaactatataatttcttcagggcagtagaagtgtaataggcatagatttcgacttcaatacgatggagaaagaattagatataagtgagaaagccttccgaggaatgtctaatcttcagttcataagaatttatggtgacctttttagccgtcacggagtatactattttggcggtcgcggtcaccgcgtgtctctggattatgatagtaaattgcacttcccgcgaggtctggactatttacctggaaaacttaggttattacattggcaacaatttccgatgacaagtttgccctctgagtttcatgcggagttccttgttaaactatgcatgccctacagcaagcttgagaagttgtgggaaggaattcaagtaactgtttgttctctttatttacttctctccaactttcatttttttttctttttcgaatggattatttgatgtatacgaacggctttgaaacgctttcacacttctaaacttctagttgtggtttttgtactgcagccgcttagaaatctcgagtggctggatttgacttgttccagaaatctgaaggagcttcctgatctttcaacagccactaatctccaaagactgtccattgagcgttgctcaagtttggtgaagctcccttcctctattggggaagccactaatctcaagaaaataaacttgagagagtgcttatctctggtggaattaccctcctcatttgggaatcttactaatctccaagaattggatcttagagaatgctcaagtctagtggagctcccaacctcgtttgggaatcttgctaatgttgaaagcctggaattttatgaatgctcaagtttggtgaagctcccatcaacttttgggaatcttactaatctcagagtgttgggtcttagagaatgctcaagtatggtggagctcccatcctcgtttgggaatcttactaatctccaagtattgaatcttagaaaatgctcaactctggtggaactcccctcctcatttgtgaatcttactaatctcgaaaatttggatcttagagattgctcaagtctactcccctcctcgtttgggaatgtcacttatctcaagagattgaagttttataaatgctaaagtctggtggagctcccctttttctaatatatatatatatatatccgttggtatagttctctgggattctagttcttcgcatgcggtcttaataatttgttcaacctcttctcatggtatgtgtgatttgaatgttatttttcccattttcttgcatgcagatgattttattgcaaatagaaacgtattttgtagttttcctttgttattgcttgtccgatatttttcgatgcgaaaacattcagtgtagttttcgatggagttaagaagacaactttatcattggtccatccatgtcttaatctattagctgtgaaatttcatgttttgacggagacatagatttaattaatgtatccttgtactttattccttgctaattccttcttagagatagattgctccaaattacttgtcatatagataaaacgattctgattattctcaaatttgtttaatacgaaaatgtataaagaaatgcaacaaatgtatttacattacaattataattactagatgatttttcgtttttttctgattgctaaaagttattctatttatgcgactaagaaatatgtatatgttacttgtatgatagagatccgtttgagcctactcaagacttaaaatcgaactagcatatttcttcctcgtagattttggatgagtctgaagattagtagagcccctcacgaattttccatgaagagataaataacaacaaattaagcttcctctcttgccatcttatcattctagatcgctgaatatttttacgccacacaattttgtgcgaaaaagacttttgcaagttggcttatataatagagatccgtttgactgtttgagtacaagaaagacttaatagagatccctcatttttctgctaagaggacattttatatagactcacgtggtggagccacagagaattagccgcccctcacgaatattcttcccatgtttgcgttgctagtcttcttattctaagtcaatggagttagtgtactaatctaatatatatacaacaaacccttttatctgttttgaataccattgcttcatatagctctctaaaaaagctctttgttcgtctctatatcatacgaataatggattcttattttttccttggcactgttgttgttgttgctcttgcaatctacacgcttttgggaacaatatcttttatggtttatagaaaattcaggttacaccaagagaagaacaacatatcatcttgtttttctttttcatcttgcttttctttttcatcttcttcatcgacttcgtcgcccggtcgtaaacaccaagtctttccaagtttccacggggcagatgtacgcaaatcctttctcagccacatcatgaaggagttcaaaagcaagggaatcgacatattcattgataaagatatcaagaggggtaagtccatcggtcctgagctcacagaagctatcagaggatcgagggttgcgattgtcttcctctcgaggaaatatgcttcttcgtcgtggtgcctgaatgagttggcactgatcatgaagtgcagaaaagagttgggtctaacagtgatgacccttttctatgacttggacccaactgatgtaaggaagcagaccggagattttgggatggccttcaaagaaacttgtaaaggtaaaacaaaggatgaaattggaagatggagacatgctttggaggaagtcgccaaaatcgccggttaccattcaagcatatggtaaaattcattaccttttgaatgtgtatatatatgtgcaagcaatttttcatgagtgtgtatgttgataccaaaaaaaaaacattatgaatatttttaatttgacatacatgtgttatagacttatagtattaatattttgtatttttttgccacttgtcttttagggataatgaagcggacatgatcggaatagtcaccactgatatttcaaatacgttgaacatctcaacgccgtcaagtgatttcagcgacttagttgggatggaggatcatatgaaaaaattggaacgaatgttatacctagatctgaatgatgtgaggatgatagggatttggggtcctcctgggattggtaagacttccatcgccagagttttatttcgaaaacattctgacagtttcgatttgagtgtctttatggagactgtcaagggttatacaagaccaggttgttcggatgaacacggtcttaagctgcacttacagcagcagtttctgtctcaaatattcaaccagaaggatgtagaagttcctcacttaggagttgtacaagacaggttaagagacaagagagtgcttgttgtgcttgatgacgttgatcagtcagcacaattagaagccatggccaaggaaaataagtggtttggtcctggaagtcggattatcatcaccacgcaagatcgaagacttttgaaagcacatggaatcaaagatgtgtacaaggtggatttaccaccacctgatgatgcttttcaaatcttctgcatgtatgcttttggtaaaacctctccaaaacatggtttcgaggagcttgcatgggaagctacatacctttctggtatacacccttcgggaataaaaagtatgggctcttatttccggaaaatgtcaaaaccggagtgggtaaacgcgttacaaaggttaaggactagtaagcttgactctgaatctccgaggacccacagaaagctcataaatagattaaggaatgtaaaacagaagatgctgtcaaatacgttgagccgtataaggaagcaccaaatagcatcagcagcagcaaaagctgctagtgtttatgaaacaagtataaaagaagaggtggattcgtccgcggagtcgttgaatcattgacttggtgaagaagtaaagaaactgatagagttgaagaaccacgtccaagaacatgaaactacctgatcaaaccaccaaaacgaaagtatgtgcaatgagtgatttatgttatatgtatgttaatcttttaatttactctgcaatttgcttcagttgtaacaaggagagaatcggtcaacctatatcatgtagaaccaactctccattatttgcttgtggtatctatgtaaagagacaatctcaattccctaaaacaaaagtcttattattgttcttgttttaccctgttcctaaaaatgtgatacgaggaggtgatcaagaacttatgtttctgctacgtacactactatgtatttctttggatcttccatctctctaaacttacctgatacggctgtggatgtgaatttcagagagcttgaatttgagttcaagatcactggtaaatactgggaaattttagactgtggtgttcaaatcttggtagatacttccaacggaacggaacggaatacgaagaatctggagacatcaagatagtgaaaacttgcatgctggaacaatgtgaacaagaaacaatttaaggtaagttcttggattataaataacttggacaagtatcaacattcccacatgatctccaggttttattgttttctcttgcagcaatttatctggatcctgacaatattcgtaataaaaccaattcaggcttccgtacgcggtgtgttacaaaggcagcagaagagagttgggttcatgtgtccatttagcttttcgttgcctaggtcttcttgtttacaatatgtacactatagaagttttttatttggctttaattccgctgtgatcttattttgttcaaccctcttctcatgtttttttctccgtcttagcatgtggtgtatgaatcttggagataaatcatggtcggaaagaaaacgagacccccatcacagacatctcgtagctcaacagacaggaggagactgcctggtatgaagttaccaggtgaaaacagagagaacagaggactctgtctgaaacagagtaatgaagaaactgaagaaagtaaaacaatcttccaggtacattgtaattttcgtctataagtaatttagttcatagatttagttgtgccagtgactcccgtgggaatgaattagatgataaaatcgaattttcctcgatatttaattacgaacagaggaaattggtggtgtttcggggtatgttcatcgatgagatatgacctagttgaactatataatatcacaattcacaaaactaaaagatgatagaatcgaatagttagcgggtctaattttggtttaatcagtagagtttgtgtgtggtttacgttcatgataaaaatgtatgatgcttctaacttctaaaactaaaagaaatttatggctaatgcttttagttgtatgttagtgtgtactttgattgtcaagcaaatcacaatcataattacttcaaaatttaatgttatagctcaaatatttagatcagcagcagtagattggtgtatttgacttgaacaaagaaatgacataaaaatatatttaatgaatctccctgtgagctatatcctctatacatttagcgcgttcttcttatctaacactctttccactcaagtttttttattagaaaaaaatatatgatggaagtgcttcttcgcttgcttgtaactcaagttatcttattggctttagcaacttcatttgtatcttgttacgatccaaatcctcttcaagacttttgtgttgccgccagcgaaactaatagaggtattatctcgaatatagctagtttagtgttcggatctagaatctctttatcactactatatttatattttttggaaaggatttagtactataatcaaattacaaaacatcattagtgctgttttctttttggtttttcttgcagttttcgtgaatggcaaattctgtaaagatccaaaatcagtaacggccaatgatttctcttattcgggactcaacatcgcccgaaacaccaccaacttcctcggttctaatgtcacaaccgtagatgtcaacaaaatccctggcctcaacaccctcggagtctccctcgctcgcttagactttgctcagggaggtcaaaacccaccgcacatacatccacgcgccactgaaatactcgtagtcaccaaaggaaaactcctggttgggtttgtgtcttcgaaccaagacaacaatagactgttctacaaggttcttaaacgaggagacgtttttgtgtttcccattggtttgatacattttcaaatgaacgttcggaggacaagggcggtcgcgtttgctgggtttgggagccagaatcctggtaccattaggattgcagacgcggtttttggatcgaacccttcgattcctcaagaggtgttggctaaagcttttcaattagacgttaaattggttagatttctccacatagtgtttggtccgccattatggtagtaagttttaagattgatgataaaatttgtgagttaatcacatgatatacatacatgtatttaaatcccaaacttataaatttgtattttttatttgttttctaaatgaatgtaaaattagttcaaccctaaaaaaaaaaacatgttacaacatgtgtattttactttcacagagtttgtatgtagctaagtttatgataatagccaatattatatgtttctaatttctattttttttttaatgtgtcattagtggttcatgtttttcctatgatttgtgtggttaatgttctggttgtgtccagaataaatatgtgtatgcttgtaggctttaatcatcaagcaaatgataaccacttcttctcacgtttttaattttccaaattgatcataaaacgtcagattcaatgcttcattacttagtactagctcgaatcaaaagttttaaagaatatacaacgaacttctcctttccgtaactaaatggattttagagttttggaaaaatcatgaactacaaatatgtattggtttgaaatattgtttagttcgataataaaattatgttaaaaacaaaacaaaatggtttttagtgttcagttgcgtttatatatgtgttaatttaaatttaaaataaattatttttctttaaaattacaaattatagaaacaaaaacatatatctaatatcttattatgtatgtaactatgtatttttaaaaattattaaacaaacactcaaatgaagcagtcaagctttacacgttaataaatagaaagtaaaagcaggaaagtcccacaatttaaaacttcttgtattaatgggctttgattttccgtgaaattaaaatatagcgctatatgtaaactaaaatcaaatgtttttggacgacttcttggactatatatagcgcatgcatgtttctcatgcaacatcgcttaatccacaacagggaaaaaaaaaaaacacacgaacatttctgtttgagagaaaaaaaatgaaaggtcttctgcattttcttttagccaaaatcattttgttggctttagcatcttcgtttgtatattgttacgaaccatctcctcttcaagactactgtgttgccaccaacgaaactaatggaggtaatctcacgtacctggatcttttgatattcttcaatctggatatcatatgccaaaaatcatagtaacataattaaataattcaaacctcaaaacatttaatttgacgttttacacagtttatgtaaatggaaagttctgcaaagatccaaaatgtgtaacggcgaatgatttttacacttccggcctaaacgttcccggaaataccagcaccggtccgggcgtcaaaatcaccgtcgtggatgtcaaaagaatgcctggtctcaacactcttggggtcgacattgcccgcattgacttcgccccgggcggtctatacccacctcacacccacccacgtggcagcgagatcttcttagtcatgaagggcaagcttttcgttggatttgtgtcgtcgaacgaatacaactacacgctcttcaccaaagttctttatccgggagatgtatttgtgtttcccaaaggtttgatacaatttcatgcgaatattggaaagacaaatgcggttgtgattgctgcaactgggagccaaaaccccggtaggatcataataggtaatgcggttttcggatcgaaacctttgattgatcccaaggttttggctaaagcttttgcgttggacttcaacaaagtgaaatattttcaggcagtgttctcttgatgacatacgtaattagcctcagtgaataattatgaaatatagtaatgacgaaataatctgatgattatatattccgtacaaactcgatcaatctataatagttagatgtaaattacttgtaaactaaaatcaaatatttttggaccactttttggactatatatagagcatgcatgcatgtttctcatgcaacatcgcttaatcaacaaagaaatggaaaacaagaccacacatacgattctatttgaaaaaggaaacaaatgggccgaataaatattaatgggcctgattaaatgggcactatatccaattaaactatgctaaacagaaacgttatcttttcgaataacacacaaactcaacgttgccagtgaagttcgccgtcgccggagctcatggatcgaccaccgtcgtttacaccctatcaaaattctaatccgaaattcttcaaccacgcttctccttttcaaaatcctaacaattttactccatcgctccggcgccgattcacgagctctccggtatactctcttcttctgttgtcagaattttcgtagattctctctcgaaaaatctagcttttagatcactcttctattctcaggacaagcggttagtcattggttttcaaattaaaattgatttttaggttcggtatacattggtattgaaattagaattgatttgcggtttggtttacactggtttagagaagaaaacaaacaaattttcacgcgatgggaatttttgagactagtgcgtcgattgaaaaaggcatgatttcgaaaggggtatacccacagaattgctctcacgcgctcaacgctcactttgtgcgagtgggtgtgaaatagagccttctgattggcttagaaactctaaaaaaagtgaaatagtatacatgttgctagctcctgttgttattatttagtttttcgtttcttctatcaatctgatcaaagttcagttttttttttacatacaattgattctagatacttgagatctgatggtaatgataattttagatttttatgagactaggccactcagtacagagaagaaatgaatgcacttgggcatagaaatgttacatctgaaccacctagtgcttctgctgcaatgtcatcttcaaaagctattagtaagccaaaactgtcccaaggttcaaatatgcagtggattaaaaaagtcatctaaagtcgtcaaaaatgtctcaaccttccacttctatcgatgaggtcattacaatatatatgatttaagttttaaaacattgattatatccactggcattatccaattcatgtttctgttatcttgtgcagatgagcttctcttatgagttgtttgtgaaactttattgtgatagagtagaattacagccatttggccttgtgaacttatggaacaggtacatcattgacgaggatgaagaaaggcacaactttggacacaaaggaggtaacaaggcctgaagcttatttaagccatatttttttgcctatacattcatacagcacaaaaaagagaaattttaactgaatataagattctgcgagccatcaattggttggtctcacttgcttcaaaaaagctgcttacttaagagtttctattcatttgctgagttggttatcatctggttaggacgtttaacttggtcaacacctacttgatcatcaacattgagtgagttcctagtggtatgtaatgtcagagctgggacatggatcagggattcagggtcttggtatggctatttactggaagcatgatctatctcttctatggccgatctcacagcttactgaacaatgtggtttacgttccaacgacgacttgaaccagaaaacaacagatcatcttgcttaagattggtggttcaatgcagctgctgaagggactcgagctcaagctttgttgttgatgaagtagcatctaaagagaattaaatagtttggcacaggaagagtaaacacaggccaatacataaaacaacatgtcatgtacatctttttgtcattcgaaatgtcaatttcgtttttgttcttcctttttccatttccagttatacagcgtttgccaatattggctaaatgatcttagaattgccaagtccatttaataactccaaacataacaacaattgggaaaattttgactatctgcagataaagagtgcaaaatgcagacacacacacacacatctaaaagttgaacagaaatcatctaactatgattaagtcaataacaagtaacctaaatggactaacgagtttgcaagagaagagacaagataaagaaaggatgaaatgtctgagaatcttcaaaaatatgctgtatccttcctctccacaccagacttgccaacatatatatatatataagattggtggttcaatgcagcagagtttaaggtactcgagctcaagctttgttgttgcttgtaaagggactatgtcctcttgttttcttgttgtcaagcttttgttgttgcttgtaaagggactatgtgctcctgttttcttgttgaaccaggctacttctctcatgacacatagagcagcattggtcaacgtgtgctgtatcagtcaagtcctcagaatctggcttatgctccacaaactggttctgaaattggaggagccaaccaagattgcctgaaaaattgcaaatacaaattaaaaattaaaaatactgaaaaatcccaacggttagattaatatcaaatcatcaattaatgaagcaaatatactcttaagaaaataaaccttctctgcttataaatacagagtctcacgcattctcattctcttcttcattcttgagaaataaaatattctcttattcaccgaaacaaaaatctatttctcttttgaatacctgatcgccgatgatgattcgtgattgattgtgttgacccaatcgaggatgatttcagaaccttaatttcaccggcggagaaagaagagatcggggcagtgaaagcgaggagcaccaaagaaggattttgattagactctaacatggggaacgaagaagagatcggaggagaacctaagacggttttggattagaccattctcccagaaattgcaaacacaaacacaaactcaaatgacaacggttttgttttcatgtgttgataattaatttactgatttatttgtatgtgttgacttaaattattctatttatattttaattaaattatttttctttataactacaaatcataaaaacaaaaaaaggctaaaacgtatatatcatatatcttattatgtttatgtatctaaacttttaactattaaaattaactctaaaaaggggaaacgtatatgcaaacacaaactcaaatgattcggtcaaataagtttcagacgttaataaataaaaagtaaaagcacgaacgtcccacaattttaaatcttcttgtattggaccttgattttccgtgtaaacttgatcaacctattaactattatctagagtagatttattttacttgtaaactaaaatcaaatgtttttggacgactccgtggttatatatcgcatgcatgtttctcatgcagcatcgcttaatccacaaaaaggggggaaaaaaacacacgaacatttctgtttgagagaaaaaaattaatggaaggtcttttgcagtttctattagccaaaatcattttgttggctttagcatcttcgtttgtatattgttacgacccatctcctcttcaagactactgtgttgccaccaacgaaactaatggaggtaatctccctatgtgttgcacgtacatggctcctttgatattcttcaatctgggtattatgccaaaaatcatattgacataattatatcattcaaacctcaaaagatttgatttgacgttttacgcagtttatgtaaatggagagttctgcaaagatccaaaacgtgtaacaaccaatgatttttatacttccggcctaaacgtccccggaaacaccatcatcgggcccggcgctagaaacaccgtcgtggatgtcgaaagactgcctggtctcaacactcttggggtcgacattgcccgctatgactttgccccgggcggtctagacccacctcacacacacccgcgtggcagccagatcttcttagtcatgaagggcaagcttttcgttggttttgtgtcgtcaaatgaatacaactacacgctcttcaccaaagttctttatccgggagatgtatttgtgtttcccaaaggtttgatacattttcatgcgaatattggggagacaaatgccgttgtgatttctgcgggtgggagccaagaccccggtaggatcataataggtgatgcggttttcggatcaaaacctttgattgatcccaaggttttggctaaagcttttgcgttggactacaacaaagtgaaatatcttcaggcagtgttttcttgatgacatactagcttaagagaataatgataaaatatagttatgcgaaataatccaatgattatatagatatatatgtatgaagtaggaagtaaataacaaaaaatgtgtgggaaatatatatgtaagaatgtcatgtgctaattaatttaaaacaatttgtaagaaattaatatagttaatgaataaataagccaatatattttagtttgaaatttaagaggatgaggatagaggaataataaagaggtttgtgatcgcctactattccaatgggctttgaatcagaaaattcagaatcgtggaatgtaaaatatataaaacatgttccaaaacttgacaatgtcccaacgaaatcttaataacgcggcacaaaaccgctttaaggacgtatatatatatagaaaagacacattgtgatacttaagaaaaaaaatcatctcaataacacaaaaaagaacataatctaagatttatatcagaaaatgcatgatttataggttttaataattttacatattatataaagagcacaatattctaaatggccacgcggaagcaaaacacttccacgtacacagtagaggggcacattactaaattaaggattatatatgttgttctctctgcatattccacttatattttaaaaatgtgtttttagtagctattccatattgtaatttaattaagattaagaaatggccatgtcttagtgtaagtggtaaaggcatttgatcttctagctcgcatgaaacaatgccaactttgtttgcttaatttcaacttccactctcgcatatgcagccattgctatattcacatacttgaacaataatcacaacaaaaactaattagttgataatttttctttagtagagtttgtgtgtagcttatgtttatgataataacactgtgggtttttaatttctaaagttgaaaaatatgtggtttatgttttgattgtgtgcaagtatacatttgtgtatgcttgtatacattgatcatcaagcaaatttaaatcataatcacttcttctcacgttttaaattttcaggtaattgtggaaacttcggtttcaacacttcaatagtttgtatcatatttcaaaatttaaagaattataccacataattaatggagtaaatttgtttcataattcaacaaaaacaatgaagttacgaggaacctagctagccctctcataacgaacttgattcataaatttaaaattagttcaagaaaagaaattagcaaatgatttgtttcaaacgtatatatttacacgtttttttataacgatatttgcatttcattcaagatttttttttttttttatagtgatcaatttctcttacaaattgtaaaccccaaactaatctaacatgaatatagcaattacatctccttttttggtgcaaaaaataccagttacatcttgttatatatatattattttattttaacatctcatcatcattatcatcttcatcatacatcacatcttgttatatatgtttacattttaaacttacaaaaaaaagttaataaataagagaaactccataaacgttgcgacttgcgactttatttaacatgttatatatttatatatacatgtatataaactgcatacaattaaacctgcatgtgttatgtgttcaaacagaaaaatgaatgccaggatttccaatatttttaaaattttacttttattaggtcttgatatttccgtacaaactcgatcaatctatgtaaattacttgtaaactaaagtcaaatattattggaccactttttggactatatatagctcatgcatatgtttctcatgcaacatcgcttaatccacaaagaaagggaaaacaaaaccgcacgaacaattctatttgaaaaacaaaaagatgaaatatccttttcagtgttttctagctaaaatcattttgctggctttagcatcttcgtttgtctcttgttacgacccatctcctcttcaagactactgtgttgccgtccccgaaaaaaacggaggtaatctctaattattgttttatacgtaaaacaattagtttatacataagaataaccctatattttttatgttatttgatatggaagacgatgttatgatcataaaacttattatataactttcaaattcaagtctacatttcgttctttttttttattttatcgtagttttcgtaaatggagaattctgcaaagatccaaaactagtaacatcagatgatttctttgcttctggccttaacatcccgggaaacaccaacaaacgccttggctcctttgtgaaccccgctaatatccccggtctcaacactcttggggtcggcatcgcccgtattgactttgcccctggtggtctaatcccaccgcacatacatccacgcgcctccgagatcatcttagtcatcaagggaaagctcctagtcggttttgtatcgtcgaacgactacaactacacactcttctccaaaattctttatcccggagatgtgtttgttcatcccatcggattggtacaatttcatgcaaacatagggaagacaaatgcggttgcgattggggcggttgggagccaaaatcctggttatatctcggtaggtgatgcagttttcgggtcgaagcctccgattgacccaaagattttggctaaagcttttgcgttggacatcaatatagtaagatatcttcgaaaagtgttttctcctcaagatgatatcgttaatgattaagaaataagttgatggttatacaacagataaaatatatactaataaagggtaagaaatacagattaaaaatgaatgtgtgggaaataactacgaaagtgtgtgtaatatgtaaatgtaacagtttaatgaataaatatacacaaatcttgtatttaaaatttaggagaacaggacttggggcttataaatacgtttgtgatcctgtttaagaagagtttgaatcagaatcatgaaatgtgaaagattaaacatctcgttttcttgtcacagttcacaacgttttttattactctatcgacttacgatgaatattttaagaaaaataaatatgggccgaataaagacactaatgggcctaattaaatgggcagtatatccaattaagtagtaaacagaaacgtttcgtttcgaatcacacacaaactcacaacgtttctgtgaagctcgccgtcaccgtcgccggaactcatggatcgaccaccgtcgttgccacactatcaaaaccctaatccgaacctcttctaccactatcctcctccaaattctaatcctaatttcttcttccgacctcctccacctcctcttcaaaatcctaacaattactccatcgttccgtctccgccgccgattcgcgagctctccggtacactctcttctttaaaatccctgttgtcagaatgtcaaagaaccttagattctctctcgcaaaatctagctttagatcactcttctcttctccagaaggacgaaaatggctgttttgttcgttgcccttttgattcaaatcactttatgccacctgaagctctctttcttcattcacttcgttgcccaaatactcttgacctcattcatcttcttgaatcctttagtagttaccggaacacgctcgagttaccatgtgaactacagttgaacaacggtgatggtgatctctgtatctctttagatgacttggccgattttgggagcaatttcttctaccgagattgtccaggagctgttaaattctctgagctcgatggaaaaaaacgaactttaacacttcctcatgttctatctgtggaatgtagcgattttgtaggttctgatgagaaggtgaaaaagattgtcttggataaatgcttaggagtcttaccgtctgatctttgtgcaatgaagaatgagattgatcaatggagggatttcccaagttcgtattcctctagtgttctttcttcgattgtgggttcaaaagtggttgaaataagtgcattgaggaaatggattctggttaattcgacgagatatggtgttataattgatacattcatgagggatcatatattcttactctttcggttgtgtctcaaatctgctgtgaaagaagcttgtggatttaggatggagtctgatgctactgatgttggtgagcagaagattatgagctgcaagagtagtacatttgagtgtccagtcttcattcaagtcttgtcttggttagcttctcaacttgctgtcttgtatggagaaggaaatgggaagttttttgctttggacatgtttaaacagtgcatagtagaatctgcctctcaggtaatgttgttccggttagaaggaactagatctaaatgctctggagttgtcgaggatttggatgatgcaaggttgagaaataaggatgtgatcatggagaagccctttgagaatagttcaggtggggaatgtggcaaaactttggacagtccacaggtgatatctgtgtcccgtgtttcagcagctgttgcagctttgtatgaaagatccttgcttgaagaaaaaataagggcagttcgatatgcccaaccactaacgagatatcagcggtaggtttgaaatctttcaaaggcgattctgttttgccgacttgatttttagtttatgaaagcatcatttcatgtttgcatttgagtttgattcctcatgatgtctctgtctgtcaatctgtagggcggctgagcttggttttatgacagctaaagctgatgaggaacggaatagacgttgtagctaccgacctattattgatcatgatggtcgtccgagacaacgctcattaaatcaggttaatactcaactaactgttatctaacattaagtaaacaaatattactgtagggaacttttattgaaggtactgaaatacatatattttactgtctataatgtgtaggatatggataaaatgaagacaagggaagagcttttagctgaagagagagattataagcgtcgtcgaatgtcataccgtggaaagaaggtgaaacgaacgcctcgacaggtaagagctgtttccttttcatgaatgacaatcacaaattccagtgttttgaatgtgctacaaaatgctcaatgtttggacaatctcattgaaattttgttggaaaaagtgtagttatatgctgactctactattgtcttgtcgaggcattttgcagattttgtgaaaaaaattggtccttgctaaattcatacttttagttatgaccacccttcagttagcaataaacttatactatcctcttcttccagtgagttttctccttcttttgtcttgtaggtcttacatgatatgatagaagaatatacagaagaaattaagctagcaggaggtattggatgttttgagaaaggaatgccattacaatcccggtctcctataggcaacgaccagaaagaaagtgactttggatacagtataccatcaacagataagcaatggaaaggagagaaccgtgcagatattgaatatccaatcgataatagacaaaattcagataaagtaaagcgacatgatgagtatgattcaggtagctcgcagagacagcagagtcacagatcatataagcacagtgatcgaagagatgacaagctccgtgatcgaagaaaggacaagcacaatgatcgaagagatgacgaattcacaaggaccaaacgacatagcattgaaggggaatcttatcaaaactacagatcatctcgtgagaagagttcttcagattataagaccaaaagggatgatccttatgaccgccgcagtcagcaacctaggaatcaaaatttgtttgaagatagatacataccaacagaaaaagagtgaacttaaaagaaggtaagtcattttaaaactctctctctatcaccgtgtgggctggtctgactttgaaatggggtggtttattccgatgatcttgcagtaaaagtgtacctggagcatcagcaattatgtgtgaatccgtatcctcttttgtatccttaaccaaatttttaccttctcttatacatctcacttggtgatactctcaaatttccagctgtctagattcactgtagttaccattcccgtctagatatgttttcagtttctttttcgtctatggttgtgacagattgaagttaattgaagtatgtttttgctgtgaacaagccatgagccgtgagattgctgggaagaaatggtaaactccacaagtgtttgtaattgtgagagactgcaatgttttaacttttaagtctgttgttactttacaacagaacaccagttcaggtgatgtaacccttactgatgtaccttctgttaatattacacactattacagtattacttataccaacaaaaacaaacactgtaacaaaaagttaagcttaaaaaacccaacgaataacgtgtgacagctgaagagaaacttgcaacgcaagtaactgaaactaagtctctactagatctctccttcctccttctcttccagttcccgcctgtgatcatcacttcttaaaaccagatcaagctcgttaagacaccgagttcttgccagataagatccaccacagagtttcaccatctccttctcagtttccaagtgatcttcaaaattggatttggcttcttctttcttcttccaacttctctcgtgcaagccgttcctcacgtaccactttcaacctggcggctctcgtgtcaaactaaagatatataattagtggacttaatttttctaatagtataccttgtgtgtagcttatgtatgtgattattataacagcgtttttaaatgtgcggttaatgtgtgattaatgtcttggttgtgtgcaagtataatatgttcatcccaaaattccaaattttcctatattggaccttgattttttcgtagaaactaggtcaagctattatgtgattaatttactacttgtaagctaaataatatgtttttagacgacttgggctgtatatatagcgcatgcattgttctcatgcatcatcgctcaatccacaacataaaagggaaaaaaaccacacaaacattttattagaatataatgaaaggtcttgttcagtttcttgtagctaaaatcatcttgttggttttagcatctacatttgtacattgttacgatccaaatcctctccaagactactgtgttgccaccaacggaactaatagaggtaatctctctctgtgttgcacgtacatggctcctttgatattatacggaaaatcatatatagcctaaagatatatctacagctgaaacccaatataggttctcaagaatctcaaccagtggtagattcattaataaccatataaaaatattttaatcatataatcgagtctgattgagtaatttctgttacaagttaaatattaaagttttatctcacagatagtaatgtaacaaattatatcattcaaaactcaaaacccttaatttgtattattttttcgcagtttttgtgaatggaaagttttgtaaagatccaaaactagtaactgccaatgattttttttattctggcctaaacattcccggaaacaccagcaaccgccttggtgcatcggtcaccgatgttgatgtcagaagaatccctggtctcaacactcttggcattgccattgcccgcttggatttcgcccccggcggtcaacttccaccgcacatacatccacgtgcctcccagatcatcttagtcctcaagggacagctctcggtcggatttgtgtcgtcgaacgactacaactatacgctcttttccaagattctttaccccggagatgtgtttgcttttcccatcggtttggtacagttccatgctaacactgggaagacacatgcggttgcgattggcgtagtcgggagtcaagaccccggtgtgatcccaataggtgacgcggttttcgggtcgaatcctttgattgatccaaagcttttggctaaagcttttgcgttggacgtgaacatagtgcgtcatgttcagagggtgttttcttccgaaggttacatagttaaatagttctataggatatcaataaaccatatttgtgatatttgaacaagaatctaaagtatgtaagtattgaaaatacatggatttagataatttactactactgattacatacgaaattgtttttgtctattacatgcgaaatagattttggtctaaacctggatagggaaaaggaaactaactggatttagatttactagttatcccaataacaaaaaacgtaaataatatttccacacttcaataaaaaccaatgatcaatttttagttcacttttcttacgtttatatgaagttaatgtaacccatgagggttaggttacgtgtgacaaaagaaaattatgtatttcaagaagaaaccaaagacgacatcactcgtttgaaactctggggacgatgaccagagccattactgatcatctcagaagaaccatcaatggctagtcctttaccaccaaaacacaagtatctgttcataaatgatccctgtttcttcatggcaggtgttcttcgccctaattccgaagaaaacgtctgaaacggcgtcgaacaagccgacgacggagctcgagagtaatcggatacagccggaggagaaaacacgaacctcggagattcctgaaccaccactcctttcattaacccttgtgtgaatttaagtctcaccgataaactcggaagatcaccactctctgttctcatcggaaacgcttttcctctgctacaagacgacggagaatacatctctctgagaggaacacgacggttgttaacatctccggataaacgacgattttcttctgattcttccctcttcgcccaccgtaaaagaagcttaagacgcgctcctgtaccgccgccaccgcggcgtttgcgtttcgaatgcgtcgaaatttcagttgaacactcactaattccatcaaaactctctctgtctggacttaattcagcgtttgcagcggttttatctgttctcgccgccgtaaatagaaagatctcagaatcagatatctcaaacgacgttcctggactaccgcagaatccataacgctcttctctcaaccgcgaaactttctcaccgcagtttgatcttccaccggcggatacaagccgtttgatcaacaaatcagaaaccaccgtttgaggcgtttgtcgtttaagcaaatcaacggctgtcattccataagaatcaacgacgttaagatcaacgccagggattctcatcagaatctcaacgacgtcaggtctaacggcgttaagattatccatcacagctaaatgaatcacagttcttccgttacaatttctaacgttgacaatctcagaaaagtcaacggaccagcttcttgagactaacatcttcaaaagctccatctgccgatctaaccgcttaaacccagacgcagcaaaaccagacacgaccgtgtgaagaaacgtgtcaccatctccattaacaatggaaatcaacggtggagattcgtttataagagcttccactacatctaaatgacccttgtaagctgctatatgcaacgctgtgtttccatggctgtctttaacctccatgattgaatcatacttcgatataagatacttcaccacctacattatattcataaatcaatatatgtatatgtaagtaagtatttgattatgtgtgctctgtgttctttacttggatttgagctctgctagaagcagagtgtaacagagtagaaccataagcatctctgagttttgcaacggcgtcgtatttgttagcgagtaagagttcatcgaggattgccacgtgtccgcctctcgccgcactgtggacccctcttttaaccatctcttctttgactattaactgtttctctgttaatttttcgccgtcgatttcttcgacgccggcgatatcagccggtaacaacgcgaaatcgaggagaagacggaaaacgtcgtcgcttcgtcctcgtgccgccgcgtagaggatatcagtgacgccgtactctccttctccgaacacgagaagcggatctctctctaaaagctttttaacgaattctaaatctccagctgaagcggctgtgtacagcagccagccaccgtagccagctctgatgagggaattgtctccgtttccgatttcgcactcttccaatagccttctcgcgacgcgggagcggtttagagccacatggaagttatttccgtctccgtcgtcccagacggtttcgaggcggcggatacggcggagggaggtgagttttacgagaaggtttgtatcttgatgaagcagctcgatgacgacgtcgtataaaccatttgcggcggcgcaatcgattggtgaagcgtaccaccactggtctccggtactttcccaccggagaggaaatatcggcggtggcatttccggtctagaaaattatccgggtcttcttcggttttagtgaaccaaaccaatgaatctcaaaggaaacagagctaacgagaaaacagaggaagtggattataaagatgaatttgagtggtttgaaatcaaagaagtttttttgaacgacgaacacaaagtgatgaagcagaagacaacaaaaaggagaaacctttgaagattgtgttgttgtggcgaagacggaacttgtgtgtgtgtttcaccagaaaaagaaaaaaatagtatttttgggagcatcgacaatatgcagattccatccccgtgagtggaccatatctgacgggatttatcctttttttctaatcaattaagcatgttattatgatcctgaaaaagttttgtattattctgatttctgaaaggctgttgatttttcagcaagaaagaagaatgtgtaagtatattaaaatctagcaagaattttggttatggttcccttttgcagtaaaaaaataaaaataatctgttattcagtaaagtttaaaatgtttaagaagtgtgtaagcaataattgaatgatgcttcatcaaattagacgcatccctggtttggttggaaacagacgtggatgtattattattgatactagtagttttgttatttcgtgcataataaatcgacatgtaaattgctctgcctctaaattaatacataaatttcgaacaatgtagaccaaagaaaaagtgcccacttgtggcagctaacatttgagggcccttaataataatatctaatcaataattcgtagttaaagcttaaccatcttatgaagttgaagaagactactcaaatttattttctattaataatttcaaaaatatcccaaaaaatatattttgttttgtttggggtaatatggatctacctttctgtcggtgtgaactgtgaagtgtggacgcatccaaatgcacatgtatttgtccataaactcaatgctcattacaaaaaaaaatatgctcttggatcccacacttgtgtaaactctcccataaattagtcttgatgtgaataagcctgccataactctagatcttgagatgtctcgagacctttgcaaagatcgagtcaaaacagaaaacaaacaaaacttgcctaacctcttatcatcaagaatgtgtcagatcaatcaactccagagttccaatcttaacaacttttcatgaatacgaagtccaagtttcttgtccatatccattgaccaacgaacttgaaatctacactacaatgtggttgaataaacaacacaatgaacatctttatgcatgatctggtcttgtcttctttcgcaagcatgaagagaccacttctcatcccaatctgcgaagtaacagtcaagtcgtcataataactaataaacctcactttacaggtgcagtaagtttcacagtcttcataatgtgttcgattctctcagctgattcatgcatattcttcttcttgacctcttccaagagcagcaaacaagtgcggtgcctcggcgtgatatcttggctaatcatctcttcgaatagacaatacgcccactcacacatattagctctgcataacctctgtatcagaaaagtataagtcgactcatcgaggctgagatgatgtttagtcaccatctctttcaatagtttcccaacctcaacaacatctcctctcttaaaacaagatctcagcaggggttgatacgtatgaacatcgggattacaaaggtttgaactttccatttccttgagaagctcaatcgccttatcttcctcatcgtgatgacaatacatagcaatcatagagttataggtagatgtattaatggaaacaccaagctctggcatctcgactctgaaaacccgctcagcttcttctaaccgaccagctcgagcaagcgtgtgaatcaaacagttgtagaaaagagaatcgggtttacagccggatcttttcatccttgtagcaacccgtaaagcctcctcaaactctttctgtgcattaagagaagacataatagttgtgtaagtaatagaattcggaggagacccattagcttccatctcacttagcatttcatagaccttaataaactcaaactgctggcaataacaccttataatcgtcgtatagctaataacacaaggacgaaaaccatgacctttcatctcttggatcgtccaaagagcttcctcaactctatttgccttacaccaaccatgaatgaagatattaaacgtatgagcatttggtgtaatatgtgacttcagctgtagcaaaactactcgggcctgctccactcttttctccttgcaaagcgtatcgagcagtaagttcatcgactccgtgttcttctccaatccaaattcacccaacctatcaaatattcccacagcttcttcccactcccctgcaccagcaaatctcctcatgatcttagcaactgtattcaaagtaacaagtttatctcctctcattctctccacaaactccttcatccgatcccatttcttcgccttgccgagaatatccacagccatatcataagcatcactcgaatgtttatgccctttacaagactcagcccatttcaaaataccaagcgcagatctccagtcatctctaaacctatgaagcagcttatgaaccaaaccatcagaaagattgactcttttacagatttcatcgctagatagacgtttaaaaacatcatcttcactatctctatcaccgtctctacctacaataacattccatatctcctcagactgtgaatattcatcaagtgtctcaggtaattgctccgaagcagtagagagattcttgataaacgtagagaaaatagcgatagaagacgaagaaggattaaggcgtaacaaggtgtttccaatgcgattttgaataagccaagacattaaatctaaaacccagaacagggttcttcaactgcaaccataggaaaatcaaatttttatcatcatcaatgaaatttgaatcttactagtgacatatgacgaaaataagttagacatgaaactcaaagatcgtacctgaaagatggagcaaagggaaattgtgaaaatgacgacggcctcttgccggagaaatttgaggaggactaatcgcaagagaagggtttacggcccaaagttgggctctctggttttggaagcgttttacaccgtctggtttgaaaaaccggttaggctttgtgtttgaccaactgggctttggcattgggccttcttgtgtcgtatatcaacgacctccccattttttcgatgcggatgtgtacaaataattgaagtgccactatacgtgaatttgtgtaacatggtttaataatttgttcaaagtacctttacagatgaacacatatttcgttgtctttataaaccgcacatctgttaatgaatttcttatgttttgagaagaatcaataacaaaaggcaacatgaaatacttttcattcaaacatcagtctacaaactcgcataaatgagaatcgcaaacataaaatataggttccacttagaaacttttattcgaaaactagaagaagctagattaataagtgtacacctctagttccttagatttgctacgtcatcatcaacgggagctcatttagtttcatttttcgttcagatttgatttagtatatagttaaaaagagaagtggaacaaaattgaaaaccataacgttaactcaatatatcaaaagccaaaaacaaagggcttccagtaaaacatcggtctacaaactcccatcacctcacatgaatgagaattaagaaaaccaaaaaaaaaaaaagttccaagttcaaagaaattttattcgaaaacgacaaattcagaccataaaaggggatgaacagatgactttccactccctatcattcgagatctgcttcttagcttaggcctttgacatgtggacgatcaagtcgaccacacgggaactgtaaccccattcgttgtcgtaccatgacaccaatttcacaaacttgtcgctcaatgcaattccagccttggcgtcaaaaatgctcgacctgttgtcgccaacgaagtcagttgagacaacatcatcctcggtgtatccaaggattcccttgagtttgccttcggattcctccctatgtattggtggtaaaaacacttggtgagtaatttgatcactactggaatataagtaaacttaatctgtcattgctcaaaagcttacttgatagcctttttgatttcatcgtaggtagcagctttctcgagtctgacagtaaggtcaacaactgagacatcaacggttgggacacggaaagacattccagtcaactttccgttaagagctggaagcacctttccgacagccttggcagctccagtgctgctgggaataatgttgaatgaagcagctcttccacctctccagtccttcattgaaggcccatcaacagtcttctgagtagctgaaatcataaagcaaaccccattaaatcacaaattttccacctataggcaagcaagtttgtaataaacttctaactgattgataaatttaccagtgattgagtggactgtagtcataagaccctcaacaattccaaatctgtcattgataacctacacaatgaaatcaaagaacgttaaatgaaattagtcacttcaacttgaaatacaaagtcaaatttgatcatatagaatatcagatattttaccttggcaaggggagcaaggcagttagtggtgcagctagcgttggagacaatgtcaaggtcggacttgtattcgtgctcgttgacaccaacaacaaacattggagcgtctttgctgggggcagagataacaaccttcttggcaccaccctgaaaatacaacaagtcacaaatttagttgaatgatactaagcaaattctagcacataaactatttatatcattacaagacaaaaataaccaattcaaataagacaaaccttcaagtgagctgcagccttgtctttgtcagtgaagacaccagtagactcaacaacgtagtcagctccagcctcggcccatgggatatcctcagggttccttcacaaataccaaaaactaatgagattgaaattcacaacagtttgtaatatgtatacacgcaaagagacagagaactggttgataaatgtacctgatgccgaaaacagtgactggcttctcaccgaagagaagggtcttctcatccttgatcttgagttcattgtgtttccattgaccgtgaacactgtcgtacttgaacatgtaggtctgcagcaatcaaacacagagcgcaatcaaaatcaactcaaccatatcaactctaatcacaaacaggctaatcaataacattacaaacacagcaaaacaaacaacagctccacaagtatactgatcagctaaacagtatgaacaatgaacactaaaccagtttccagatctgtgcactaattgaacaaatcatctgacacttaaatccacatgcataatccataaatgatatgatccatctatcaaatctaacgaaagcaaaggtaccagagcgactaacagaatcttatcgtcaagagatcaaaataatattgaagcaaaccaagatcgaatcaccgtcaaaaccaaggaaggaacactaaccatgtactcagtagtgatgaaggggtcgttgacagcgacgagctcaacatcgtccctctggagaacaactctagcaaccaaacgaccaattcttccgaatcctaacgataacagaaatcaacagtcagattctagatctagatacatgagaacatacaaacccgaattacaaaatcgattcgaaactcaccgttgattccgatcctaatcttcttgtcagctacataaaacaacaaacaaaatcagaaaaacgatcagatcagaaaactcaacaacgtaaaatagcagcgacgggacgagagattagtaaaagcgagagactaacccattgtagaatcgaaaacgagagttagagagaggttgaagatgagattggcagagagagattttagagtgagataggtgagtgagaagggttccgtgaagaggttatttaaaagagagaagaacgtggaggaggggtcggaatgatctagtggctgagagtttttcttggccaaaaagtcagatctgattcaatacttttcttaacctaaaagaccaaattgcccttaatcattttccttatttaccgttgtagctctgttattttggcaaatgtcgtcattcctgaggcgagacatggcaactgcatctcacgcgctaatctggaatattctttaaatatttaagacgggtcgggtaagcatgaaacgcagcgtatttggatatgcttttatgcgccgaccagtgtttgactgccacgagttcacgagcggcccattttagtagacgggttccattttctagaacgtaacgcccaaataaaattatattttagaaaagtatatatttcaagttttcaactctttaggagactttctttaaaagaagatatttgataggcgtatatggacaagaatttgaaaattttgatttgataagcaatattcaaaaaagcaaaagtccctatcaaaaactcgattagttgatgtatttaattcaaaaaatacttcgtgatgggtgaatcactttagtatttacgtgaattaaattattacatgtgaatttaaacgggaaaaaaaaacaagtattacatgtgaaatttgtttcgaagtgtactttgttgttacttatgagtcctgtcccgtcaattgctatagtagagcttatgaacgatggatcactttttacttatagaagctttgaagtttggtgcatagtcgtgatacctcttgacgcgtatgaaagagatgtagggctagtacgagaacatgagcagctcccgcaatgatgaacaaaccgcgcaactcacggaaggtgaatcgcttagatgcctcatcatcgtcgttggtagatgcaacttcctcggtgttggaatgtacatttagtgaatccagtttttgaaaccattttttctccatgtctttcaacattcccaatgatcttagcttcgcgatttctcgcgatactttaggaaccaaatccgaacctttctggaacatctgagaggtaaacataaattagtacgtaacaagaataagtaaccaaataatggagagaaaatgagaggtttgaggagaagggtacatacaaagccaaagccattggtattagtcactctatctgtcattacgaaatcattcggataatttccgataaggatactgagataaggtatttcattgatgacatgattaagagttccatctcgcaaaagttgtgcataggcctcaactgcattaatggatccgagcttcgcagtcattgacgtcgtagatcccccgaaaaccatctgatgatttaattgcatgcgagaaatggtcttggttgatgtcaagtttgcgctgtaacttgaagtcaatattaacaccacaaaaacccaaactatgactaagaatcttgatgacattttctgtagcttctctcctgccaagaatgtgcgtaatttgttatagatcaaaatatacaaaaggatgggatttcatgaagagtagtactctaacataaacacttactgtgagcaaatacaatggttgagaaaccaaaccagagcatcatactaagttgttgtccccaagagccctgaaattccggattaacggaccgttcaactaaccaaacaacaatcccagttaagacaaagaaagctccacttgctagccacaaggatttttcgaaaggatcaaagaaggtccacatcccttggcttttctttttcactgtcaagattccaataccaatgtcagtgtacggcaaagtaaaatcaacatacaaagatctgttggaagtgatggtgatatcaccaactgctgcatcatacttgtctctctgtcaaaattgcaaacacacattattagaaacatacataatcatttttgactagaaaaatgtttttaaactgtttgcattttcacacctgagtagaaagtagataagcaagattgtcattgtttccacggtaaggtatgaattcaagctcgtagttaaaaggagcaatgcaagtcttgaaaacctctacgcagaatccagagacagtattaacacctgtttcaggatcaggacgcaccgacactagatgcgggaccttgtttcctgcggtaactaagaccctaagcaccttcttttcacctttctctgccaaaacacggtgtcttgggatcttacgagacctgccaggccaaacaatctgtcttctttggctaaaactaccaccactccataatcctatccttctctgtttttctcttccaatattcacgatttcaaatgtctctgagataaatttgttgtcagagatttggatgtcaccactcaaacccttgaatctactatgtctaattgtatccagaagatcagctgatacattcgaagatgcttcaactttaccacttacactgaacttctctactgcatttgctagaatacaagcgatatcgtgtgcgcgtaaaccgatgattacactagaatgctctgtttctgtatcatctcccatacgtttcctcaatcttgaagtaaaattcttaacttcttcagatacagggatgtaagatttgaaaccaatgaccccttgcatcgacctagttattgcaaaatgttccaagtagttcatggttcttgcagtgaggatccaagcgaacgcttcttccatcaaacctaacttctctacacattggaagagacgagaaacaagaatctcggacatatgcaccacaaaaaccgatgctcttgagaccttaagcttccttagctgattcatcatatgattttctcctgatgatgagactgcaaaagaagcagaacgagcgatatagattcctttatcttgaaaattctcaaccaatatttgcaaactctcactccaatcatcagcatcctcgtatataaccacaaccgatttacaactgaaatcttgtatgagacttgtaattcccttagcctctgatgtagtatcatgcgtccattgaataaagttatcgtatttcttcaaagataacgtgtttggcaagaaagtagatatgaccggaactttagctttttcgctaatcgtcgccaaaagctttgcctcttgtaatgattgtgcaccaacaatggcttccgcttttgcatttttgagaagatcagtagctgtttcatacaaacacaaattgcagtgcaaaacggttagtgcaagacatgagaatgttaaccggagtaaaccggcgggactaggtcaattcttttttatttgattcagtctgctttaaatgaagaggagttgtggatcccaccaaaaattgcaataattgaataagggagatgaaaactcaccggcggcaagagcaatgatcgggtctccttgggagtctctgaccaaaacagagactctggttcggtatccattgttgatgccatagaaatctgaaagcgctaagttaaaagaagtttccagaatcttgccttgtatagaactcaagtcaaccaccaatccaaccctaacctcttcgaaaacatcatcgtcgcttggagcagctactactccggaaaagagaagagcaagaatggaaatagaaaacagaatctccatataatttcttgtatagctctgtaacgttcgctttgggttataaacaatggtgtttccatatctacttgtgccatggaataataattatactggaccattttttttttccggtcaaattgcattttgattttctgaagtgtatggtcacaatcattttaaatcaaactaacgcgatatcgcacacaatcaaagtcaatgtgtactgttcatcgacacaaattgactaggaaacacatttatttccttctaaagtatagttgagccttaaaaaaagttttatttaatttatgttttcaacagttacttttaaaactgatttcaaaatccaggttaaatacaatgtaaaatacatatgcaggggaaaccataatactagatatattagcttatttcgcaaagtcaattcgtagaagtaaatattcgagttcaagtgataggacaaccaagtgatatataataaaatctaccacaacccgagaagctaaaaaaaatcacaagctggttagttcaactcgtcgaggaaaaatcaaatcaagagattaaaactctagtctaggatgatcccacagtcatctccttctacaatcattaaattattactctatcgaaaccacacgctcgcgaatacttatagagtacatgtggaatgagataacgttaccagggagattaggagacttggcttatagaatacttatggaatacatctccctcgcgacttacctgcgcaatgaaaactttttctcgtcttgttcaatagttgtacttcgcacaaaggataatacgatcataaaaagactcataatacgatcttcgatatacccgcgcaacgatggatcacataaacggtcgcatggttggaaaatttagggctcatctctgattgttttattttcttcacaaaggggcaaaaatatatatatacactgtatatatatatggggttttttttatggtcaaatgttattgcccttcgaataagagacctttgattcgtaagaagagattattattttataagagaaggttatgaccgaaaggtttctgaagaaaatgaaaaattacttttaaaaggaattttatctttaaaaggaaacaaaaggaatggttaagttttacatgattggacgcaaaaatggaaaattcttttgattacttcaaaaaaggaaaccctcatttcttattaataatacatcaaataaaaaactaacatgatttttcgcaaaatatccaatttgtgaagaccctaacgctcgaatttgtcatcacttggctcagtctttcaacttttgaaaactgaaactccttttttctcaatactgttagataatagagatatactcgagacgattgagcttcgtcaaatggatacatgcagtattaaaatcagcagttcaaatacaaagaaatttaaatcatcaagtatgaatatgtatgatcatgcttcacgatcgaacagacgaacaccaccagaaactcgacgtcccacacgaacagaagatgaaccaccacagtcttttcccaatcgtaagtgagccatattgtcgcataagttatcacgtaactcgagcatcgcttggtacctttgctgcagctccttcgcgctcaaaccttccgaaggaaagttccaccacattttatctaacttcttttcatttctcgattccttcaacagtttcaacttctctagatccatcgcaagctcctcttcgagcgcctccattttttttacgaggtcgtggagccttcgtttcttataagcttcgacgaggggtctggtatcgtctctctctaatggttcttgtctcgaagggttctttaaccggtcagccactttcttcatagacggatgtgcgaatgtatagggcttcttgggttgagagaaaatcaagaaagccacttcaacgtcacacattgctacgagctcgttcattttcttaaaaattccggttttacgttttgagaacgtaatcatcctatctccatagttctccaccttcttcatctcgatcttttgcttcccctttgtttttcttccctttgcttgcttcgtagatgacatgtttgcagaaaccagaactagtgtttgatttcttgtaggtttgttattttgtatgtaatgataaaaccatgcgcaaaacacaatctatttatagaccaaagaaagagataggattacaaagtttggagacattaaatttaaatcttagttatgaagaaagtgtattgactaatttacaaaaaaaaaaaaaaaatgttgactaaacacatttggcaaccactttaacatcttcattaatcagtcaagaaactattatggtaacccaattggtgtaatagctggtgtaaaggctaattgaccattcaaggaggaatgttcttttaggtaattacgagtttgtgtatcccttacagggaacatacctcagatccaaaattcttttgttacaaaaaaaataggaaaaatttgatataaaagatatctactacaaaatttgtccataatattcttatttttttgtagattagtcatataatttttttaaaaaacttcaaaatccaaatttatcttatttttctatcaaatttcatttaaaaaataaaacttttttgtattagtataagtccgttcatttgattagtcataacttttgctataatattttgtttgacttgaaatcactatcgttggaaagctaattgaaactaatagaattgctataatattccgtttgacttgaaattactaccgttggaaagctagttaaagctaatagaattgaagtcaatatataaacataaaaaaaaaatttaaaaatttaattttaggttaaaataactttaatctattttctctaaaataacaataacttaagggatgcaatttatacttataaatttccaaatttatataacatgaaacacatgaaaaatatttcctctcataggctacagctagctaatataaaataaaatccacgctttttatatgcttaatttaaactctaattattaactctaataaaacctagtttaagtccacgtataatttcaactgatattcaataactaataatttatatatttgttgcaatctctgtaagactatcggttaggttaatcattcaaagatatcttcgtttcataaaacaagaaaaaaacaaaaaaaaacaaattttcaaaaagaaaaaaatctatttgaggagaaaaatagctgtgagagagaaagctaaagaggcgacgtaccacccacctaaccacaaccagatccccaaaagacagagaactttctcgatacgaacgccaaagagaagaagacgaagacgaagatgatgggtgtgttgaagtcggcgattggggatatgttgatgaccttctcttgggttgtcctctccgctacctttggaattcagacggcggcgattatctccgccggtgattttcaggcaatcacttgggctccgttggtgattttgacgtcgttgattttcgtctacgtctcgatcttcaccgttatcttcggtagcgctagcttcaatcctaccggaagcgctgccttttatgtcgccggtgtccccggagatactcttttctccttggcgattagattacctgctcaggttttctaaagatccaaacttttttctgaatttttaaacttttttcagcttactgttttgggtttacttggtttctatcaatatttgtgatctgtgatagtttctttcaaatgggtataggcttgtgtttgtctgcgaattagaatctagttttgtctgcgaattagaatctagttttgcatgaatcattgaatccaaagctatgtagtatatgcttttcccgtgatttgtccccacttgtatgccccattttagattagttgagtagaattcgacttttttggtacatatgagtctgatcttctgtttttcgtatattctcacctttgatctgtttagtatagttatactcaggtttgatatttcttggaaagaagaacacacagaatcagattctcttttgtttttgatgtttgtttttttgttgatgtatgtgtttcccacttaatttaaagtaggaaaacgaaaccttatctttctcgtcgatatgtctttgtgttttctttagccttttctagagtttcttgcgtgtccatgtgtttctgtgtactacaataacataaatagatagaaagactgttaaatttggtaacctgatttagcaaggagtaatttgtactctttttgagagttgaatcaagccagatgactttattgcctttggtaggaatagtcttcatgatcccttttttgccactgtttcttgatttcgacgggataatgtttgaaaggagatgtgatatattatatctgttattccaggcaattggtgctgcaggaggtgcattggcgatcatggagttcataccagagaaatacaagcatatgattggaggtccttctcttcaggttgatgtgcacactggagctattgctgaaacgatcttaagttttggtattacctttgcggttttgctaattatcctcaggggtccacggagattgcttgctaagacgttcttgcttgctcttgcaaccatctcatttgttgtcgccggatctaaatacactggaccagccatgaatcctgccattgtaagtatacatttcttgcttgctctttcagatgttctatactaagaagagattgaccccgaataagtcacctgataaattacagaagcaactttatgtttttgggccatatattcacatcattccaacactcttaaacccgagaattatgattgtatcttcaaagatagatgattaatcaatatctctcttgtgtttgcaatgcaggcgtttggatgggcatacatgtacagctcccacaacacatgggaccatatctacgtctactggatcagttctttcgtaggagcattatctgctgcattgcttttccgttctatcttcccgccacctcggccccagaagaagaaacaaaagaaagcctgaggaaaataaaacaattgggagaataccggtcagattcttcaccggtttgggctgtagaaagattcacaaagctgttccattctaaaataaggagaccaacaacaacaaaaagtcaaaagtctccttgtcattgtttagatccacacgcttattttacagatttgtgcgacgtaacttttctcttttatgttcataaatcattcagactctcttccggtttagaaacatttatgattacatggctggtttagtttggtttattatcggttcactctctattctggttctgatttctgacaacaaatcaaaggcaaaagttgtggatttccatccacaaaatttgggaattgggcctcaaaatttctttccaagggtggaagaaatctcaagcgagatctttcgacatttggtagtgttactgcgaaaaggaattgggcctggctaaggcccaactgtatactcttgctgaggcctgaccataaaagaagaagttatttacaaattaaatcagccaaacatgttggaccaggactcaccaactgtatataaagcctaacaacattttctccaaactgtaaatagatcaagactctgctgtgttgcaattttgttcccagtttcggtctacagttaaaaactactgattccctttgccataagagtgatcctaattaaactgattgagtaactcttaaaatggtggtggtgtgttttcagggatgtgaagacaactgatagtggaaatgcttcaagctgcgaagtctgttgtttccaactaagattaagaaaatggttccattctcaaataaggagaacaaaaaaggaataaaaaataatgtctgttacctctatcacactcttctctgctagtttcggtttagtaacgtctagattatcaatgtctggtttagtttggttctttccggtatgttcctaattttggtaggatttgtttggcttggttttatagcaagtatttaattaacattagctcaaattgcccttaatttattgaattttgttaaaaagttttgtctaaactttacactaaaatcagcttttcgtggatgttacccatttctcttccgtaatcgttaaattatgacataacgtctttgttttggtcgtatcgttcacgcaaaacttcacgattcagatctgtgtgtggcagaatttgaatcgaagcataggatcaatccggtaagcagccgtaacttgcaatcgatcgccgatctggatccgttaaaggatccctcgcagtccttgaagatatcggcgtcctccgccaccgggaacaggatccgttaccgttcaccttccgcttctgagctattggagtctggactagccaccggattatccggtaaccattctcctacttccgactctcatcagggacttgtgtctatcgacggaggaaaaatgacggcgaagcgagcgatcggacggcacgaatcccttgctgacaaggtccatcgacatcgtggtcttctacttgtgatttcgatccccattgtgttgatagctcttgtgcttctgttaatgccggggacgtcgacgtccgtctctgtcatcgagtacacgatgaaaaaccacgagggaggttccaattcgaggggtccgaagaattacgctgtgatttttgatgctggaagttctggaagccgtgtgcatgtttactgtttcgatcagaatttggatcttgttcctttggagaatgagctcgagctcttcttacaggtattcattgcatttcttttgctcttctgaagtgttgttttttctgataatggaaccttgcctcaggctcatgaacgaactctcgttagcaaatgctagatcaatgttaagctaatatttgattcggttattcggtattcaagtttgttaccaatgatgcaattgtcttagttaagtttctatttttagtttataaccgcatggggctctgtttctatagtttcttcaaattgaagttgtgtggatttttctcacaaatgggttaaaaaacttcacttatgtacttccaacgataaacttaaaagggacgatattagattcccgtgttcattgtgctttgctgcaatgtttattttgcatttggtggtatttctagctcgcagaaatctttttgtctgaacttttattgtgatattatttcagctaaaaccgggtttaagtgcatatcctaatgatcctcggcaatcagcaaactctttagtaactcttctggacaaagcagaagcttccgttccccgtgagttgcgtccaaagactcctgtcagagttggggtatgaaacgagttctttcacacaaagtcaagtaaagctactaatgtgttcattcattttcatgttaatgacctaactgttttgctttatatttttttcaggcaactgcaggtttgagagctttgggtcaccaagcctctgaaaacattttgcaagcggtaatattcgtgtatatgttttctaaagacattcgcctgcttgcctagcttgtaaacttaaatgtaattttgttttaaggttagggagctcctcaaaggtagaagtaggctgaagactgaggcaaatgcagtgactgttctggatggtactcaggaaggatcttatcagtgggtatgttgtagtttttccatcaattagagtcagattcatgttaaatccagttcggattttaaatctgttgtattatggttagacttttgtgcctgtatttgttgtatttctgtatgtctctttatcttaaacatgtagtcaagtaacaagttttaattttcatcaaacttcccattgttaaggtgacaattaattacttgctaaggactttgggaaagccgtactcggacacagttggagtggttgatcttggaggggggtcggttcaaatggcatatgctataccagaggaagatgctgcaactgcaccaaaaccagtagaaggcgaggattcttatgtcagagaaatgtatttgaagggacgaaagtatttcctctatgttcataggttggttatctgtcattgcttctgtactcattagatgttttctttgttctattttacatgctatacataaaactgtgtttgatgtatccttcaactttaacgcaatatcttatcggcttgctaattgcagctacctacattacgggttactggctgctcgggctgagattttgaaagtttctgaggactctaacaacccctgtatcgcgactggatatgctggtaagtaaaagctagaattgtggaacacgttggctatattctgaagttctagtacatattagaatgcacgttctgtttcctttaaatcgagtgattcgattcaggtacctacaaatatggaggaaaagcgtttaaagctgcagcttctccatccggtgcaagtctagatgagtgccggcgagtagctattaacgcactcaaagtcaataattcattgtgtacacacatgaaatgcacttttggtggagtatggaatggtggaggcggtggtggccagaagaaaatgtttgttgcatcatttttcttcgatcgagccgcagaggtaatatttgcatcacgttttatgtgacttcaccaaacacttacagaacatcattactcgcccactagtctttgagccatcactgacaataacatcaacgataatgacaggctggttttgttgacccaaaccaacctgtggctgaggttcgaccacttgactttgagaaagcggccaacaaagcttgtaacatgagaatggaagaagggaaatcgaagttcccacgtgtggaggaagataatcttccttacttgtgcttggatcttgtttaccaatatactcttctcgtcgatggattcggtatgttactctttcctatttttttccaactcactaatcaaaatctcagtttacatatatttctccgttggatgaccatgatgatggtaagtatacatgatggacatgcacataggaggaactggattgtgttagaattctgatagtgtagtgatgtatcattgtcattgaaagccatattgaaaatatgttagaaaccagatagagaactccttcctacttgaaaccttgcattgttcaagatgtattttgattttccaaattaaaaatctgtttaatctcaattttaattccaaaataaacaggattgaagccatcacagacaataacgttagtgaagaaggtgaaatacggagattacgccgtggaagctgcgtggccactaggaagcgccatagaagcagtatcctcaccatgaggaaggcaattttgggtatttgcactaaacctcttattcttttagtttctcccaaaatcaccccaagctttttttgccttacctcaaattttttttatcgtcaacatcttccttactatcaatttttgttacaataatcatctagagaaaagagtttcaattcttaatatacctataattttatttttcttgtaatctaaactgcttaccgcatacgtaacctctgtttctttcttataaaatattttccttgcgttttttttttcttttgacgactgagaatttgagattgtactctctccatgtagaatctttcctctctttctttttcttttcaaacctacaattattagggatttgattgattttattccgtaaacacatatttccccatgtgtatagtctatctcgaacccaaattaggccataatgtttccccttgaattctttgctgatgttatctgtagatcaaaagaaaaaataaaatgaaaaagtcgaagataagtgtatgcaaaatagacttaagagatgaggtttgaccagtcaaaggtattatagtttggaacttatacgttagatgagcggccctgtcatataaaactgaactactttgatttatgaccttttacacgcccacccatttctactctcatgtcaccaaattgacttaaatacataatattacttctcatcaacaacagaaagttcatgtaaacttacatcggatatagctttatatagactatgtggatataagattatttcgttcacactcaatctactgttggtttatttctaacaagcagaattcaacaaataaaacgtcataggattaatagtttgcgaaatgactaacgttagattgagtagccttgaatagcctattagcttctagtgtacattgaaggttcgattttttcaacatattgccaagtataacatgttagaatgaatttttgatacatgtgatgataaaaacttagggtaggaaaaaagaatagtttttcgtcttcgaggactttaaagtataagatgttgattggtgagtagttgcaagcttgacaagtgggtgttcaaatttcagtagaacaagtaagcgttcattgtatctaaccacacttattgagcagataaacaaaaatctaattttgttagatattttcttaatagaaggatccatacccatatctttatctttataaagtagaggaatataaagaaagaggaggaaataagtgctaaaagtacaaaataccattcctaaattacgtaaagagaccactattcaactaagttagtacccatcattcggttcattccataaacgaaaaagtaacctcaaaatataaaagtaaaaaggaaaaatgaagaaaatgatgtcaattaagatgagcactgatattagtaaatcaataatatgtatgtttagaaacttatagatatcaatatgtctaaattgaaaaaaagattacaaataaacagtactagtcgtagtaaataaaccaaatttgaagaaatcaaatatttaaatctcatataggaataatacaatgaaatgatccatatatcattttatcatcattttttgtttcagttcgaaaaaataaaataaaaccgttacattcaagtggataatctcaaaactttttatgaggagtgtggactttacttcattcttttggcatatgctatcttttatggtttgtcttattataaatttataatttttaaagtaggtttctttagattttggcgttttccaattttctacaactgtctatttctcattattattttatttacaacttacgactttagaacttcgaccaagacaagggacttcttctcaaaacatttcttgaacatccgaataaatattaaattctctatatttcataatgatcgaggtatatgtgctgaaatattaaaaaacaaggacaatattcactggtctatattcaaataactcgtctggtataactctttttcaaatcaacactagtattcgtcattgtagctgtaacgtatataaattataatttatttttatgttattcaaactaaactatccacagagtaactttttcctattagaaaacgattataagcatagatatgattcatttcaaatgaacatgctccacctataattctagctaggtgcaaaattgttgacatagacgaatcaaaagtcacacgtgtggttgcatgcacgttgactatataatcttccatgcttcttagtttattacaacgttttaattggttgattatatattttaatatttgaaggagacttttggagtttcttaactttgacaatcttagtataactacgtatgagaaactccatttcatacaaaccaaaccaaaaagtcacattttgatcaatttcttgccgagtgttttattcgagatgttttgaaagacttgccgtgtaacatgtatcctttacttacagttgcagtttttgtcataggtttccttctatgcgaactttttcataatcagtatatttaacgttgatgtcacattattcgactattaataaaactaatgaaactaatttaacaaaaaaaattaactacatatgcagtacaataaaaaactgttcataaatcttttaattcgttagcaatataaatagtgcacaaaaacttaaacaaaatcaactttttaaaacaattttttttttgtaaataattaaataataaaaaacagattgagtaattgacaaccatatatttttttctaaatagaagaaacttgtttttgaagtatcttttatacggtgaagggtgaactaaagttcaattattgttttaatctctctcttttttttttatcaaaaactattgttttgattgactgcacgattaccgaaatataaatagctggaaaagtaaataactgccacgtataaaaatgagaagaaatcaaaatcaagggtattttggcttagcgtgtggttagcgtgtgtgtgtgaatgccgatgtggcatgtcattttttttaagtagaaaaacttatctaaattatgtatgtataaataacataattctaggatatttaacttagtaaactgcgttttaaagaaaacgttaactagatcatgtgggtgtttatgattccacgtttgctcttctgagaagaaacaaattaaatgttttaatttggtttgcatcccagcaagaaacatatcaaattaagattagtttaatacttgcttcattagacaaaacacgttattacttataagttatactactaacattaatcaaaattattggtatttgattttgtcaacaaattattgttgatctttagcctttacacatttatttttatatatggatttgattcaaacttttgggttagttcttatctcatttaatccaatcagatctcggtttgtttttatgttttactttttgactcgatttattatttttcatgatttttttttgttctacatcacagcaaagatgagatacatatcttgttaagcatgatatatgtataactatgcagtatactttttgtttatgcatatacattaacaactgtgtaaaggattttatcattttaagttgttcttatccctttagtttatatttgagggaagaagaaaatcactttcatatgtttgatttctatttttgtacatactacctaatttcaccatttatgcatgataattgctatatatgctagaaaaacagggaaaattcaattaacctaacaaaattggaaaagttcataaatcagataaagcagcgagcatcgcattcaaaacaatacgttaggctgtgcgtactgttttattaattttaatttctttacaaaaattgaagataaataactcaaaaacaaaaaacagaagtgaatttacagtctcatgatcttattttacattatatatacgaatatgcattatgctatagttcttctattcaagttttctcgaaatttttcactcagaaaaaggatacaataaactaggactatagtatgatgattgcgtcatcagccgcatctgggcttacgtggatatggttaggacaaaagtaaaactaaccaatcagatgtcatcccagaggacacagctgtctcatttgggtccacttctctaacaaaacttcttcaattattcacacacaatacaatgacacatataaacaatttaaataatttattaaatattgaaacggaaattttgtgttcatacttaggttcttactatgttattgtattttttggaaaagcttgaggactatttctcataagtatataaattttttgtactcaaaatttcggattcaatccctagaaatacatttatcaaacaaatccaatttgagttttatttacaaatacaaatttgcaatttaatatgacatgggtctcagactttacaaaataataaagtctagatactacgaactcgttcgtaattagcaatatatatatatatatatatatatatttttccacttagcaatctttgttttgaatgtataaacaatgaagcctttacataaaaagtctaattagacataaataatgcatttaatattaggagaatatatagactacgtgcacaaaacgaccaaaattgagtaagatattaataagaaatatataaattatatattcaagtttctgttcataaaacatgcttgagtttcgatgacgatatttgctagtttctccataaagttctaataagttttttaaaaaggttcttttatttggttgaagatattaatactaactgattttatttactttttatccactacttgacactattttggatcttttcctccggtctactttacagaaaataatattctatatttttcataaatatttcaatctcaattttctttaaaaaattatacattcaagcactaaacgacagaactctacacaccataaattgccctcaaaacctgctctacgaaaaatttcaatctttggctcacttctttgtttatctcatagctcttcaccaaaaccaatattttctcctttgttgttctttcttttctatcaaaactttctacttaaaatatcattcctttaaacaatgataagcaaggatccaagatcgagtttacctccagggtttcgatttcatccaacagatgaagaactcattctccattacctaaggaagaaagtttcctcttccccagtcccgctttcgattatcgccgatgtcgatatctacaaatccgatccatgggatttaccaggtaactaaccaatatattttcccttttatctttgtatatatatattctactttttataagtgatataactatgtttatatatttgtatcatcagctaaggctccatttggggagaaagagtggtattttttcagtccgagggataggaaatatccaaacggagcaagaccaaacagagcagctgcgtctggatattggaaagcaaccggaacagataaattgattgcggtaccaaatggtgaagggtttcatgaaaacattggtataaaaaaagctcttgtgttttatagaggaaagcctccaaaaggtgttaaaaccaattggatcatgcatgaatatcgtcttgccgattcattatctcccaaaagaattaactcttctaggagcggtggtagcgaagttaataataattttggagataggaattctaaagaatattcgatgagagtaagtttttgctactactaaagatatagactattattatggtgatttcagtttcaaaatttgtatttttggtatcgccaactattttaaccggaaggcataaaccggttattagagggctggaataaaccattatttatctctttggttttcacaatcgccacttactttgattgttttattattttgccccaatacttatggtttttatattccttaatttcatgcagctggatgattgggttctttgccggatttacaagaaatcacacgcttcattgtcatcacctgatgttgctttggtcacaagcaatcaagagcatgaggaaaatgacaacgaaccattcgtagaccgcggaacctttttgccaaatttgcaaaatgatcaaccccttaaacgccagaagtcttcttgttcgttctcaaacttactagacgctacagatttgacgtttctcgcaaattttctaaacgaaaccccggaaaatcgttctgaatcagatttttctttcatgattggcaatttctctaatcctgacatttacggaaaccattacttggatcagaagttaccgcagttgagctctcccacttcagagacaagcggcatcggaagcaaaagagagagagtggattttgcggaagaaacgataaacgcttcgaagaagatgatgaacacatatagttacaataatagtatagatcaaatggatcatagtatgatgcaacaacctagtttcctgaaccaggaactcatgatgagttctcaccttcaatatcaaggctagagagaatattaatttgaaaacctaatcacgaattagggatcattcggtatgtgattgaaaagtaggagtcgttgttagtaatttaccaaactattgtgggaaaaaaagaaggaaagatatttattttatagaatattatggttcaatttctcttcttctcattttctttaaaacaatttttcatattataaagtttcgtaacgatactataattaaatgataataataaagattagtacaatttagttggacggtttacgattgcgcggtctcgtaaatccacgtggagactaatcccagttattctctatttcgtagccctagaaagatcatcttcatagtagttacttacttgcacacaacgaattggtgagtcatccgttttttgttttgtcgtcaattggtgaatcatcttattcggctttgtatcatgctaactcacaagtgtgaaagataaataaatggacataaacggctcatttaatataaaggcccatttagtatcaaagcccatttagcatcaaacaagtcggttatcttatctagaatgattctaaaccgcgttgtggtggaatctggtgtgaatccattgtgcttagtacactaaacaagtcggttatcgttatttagtaacaattaacacgtatctattattatcataccgcgttaatcagtttattattttggtgtatgttaaaactccaagggatatttcgtaaaaattagtatactcattttatttttttcgtaaaggtatactcacaactatatgttaatcttatttatatactcagaagtactgttttttctttgaaactttagataattaacaaaaaaaatgtaagtatgtaacaatagagtaatctttaaaattatatattttgttttgcaaattacgatgaatcagttataactactactagtgagcttaaaatttcgagaaaatttgcatttcatttagatacttttccagaaatagtacatgacaagagatttcttaagttgatgattgctaagagcaccattattgatagttgcttaggttaattcttagaaaagtttggttatgaatttaatgtttttaatcatatatttgttaagagagtctcttatataagagacaaattgaagttttcttagtctttgtttcagaaattttaaaattaattcataaaaaattctaagaactaagttaagagtaatctaagacactagcaataatgatgctctaaggcttcttagggaagccagactttgtgtttcatttctttctgcattattgtgggatcatttagacacgtacgttgaaattctacggtagaatatggtagcaaccccaaattatatctccatcatagtaacgacagctaattataagcacatattttttcgaagagaatcttatgggttcctttcacaacacaaagtttttatcctcatccgattcacaaatttggtcgaaattctatccgaacaattgtctgaactttctcgtaagtcttcatttttgtatgcaaaattcattattaaaaccagttattttatttttaaaaaatcccctctaaatttcgatccaaatgtttgtgtgtgtctgttttgtaacgacggagcaatttcaccgaaccttgataaagtcgtttgtaatagtagtattcgcttaatctacaatttgttttaagtcatcttgacgactttgattcattaacaaaatatcaaattaactaaataaactagtagtattaattaatctttcataggtgctgaaaattcaagaacgaaacacaaattacgtgatgacgtgagtactatttctattactgccatcattcgctattttttttgtttgtttttctttttcactttctctttcatgttaacgttaattatagttttgtaaaatcatatatacagacaaaacaaacgagactatgcttacgacatcatcatatgttggttggaaaaagcatatgtaaattaaagttcacactgattaaaaagattacacatacattagctgctgctgcactcagtaaaatattaatacttcagttttttaaatgaatagaaagtttataaatgatgtgtttggagattatagaaaactttataattagttttgagagactgtccaatctttcgtggcagattctaaatactgtgcaacactaaattttgagaacagtccaacgcttaactcctctatgttaagaaaatatgcttcttctttttttttgtaatttttagaaacgaattaagacaaattaaattaaataaattttgtctgaggctgattaaaaatattatcttgaatatcgaggtgacgcgagccggccaaatcgttactattttttttctaaaattcaatgatatatacaccaaatgggtatactagtgtccaaaactagagatttgttcgatttattaattagctttattgagaagtccatctgattatatagtatacggccccctcaagccaaaataaaataaaattatatgaccccttagtgcatgatactaattatttcagtcaataggtatacgtggacctcttgatacattttgatcttatatataaattttgaagattagtgagtatactgtccagctaattaataagtgtatagtataaatgttctgagaccaacataattgtaaatcactaaaaacaacaatagaagccacatatataatctttcgattaattatatatatatatatatatatatatatatatatgtttccaacaccttgtctctaccgcttatctttgtacattgaactcagattattgtttggatattaaaaactccaatatttatgggataaataaatatggctacttgatggttaggttaggccaataatttagaatggcaccaatagccaatagtaatgttgacatcctaaataaatagttgcagatgcaactgaaataatctgccttagatttaagaaagatataattgaagtctatattttatttagctatatatactatatagttataataagtcgacccacttgattccgaaggctacaatactactacttaaattaatatttagtgggattaacttacaagatttccaatacacacataaatattaaacttttaaatccacatatatctgcgtaattgtgtataagtggtggtagccattactttgaaaaagggtgaatgacatcatcatcatcatcatcatcatcatcatcatcatcatcatcatcatcacagcataaaatttataattaatggaagctgctgatgataatcaaatagctcaaacagaatgtgttacttttgtgattttgtaatggttccaagttttattttgtcatgcttttcgtatagtctaattaaaaataactttaaaactgatttgcagatgaggacagtgagtttgtatgttaatgttattgacagttaaaaggcctgggctgggtccacataccccaataagggagatgatgatgatgccataatttacgtcagattacgtcattcaatccttcgctttaaagtattgctttttgaagcaaaagtcaactttcttaaactacagtattagagcatttccatcgattacaattttgagagtttctctttactaaaataatataaataattcataaaggaggagagagaataacataactaaaaataattaaaaaaacgtttatgtagagagaaattttgtagtaatcattgagaaactatttgcataagtgactgtttataattagataattgaaaaaataaaaaaataatttaattagaaaattaagttataataaaatattacaatttaactcgccaaaaatatacgaatttaatacaaatatataaatggagaaacttcggctacataaaaataagaacagtgtacttttaaattctataatctccacaacttgcggtccacattatttttttgtaatatcaatttttatttttatacagttttctattgatggacatatacaataataaaggtgatattggaacttgtttaggaagtcgatcggtaagaaaataaaaagtcggtcaataatatgaatagaccaaatcgtgattgcattagaaagcaggagttaattgtttttgaaaatgatgaattaagtcggtgagttgctgcaaatactattattgactgactttttctataatatcggaaatagtacaatttaggagtttaattgttaaaatacgtacatatgaataattaattatgttaatcttcttgcagaccaccagctcgaaccatatgtgagttttgaacatgatattagttcaaataataagggattcagtaactaaattaaattgaattttgattacgattatcagtgcgttcatctagtaaatcaaataatatgatattttggaaattactatccattattttttatatgtaaatacccagacaattggaatgtaatggacaatatagacaaatagacagttaagttagttggagtttaggcgtcatatcgttgaaactttttatatatagcacccagagaattttattctaattttttttaataattaccaactatctttattggcacaaaccccaactagtagtcatcatatccagaaaacccaacgtgtattttcgctcattaaatccccaacttttaatatactcccttcgataaatactgaatttatatttatcgtattgtttgttcagtttcataggcaatgagccaatgactcgaaagtcagataatttatgaattgtagaaattgttgataataggactaaatttttaaaaatctacagcggcagtttataattgacaatcatgtttttcatttgaaatatggacagtcatctgagaatatttttgtgttcaatcagcacaaatatacaaattttaatctataatttcaaaaattaaattaggacgctttgatttggtattttttcctagttaatctttgcaggcggtggtttctttgacctttttattaaacacatgattatgccgacattaataaaaaaaagagagaatatgttcttattacggtgaatttactcattgaaactatgacttcaaaaatataatattataataagttatagtatatatgttcttattacttatggtatatataaaagttaacattgatatttaactctgtttaaatataagtataatttgatcattgtgttttgacataatatttttctccattgatatgaattctaaaataataaacatatatttatttatataccaataataaaattgaagattacgtcacactaccaccaattggttgataatttacactattttattccttcagcttaactggtaaggttaagaaacacaccacaaatggttgctaaactcttagggtcgtttgataaatgtctaatcaagctacaaagtacgatcacatatataatttagattatatatattatccattaaaccacatccaaataaatatccgaactgagaactcattgaaccacacccataggcatagctatatgtactgcatatcaattttatgtgatcgattttatcatttactctcgtatataaaccttcatagaaacttaaaatttcaagtttaacaaaatgaacattaacatacaaattcttttgaggttttcattagggattcctttcagtaggataataaaattaaatagtaataaaattttaaaagggacatattttcaacaatatgggtccacataacacgaagaggagccaaaccttttaacacttttgagtggtatattttccttcaaacgttttttctgccatacgactctttattttctttccaaaagaggttattttcaaaaggtagatgaaggtcatgtggctatcgaacccatttttttctggtggttggctaaggaaccccataagatgactatactgacatagtcctatgtaatgtacaaggaaaaaataaactaaccctcatatggaacataaaattattcgacagacgtgtcaccctatggatctaaaatttaatggtaggatctaaaatctaaaatatgaaaatttgtggaaaattccataaccatcccaataaattaattgttacatatagcaatattttattaattaaaatacagtttttatttgacactaagaagaaaaataatatttagcttatcttgaattatatatataaattgcttattaccctgaatttcatacagatatgagatatcatttaagatatttttgagtgttttctaattgtggggctttttcaacaagtaaggaagttgcttagagcttacgtgtctcttctacatcaccaaaaaaataagaaaaaaacaaaacataaagaaaagaaacattattgttttttttagctcttatcttcctctatataaagacattttttttctaccttcacatacttttattttcatttcctttaactgcatagttcttcctcaaattgctcatacctttgcttctctttctttctttattcaacctcttatttcttcttcagcaccaacgtgtatctgcagtaaacacatatccatcgatcgatctcctcaaaaagttattgttttcttgaaggatttttcttgttcttgatcaagcatacatatatatagatggtggaagaaggcggcgtagttgtgaatcaaggaggagatcaggaggtggtggatttgcctccggggtttcggtttcaccctactgatgaagagataataactcactacctcaaagagaaggtcttcaacatccgatttaccgcggcagcgattggtcaagccgacctcaacaagaacgagccatgggatctaccaagtaagtcaagtcaagatcgttttttattttgaccatttcaaacatcatcatcgatcaagattctgattcttgatttgagtgcagagattgcaaagatgggggagaaggagttttactttttctgccagagggatcggaagtatccgaccgggatgaggacgaaccgtgcgaccgtgtctggttattggaaggcgaccgggaaggacaaggagatctttagaggcaaaggttgtcttgttgggatgaagaaaacacttgttttctatacaggaagagctcctaaaggtgaaaagaccaattgggttatgcatgaatatcgtcttgatggaaaatattcttatcataacctccccaaaaccgcaagggtatgtcaaagtttaccactctttttgcaaaaatatgattcggtttaataaaatagatccgagtttgatgcatacaaaatttgtttgttgagaaatgtttatctatagttcgttttttttatatatgccttagttcaagaataatccaaaacatgaaacttaattaggaacttaattaattagtaatctaaatgctaaatttttttttgtttgtgtgatggttataggatgaatgggtggtgtgtagggtttttcacaagaacgctcctagtactacaatcactactacaaaacaactctcaaggattgattctcttgataacattgatcatctcttagacttctcatctctccctcctctcatagatccgggtttcttgggtcaacccggcccaagcttctccggtgcccgtcaacaacacgatctcaaacctgttctccaccatcctacaaccgcaccagtcgacaacacttaccttcctacccaagctctcaatttcccttaccactcggtccataattccggatctgatttcggctacggggcaggttcaggcaataataacaaaggtatgatcaagttggagcattctcttgtgagtgtgtctcaagaaaccggtttgagttccgatgtgaacacaaccgcaacgccagagatatcttcttatccaatgatgatgaatccggcaatgatggatggtagcaagtcagcgtgtgatggtcttgatgacttgatcttctgggaagatttatatactagctaaatttgggaaaaggttatttgttaattgtgattgaagagtggcatattgattactcgtctagtgtttttaatcgtgtaattagttcgtatataatatacatgtacataagatcattaggtttattaggcattggactttagttcggtgattgcttacctagtttttagcttgagaaaaaaggctgtcattggggttatgtttctttgtgattaacttgtacatatatacatttaaattattcgtatggtttatttcgtttaaattagtctctcattaatcttctaatgaaatgcaataacacatatatatgtatacttaatggtcaccgattcttggtcaacattaacaagacaagatagtgattaattagtgaatcttttgtcatttatatatcaaactctttttctaatgccggggtcttttctatgagttgggaaattccggttcgaaacgcgagactcctgcatgctcatgcatagtatggttcctttgtaaaatctcaagtaacgagcaataagttatactatatcacttctcgagcaataactataagtaatatgaaaatttggcatctcagtatcttaggttatgttgttaacttgttattaatttgtacgattacgttttttttgtttttttcattcagtacataaaatggaaaatattgacctatataatctgaataaaatgaacacagctcacgaaacatgtgatttgttccctgaatctgaagccttttcatatggctaataaattagtttattaagacacaaattaattaaataacttaaatttttgagaaagattctaagtaagggcagtaattaaagatgggtttcttgtaaaaacaaactccagatccctaagccttctgtcttaagaagcttagttattacactcaatgacattacgttttcttacttaatttttcaacaaacattatagtataagcttaattagtttttaagaattcacacggaatattagtactataagcttaattatatattagtaaactcagtgattgcaagaattaaaaaaacaatatgctcactataatgtagatgcagctaatggactcatgattgcagtttaattactagaaatgtcaaatcaaatagtatataatttcaagtataatgttgaataccaaactcgatttttttctacatatcttaagctagttcaacatctttagaaagacatttttatatagttcgtctactttgaaagatcactccaaaagtaatgatagaaaatggatgattatattgataatgcacattattataagaaactttctatttaaagcaaagctttaagatgaatacttgcagcaaagctaaccgcttctttccatttttcggtttctagatgatttgctaatttcccatcttttcttctcttttttcattatactattactatgtatgtagtagacctacacccacaaaaaatacattttaaatgcctaaattgtgcatgaaataaatggacggtctcactcaccattcaccaaccaataatttgcctcgatcatattaattattcctcggtaacgaaaatgtcaaccggatccagcaacctcgttatcggtggcagaaatttctttgcgttaattggttttcagtttttcgaatcaagctgccgacaatagaaaataagcccatgggcttttatgagcccatataaaatgactttcccatgtattttaaaatagtatataattgaaattttgagggtaagatcacaattaataaaagtttcattagtgttgttgattaaaataaataaatgattaaaattattgattcgtatctttcatgtcaaatctttaaagattaaaaatatgattagcttgattaaaagaagaaaatattaacgaagtaaaacaaaattattgattcgtctctcagataatatttaaaaatgtcggaaacttttaaataatgcgataaaaaaaaacaattgtctaaatcaataaaacccaacaaaaaataaattctaaactgttgacaaaaattaactttctcagaaatccaaaattgatccctcaaaaacatgaaacttcaaaattgaccacgtatcaaaacaagaatattctactccacgttcaaaatcttgacaacagaggagccatcgatcttgtgcaacgccacaatcgagtctcctgtcttacatattcccttcttcttcgcgaattcaatggcgaattgaatcgtctcctccgtcgagtccttgttcgaagacctagcggatgctcccgtcgccatcacaggaacaattccacggtagatcaaaccacgtcttgccacatgagccgcagattcagagcacgaccactcgaaatcatccgtacgagtaatctccggcacaattacggacagaatcggaacactaggcctgtacttggccacaagctccaccgtgtaacctcccttggttagaacgacaatcgcagccgcacaaagactcctcgccgtcgaaacggctgaagcggccaagctctcaataggagataaaggcaacgaaacgatatcttgaatcttcttgtgcattgtgtcgtaatcgatgaaatcctctgcttccttacagattcttgacattgttagcacggcggtttcagggtgagctccggcggcggtttctccactgagcatgacgcaatcagtgccgtcaaggacagcgttagctacatcggtggcttctgctctagttggacgaggagatttggtcattgactcaagcatctgtgtggctgtgacgattggcttcccaagagcattagccttctgaatcatcatcttctgagcaagaaacatcttttcaatcggaatctccattcctaaatcacctctagccaccatgaatgcatcagaatattccagaatcttgtcaaaattcatcactccttcttgattctccacctgtaatgagcatcacaaagttagtatataactaagaaatcaaatttcacttaaaaaaaaaaaatgtgttctgttttttaactcttacctttgacatgagcatgatactctttgcgttctctccaagcaacttcctgacctcgaccagatcagatcctttacgaacaaaggaaagagcgatgatatcgatcttattcggaactccccattggagaatatcctcttgatccttctctgtgagtgttggaagatcaactacgattccagggaggttcacgttctttctttctccaagaactgcagagttctcgcaacgggcacgaacaagaccgagattcttgtcacaagacaagacggtaagagagattgtaccgtcggaacagagaatcacgtcaccggacttgagatcttcagcaagtttcttgtaactcattgagattgtgtttgaatctccttccatggtgtaatcagttgagattgtaatctcttgaccttgaattagctcaaccggtttgccttctttgagaaacccggttcggatctcaggaccctataaaccagaaaagattaaaccgagttagattatgtccctagaccctaatagaatcttaaaacaacataaggagaagttgaaaagacggttcaaaattaggttaccttggtgtcgagcatgacggcacagggaatacaagtgttctccatggcggttctgagattgtcaagagtttcttgatggtatgagtgagaaccatgggagaagttgaaccgggctacgttcataccggctttgagaagctt

SEQ ID NO: 1268 - DNA, 71616 bp, Arabidopsis thaliana
tcctctgtttcaggttcacctggttcatgggttacaataactcccattgctctgtaaccaaccggaggattaggtagccagaaataaccaccaccatttttctctgaatctgcactccaaactaaagaataactcacaggctttttcaagggcgggaaatcatcagcattgacggctttgctagtccgagctgcaagtacataacctctcaagggctgatcggttggctggcaatagtgaccaaggcaatggaatccttctggaatgtcatcggctctgtaaaatgtagcacgttttgatttgtcgtgtgatgaatcagagctccaaactcgatggaacttggtgattttcaccacttctatttctcctaggctaattcttcctgtggcaaaacctttacctgcaaagagattgacagtaacagaaaagtacatcactttcagcatcaaagaactaaaaacacttctatatagaacaattgatagattgaaacagtaaaacaagaaggcgcttagcttgatgcattcaaaagtacaaattcatcagcttcaaattcattaccaataccgagatttatttccatcaaacaaaacttaagtttttgtcccatagaagagtattaaataacatgataccatatccatctactcttcaacacatttaagatagagcctttttttctatgatcagagagacaacattatcattgcttacattattgagccaataaaacttaacaaaaccaatcatatctaattatagcaaaaatagaaagtctctttaaggcttgaaattaacttgtgtatacaaaaatcttgaatcagagtcaaccaaagaagaatgaacaagacaagtagacaacggaacaacccatgcagaatattccaaagcatcttcctcagtctaccctttcaaatttcaataaaccagaaattaattctctctctaaacaattatataaaattaagccaaacaattagataagattgtcattaaccaaggaaggatccataaataattaaccttatcttatgtacgcatgaaagataaagtatcgatattataacttgtcagctcaattatttgattagaccaagcctagctgaaaaactcaattccatatacagaatcttgcaacttcaatttgaaattatagataaattagcaatttccagtaaagaaagttttttgtaccttgcggccaactaggaagaggagccggaagtgagaagggctttggctcggacgattccgaatccaactcggagattcctctgctccagtaaaaacaatcacacccaaacatcttgaagaaatacaagatttttctccagaatttggaaattaatagagaccccccaaaacccacgagctgatttcgagtgggtgaggtttagattcttcgattacagagaaatcagccgattgttcctccgggaactgggaaaatcaccgtttcctatgcccctctctctctatctctgtgccctctctctctacctcaatttgagagaaatttgaaaagcagagagcttacgactatctcgacattcacggcgaagagatagagaggcgttgaagttgtaattgcgtaagaaagaggagaaggttgatgatgaagttatggtgtgttaatgcgtttctcaaaaagctctcttttcttttccctttctttaaaagcttttcacaataaccccagtattatacaaatattcaaattagtccatttaccagaaatgtaacgggaaagtttattcatacgttttaacctcaatactttcaaatctgtatggtttaacccatcatcaaacgttttacaccaccaaaagaaaccaaaaataagtaaacattttctcttatctcaagtcgcagaatgactaaacgtttcgtctacagcactaagatttactactttattgttattatatctcttctttgtgctgtctccttctccgccgcttccaccgccacatgttatcgaaatctcacatccaaacacgtttccaaaacatgaaaacaaccctttcttaccctctcctccaccgtttctcctcccttgttgtttctcctttcttctcctcctccttcttctccttcccgctcctcctttcccgctagaatcatcgcttgatccagccgctccacccgctccacccgtgccatttttctctgctctccaccgttcaactctatgctcaattccctctgttttcccttcaagtatcgaacttgcgtcctctttgttagccgctttaaccgctgttttctgtctattgtaaagcccttgcgcaatcgcagccgcaaccacagacgctgatggtccaatatcagagctacaaagcgaaccattaaccatactatccgcaccaacaacaataccgccaccaccaccacctcctcctccattgccagtaacaacccctgttttcacaccgtaatcattcgtagacgtggttaaatccgtttgatcgctattcgtacggcgatgcatcattcttgaagcctcttggtctcttttaacactattcctctctccttttcgacttccatcgaaaacctcaatagataaaggcatactccgttgaccaccgtcaagaagtgcaacaccgagacgtaaaaacccttgtagcctccctgaaggacgacgaatctgaagagtcacaagcctcatgttgttattcccaccaccaccgtcgttaccatcaccaaaaccagaccaaggagcaaaaagatcgctgagaagaacattcacagtaccaacaagagcatctttagcccaagccgctgcgtagatctcaatcacaatcgctgatgcgtcaacgtagagaatcttgtcgttgacacgaaacacaaacttctcgttccatatagggttagctctgttggattgatcaacacgcgtggtgagttttctcataggatcggtgttgatccaagcgacggaatacgttttcatgtttcttgagacaggggctaagtcttgagctgagattaaattgatctcaagaaccggacatgcgaacttgagccgacccatattttttttgtgtggtttttaaaatctaaatggattcgtttaatcttcgcaagaagcgggagaccttgttttggtcactcgtctccgtgagaatgattatacgatcagttgttgagaggagaatgagaaggagaataaaaggagaggtaaagaggggagcgtaagatgaggaaggagcttgtggtttttagacatgataagaactagaccgttggtttatttactgtcatattcaacggaaaatttgttataaaagttggagactttatggagacagacattatttctttgactctttggtctatgttgatctaaatatttgtttgttaagagttttgacttgtatcggtgtaaagaaaaaaataaagatctagtcaaagagaatgaaactctgtcataacgaattaacgatatttacggaagaacaggggaatttctttttcttctagctctttgtatttttcttctgtaattttaggctttttatatatgtcagcgcttgtttttcttggcaaggcaattgagattcaagacatcatataaagcaacttgaaataaaagttacgataaatatttaaaatttgattggtcttactctaattccgactatttcgctctcacacaacaaaaaaaaaacataatttagggttgtttagaatttccagtgtatttttaatttaaatcttggttgaaaactatggaaatttgttaggtaaatttagttgagcggatatgtttgttagtttgttactgtctaagacttcatcgaaagcttttcttactttcaaattacatacatttacgtacattattattctcttacttcaaaccaacactagtagtattaaaagaattgaataagggttaggctaagaatcagacctccgctagtagccgaatgtcatttttaacatattttggatcagccagttccacaaattgtgaataatattactgtttcactatacataaaatcattagaaaattgttaaactaacctctaggatcatattcataccaacaagaagaaaagatcaagaaatcgttggtgtgcttagcacgtgcgcttgacgacctcctaagtcacaactaaatctttaacatatgtagacaagtggtagacatacgtagacaaaatctaatctaccacaacttccctctccattcaccaatgtatatattcaatgaattaaaaatatatctctcttccctgtagttttgactcaaacatggttgtccacttgatctctctcctcacacaaaccctagccctaatcattctgtctcttccctctatcatcaacacttctcaacttgattacgacactcttgttttcaaacaatgcgatccattggacgcaaacatcctccaaaaagcaacaacaaaatctccaaattactcgaatcagaatctctttcttcgtgcacaagccctttcttctttcttacgcaaactcgaatcagaatcctctcgatctaaattcttgaagactctagttggtaacgaaaaacacgctgtctctggatggttccaatgcagagaagattatccgagtgagatctgccataaatgtgttggtgatcttcgtgaaatttcgtctagatcgtgtggaaatgccacgtcagctcgtattcatcttcgaggatgtcatttgatatacaaattcgaacgtattgatacccctggcgctcgtaagtattcatctttgttgttgacaaaaaatcataaaatcgtgtacagaaaaaaatggttggaaaatttcttacttatttggtcttatagtaaaatttcttatacttttatcaaaaaatatattatttcttaggtatataaattttccactcgcgagaaaaattgaaggatagtgataaacaaattaagttgaattcacattaaagtaaacgattcattacgtaaaataaatatgattcttgttatttttggaagaagttaataatcatcacaagtacaagttatttgagaccccggaacacggtctcatccacaagatatgcgatggagctaccgcggagactttccccggattcgaagagatgaggacggaggcactcactgcagccgaaacaggagttgttgacggtcacggattctatgaggatagctacaagctcctccacgttgtggctcaatgcgacggccacgttgaagcttgcgattgcggcgagtgcataagttcagccgcggcagcagcagcagaagagtgtcggtggtccatagccggacaaatatacttagaagggtgccacgtcggttatacatatcacccacatgaacttcccaatgattcataccacggtacgtacagttattaaagaaaactgaaccaaaacaaatatcagttgattatgtacttaagttgcgaattgtttcttttgacagaagaaggttcaaaagtaaacacggggaagtcgttggcgattgttgtaggaggagtagcggcattggtctttgttgctatcttttttatgttcctaaaaagcttgcggaaaaaaggagatggtaagttattactattagatttgatatcgttttactctatttttttttaatttgaaaacattataatgtagagacatgctaatataaacgaaacatgctaattataaacgaaaatattagaaacttataattatatagatcccatgtttatgaagttcttacacaaatgttctaactatttaattatgtacatacaaaattgaattgactaattaattatcctattgcagattgttgaagggtacatgatcagagagatgttgggaaaataattctgttccttgtatttgttctaccaaccaaggaaaacctccttctttccatttttcgattgtggaaataaaagtggtaggatacgtaattaatcatgtaactatttgccctaaaagttatataacatcctttaataactacgacgtttgctttaacaaaaaaaaaaaataactacagtacgacgtttgaagtaagaagattatatatttatgttttgtaacccccagaactaatacatatcacgttatagcccataacttttatttaattatgctgtgctttttagtcaatgggcctattttaatggacctacacaatcatggaaataaatctggaaataaatctgtccacgacggaaaaacaaaatctataaacaattgtatgtatactcacgcacgacgcagtgaaacagagatactgtggaaaagtgtgtttaaaatggatctgttttagggtatttatcaattcgaaaattgattaatttattaatttcgtaagctttcacagaaagttcgaactctttgcatgcaatcattcgccgtcttcttccacaattgtgttttttagccggcggcggctggattcgagaagcttccgattgttctgtatgatcagtctctccggactaaccagtaaggttttttgtttgtatgttacgcattctctttgcttttctcatgcattctcttttcttattgtgttgatcaatgtgggttcttactccgcgagttgcagaacggtttaagcttgaaattttgaaaaatgttggaatctgtctttgtcgatttgatgagatcgccgtttttgttttgtttggaattggcataaatctgtttttagggttcttgattggtgagatttttggatgattgttgataaggattgggtttattcaaaattcgcagatctttaaggatagctgatgcattgatgtgtctttactttggtgattagcagtttcatacatatgaaccagattatattttatcactagaaaactagtaatttggcattttttaccaattaagatatttagtgtgtatttgcaggttctgttgaaagtgatctcgatatgcaacaagcgatgctcaccaataaagacgagaaggtactcaaagctttagagagaacaaggcaattggatattcccgatgaaaagacaatgccagtgcttatgaagctcctagaagaggctggtggcaattggtcgtatataaagttggataactatactgcactggtcgacgctatttattctgttgaggatgagaataagcaaagtgaaggttcatctaatggtaatagagggaagaatcttaaggtcattgactctcctgctactctgaaaaaaacttacgaaacccgttctgcatcctcaggttcctccattcaggtagtccagaagcagccacagcttagtaatggtgatcgcaagaggaaatataaaagcagaattgctgacataactaaaggttcagagagcgttaaaatccctcttgtcgatgatgttgggagtgaagctgtgccaaagtttacttacatccctcacaacattgtttaccaaagtgcttatctccacgtgtctctggctcgaatctctgatgaagattgctgcgcaaactgcaaagggaactgtctttcagctgactttccttgcacttgtgctcgtgaaaccagtggagaatatgcttataccaaagaagggctgctaaaggaaaagtttctggacacctgtcttaagatgaaaaaggaaccagattcgttccctaaagtttactgcaaagactgccctttggagagagatcacgataagggcacatatggaaaatgtgatggacacttaatccgaaagttcatcaaggaatgctggagaaagtgtggatgtgatatgcagtgtggaaatcgagtagtacagagagggataaggtgccaactgcaggttacatttctaggatactacattcaatcttatatgctgaccatcctattttaaattagtcttctatatagcttcttggcttgatgtctggcaccctcataattttgaactatttctatgattttctccccgttttttttgaattattattttctcctttcatttgtttgacgagcaaaatatattgtttcaggtttactttactcaagaagggaaaggatggggtcttagaacactgcaagacttgcccaaaggaacctttatctgtgaatacattggtgaaatattgaccaacacggagttatacgatcggaatgttaggtctagtagtgaacgacatacatatcctgtaactctggatgcagactggggttctgaaaaggatctaaaagatgaagaagctctctgcctggatgccacaatctgtggaaatgtcgcaaggtttatcaatcacaggtattaatcaacgctcgttgtgctatgattttttcgtgcttcccttgagagtttatggttcttgtgaacttttgttgatgcagatgcgaggatgcaaacatgattgatattccgatagagatagagacgcctgacagacattattatcatgtaagtatctgttttctccactctaacctgatcttccggaaagcagtgattgtgaaagtaaatttcagtgagcttaaggagtctgggtttggtcatgtgcagattgctttttttaccctacgagacgtgaaggccatggatgagttgacatgggtaagcaccatgattaagctaccttagttttaactactttgtattgaccacatagttacaaatactcacatggctaaagaagttttgcgctcttactgtggatattgcactaaagctattagattagagcattctgatgattttgccattctagatctctggtgtgtttgtagatgacttcatcaatagagagatggaaccaaacacgtctttctactggtcccataacgttatcctctcttgagttgtacagatactcaattcaaaaaacctgtgtttctaatcgcaggattacatgatagacttcaatgataaaagtcatcctgtaaaggcatttagatgttgctgcggaagcgaatcatgcagagacagaaaaataaaaggtcagttttctttacacattgcttttgttgttcaaacctttgtgacagaatgctggcttacttccttcgtttgcttacacattctaagttagattttgtgtagtttcgtatgagatccgagccaaaaatatgatttggcaaagtacattgattcacagaaatgaaatgatgccaccaaaaaaagagaaactatatttcttggctaattatgcattccggtgatatgtcatgtcaggatctcaaggcaagtctatagagagaagaaagattgtttctgctaaaaaacaacaaggtgagaaagaatgtctaagatgatataaccttagaggcttagcatcaattatccctgcctaaagcttgagatcctttagaatttctctaaagtgtatgattcagtcgttgaggtaacaaccgccaattcttaaaatgcaggttccaaagaggtgtctaaaaagcgcaaatgagactggtcattatttagagttaaacattaaagaaagcatgagctcacaaaacactatgatccatcgcgagctctgcatgattcaactagcttttccttcttgatgacatatacaacttttatggtctgcagttttttctcatttacaatctcttctttaggtaaaaaaaagtgttatgttgcctaaccaaagaaactcactgtttagttctgttcttcaaatttcatggcatatgtcaaaataaataaaccttttttaatagagttctagagcgtaaagactggatcgaaaaggagcccatcactggtaaattcagccaagagtgatccatcgcatcaatgatttgtaatgttaaacaaaattttaatatttagacttagaagttgtaatttattggtttattttggtcatcatagaagaattatttacatattttatatttttatttatacattgttgctagtttttttggaactatcaaattttacattctttgtttttttttctccaagaagttactgatttgaagaaacctatatctttgtaatgttacatgtactggagactggaagttacttacatatatgactttgaccaacatttctattcggattaaacaaagtataatcctaggttcatcagttccaaatttgtttctaccaattcagaagtgcttcttcttatggttgcataccttgagaagagaaagggaatgttgtgagtaaagcatcttcttaaggtattttttagtttccaggtccgcaagtgagtaaagctcatggtttaatccatgtatgagctgcatctccccacttgagctcttcgaaagctaccctcagcgaatggtgttgaaattgtgtttagatgtaacaggctccaattttgctataatatgcttaacatcgtctaaaactgcaggaccatacatatcagagctcgcagaagcagcagtaggtgacgcattaggaacctattaagaggcaatcaaaacgacaagagagcaataaaagtttgtgaggcatttggaacctattaagagacgacaaaaatgataagagagaacaataacagttttgtcttggccaaagtccacagagtacatgtaaccgagttagaggtaccttgtatgtgcttgtttctgacacaaaaaccgaactaaggggaatgttaaaggccgctgcagcaacctttgtatgcatatccttaacccatttcaacacctccatgtgtcaccaaaacagtcccattggtgcaaacatgaacaagagcaccggaagtatcttaaaatccagattctagatttgcaagcaacggtagtgcaatgctgagatttccaaacaagctttatattattcttttaactttaaagtgaatcctttttctagcaaaatgaggacaaacttttaccaattttcacatttttagaaaaatattcaactcactttgatttcttaagggctcagctgaatctagttttcaatgtctgcagaacaaaatgaaaatgaaaattttattatctcaaaatccattctattttttttttgtgtgacattaatcaatgatttcaaaataaccaaaaacatacaaattttatgtttcattcttattattatcaatttatcatcctcatcctccctcagctcctgaaaactatgtcgttttggaaaatgacgaaaatacccttgtatctgtattgctatgtaaactactgttgtttcaacaaacataaaattttgaaaaagtaataataagaataaaataatttatttcataatctaaaaaaaaacgaataatctaatagattgaaggaggacttaataattagaacaaggttatataattagatatattctttttttttttaaggttatataattagatatattcgtttttttaaaaggttatagaataagatttcattgcatcttaaaaccagacaactttcagaactgaagaatgacgaaaaattaataatagaggaggagaggaggagctacatcaacattatttctattttttcagccaatcagagcgctccggacttcgcccactcgcaccaacctcgcgccacgcgctccattccatgcccactcgcaccaacctcgcgttgaacgcgtgtcgtcgatttctgtaggggtaaacccacaaaatcatgcctattttacatctactcgctttgtttccaaaacagcctcgagtgacttttttcttttgttttttttctcaaaaccgtattaattctaatgcaaaccgaaccaaaattaatttttatttcaaaaccatctaaaccaaacagaaatcacatgtaatttcaaacccgaaccgaaatcaattgtcatttcatcaaaaccatgtaaaaagcttctacgattgttttaacttgcaactgaaaatagcaatcctaatttatcaacagataaagatagatacatgcaacactttacttttttatttttggttttgagaagatgattacagttgtgattttggtggagacaaaaatgtccatctctgtatgttgctagccgatcaaattttacattcaaaatcctttttgataaaaaaaataaaaaaattcaaaatcctttatgatatattgggcctaagatgatttccaaaaaaaagatgatgagaaaagaaagagaacattattgggcttattgttaaattatttcggcccataaaataaagtccaggtcagctcacaatacatgaagaaaaccctagttcaagcgtatataaaccctctcggcgctgccattgaaactctttcaaggagagagctgctactctgcaaccatgtcgaagcgaggtaaaaaaacgtttcttcatctctaattcgcttaacctaatctgtgtacatctcgtatgaatcatatcctgttttcgcttattttcttcatttcactttcaatgacaatggttttaccctaatttctattagtaaagcttctggatcatgaatattagtcttatatgtctctactttggttgatagtgtttagatctgtaacttttgtgtttgttttttgtgaataggaagaggaggaacctctggtaacaagttcaggatgtcactgggtcttccagtggcagccactgtgaactgtgctgacaacaccggagctaagaacctttacatcatttcggttaaaggaatcaagggtcgtcttaaccgtttgccatcagcgtgtgttggtgatatggttatggctactgttaagaaaggtaagcctgatctccgtaagaaggtgcttcctgctgtcattgttaggcagaggaagccttggcgccgaaaggacggtgtcttcatgtatttcgaaggtaatcctttgcttttcttctctgtgatttgcatttcaatttctctgaagtgtgattgtctgatagaaagttttggttttgcagataatgctggtgtcattgtcaatcccaagggtgaaatgaaaggtaagaagttgatgtttttgcttatttgttattgaattctctggtagatgtatgagttgtttatgtatgcaagttttgataacctcctgatgagttagtagttactagaggaagtattgtgtatctgaatttatctagaagtttgatatggggcaactcaaagccaatctcgtagtgataaatcagtagtatcatatttacttgtagctgatgagtctgttgtgtgatgtaattaggatctgctatcactggaccaatcggaaaggagtgtgctgatctgtggccaagaatcgcaagtgctgcgaacgccatcgtttaagcaagcttgagatctctatgttttgtgttgaacgtttagcattatctctatttgggattgttttttgtttttgtcttagacttttgttatgccttaaagctgattctagttcttataagaaccttcgtttctcgtgccagtttgtcacctcagtgttttagtctatcgtaaacttgtgatttgattcactggttcttgtgtttgttcggttttgttttaaaaaacatagaattcaagtgattcacactattttgttacgcaattagaaatatgtttagggcgaatcaattgtgtgaacagacttaagtagagcctaaaaatttgtatataactcttatattagcaagtcaattgtggatttgggaatctgtttttcaatatttcatgaataataggaaaattgtgtatatatccgtcttctccctcctaccaaaagaacttgcataatagcaacaatggcgaaatacttctgatccctctttttctctccattttttttaaaactgaaactttattcactctcgaaaaatggtgaatccggtgggtttcagattccgtccgaccaaagaggagatcgtcgaccattacctccggccaacaaatttcgatggtgacacgagccatgtcgatgtaagtcattagcatagtcgagaatgctataccaagttggtttagtgggtttcttgatgtgcgtcaagatgctcaaatcgagaggatgctataccaagagaggaatgggaaacatggttgaatgatgatgataaacagaggaatatcatgtttatgcaagataatcgcaatgattacagacctccaaactcattaactggtgtcttcagtgattgtagcagtgatgataatgattctgatttactatctccaaaaacagtaagctaaattctactatgttcacctttataatcctctgtttcagatttcacctcacaaagctataatttcggttgatatcacagaattctattgaaactccaagcacttgggacagtcttgctggctcaaatcgtcagataggcctaatcaaaactcaacaatctcctgactcaacaatctagttagtgtcattaactcaagaggtgagatttattatttacttttacttttaatgctaatcatgttactttgttttcaccactcacaacattggaaccagattaaagaaattcaaattgttgattctttcaaaatattccaggtgagccaagctctgggtcaagggactgagatttgagagcataaattgggtcaagagaagatcaagaagaaaagagcaagtttcgtttacacgatgatacaaagattagtcaagaaaattcaccaatcttcttctatctcaagaacatgataacaatagatgagaccaagaacaccgtttagtacttttccaaatttgtagaaaagttatgtctctcttgttttgtaaccttgtgactgtgagtagtgagtactcttgtgatatagtgagtggttatagaagaacaagttgtatgaatgtcatgtctatctttttttgtaaattttccctattgtatgtgtgccccaatatataaaaccggtgaatttgtgatataatgagaagtggttcgagaagacaaagttggataatttcatttcatacactatacaactaataaaatggtcaagttttcattgacatagcaatcaacatcgagtctttttaagtcctacctaatacccccaaaagatttcaggttctcaacaagagaaagcaaggataatatcaaatgaagatgcttctattttagacttttagtctacatcttacgtgcagcatgtcacttttatgttttaagtccaaaccccattagactaagagaatattacgtgattagactctttaaaacactttaaatggagaagacactttagataaattattttacttatttaccctttaactacattttttccatcggtcatcttttctctctccttttcccatctcttctctctttttttctttttttttctcactttatcgaagaaaaaaacctttccgagagtatcttcaattccaaatctgcaattaatctccaaatccactcaacgcgatggctttctttaagattgttaatgggtaaataagtaaaagttctaataaggttaatctccgcaattttaatctccgcaattttaatctccgcaatctccgcaattttaaatggagaaggcactttaaataagcaaaataaatcacaatcttaaagaaaccaagacctcatattctccaattaatcaagagagaagaactttggtttctttacaaaccacggttaattgaatctcttgttattatggacatcgtatatagaatgaatatgaatcagtaaaaagttttctgaatgaatatatttaaatggactcgttattatggacaccaaaaaattgtttgttgattttgttacagtttgcagagacctccacctccaagaccttatggacatagaacttttaccaaattcctgagataatcgagatcgaattgtttaaaaaaattcgccaaaagttatggaaacgtggagagagagagaggcgctacaaatcatggagagagagagagattttatttattttggataaggatcgtggaagaggaataacaagaaagagaaattgagaattaaaaacataaatattgaattaagagtaaaaaagtctttagaaaaatgaattagtagaaaaagtgcatattccctataaagttcctcaaacggaaaaacattttctaaaagtgcctaatagtagaacattcccttagactaatgctaacattttttttcttttttcattttgatatttttttattttataatttataaacaaatacttgaacaagattctttgagtaaaatactttagccaatctaaatcaaaaatatttcagcaaaactgttgttaccaaacatttctctaaaatcgataccaaaaatcaaaagagaaaaaaaaaaaaaacattttgtaaattgaaagttgaaactgtgccttggttgaaaagtaagaacggcgcgtgtagttacacgcttctacgtggcccaacttgttcacatattttagatttggtcgttgttggtgtttggtaacatgtcctggcccaccaccaattaattctataattggtcttatgactcttatctttctatcaaaatcctaaattgcaacttgctgacgctttaccggtccaacgtaactttactacaccttggtaacgtgtctaataagctgtatttagcaaaattttaccatgtaatatgtggtttacttttttggcatcatttgtttcgacataaataattaatggaccatcgacgttaatgaacactcattctatattttcttccaaaatggaccatcaaatttaacaaagaaaaacatgtttaaaaaacaaatgtagtttcatacttcgtattgggattaacaactgtcacatgataagtgcaatagttatatgaataattcacgtcacagtatgtcaaatttttatattaaaattttaaaatcgcaacttgcaaatacaaatactactcttttcccctccatttctattatagtattaaaactaaaaaggtcagaaggtatgcataatttgtgatagaacatttttcttgttcatgaatcgaaagatgacaatatccaaacttcccacgtggttatcattccaaaactgaactacgccgtcgcatataacatatcttattttatttatccatttttacaatttaatactcactctaatttgtatgcgcatgccaattctttcttcacttaaactaaggtttatgttatttcttgttaggcttctacgaagcttcctattatgagtatatagaggaactttttgtcatcgtatctatgtttctgtttcgacatagataacggaccatcgacgttaacgttaatcagatactcactatataaatggaccaacaaattaaatgtaataaaggaaaacatcaaatatattccaagaaataattgtaatttcgtagttacgtgttgggagaaactaccgtcacatgatgaaagatatatgtcaaaattgcaacttgtaaagcctccttttctgatatatatatattctttttttttttttaagtcacaaagtaagggaatttgtggggaatatttttctttttcatgaacaaagcttcgtgtggacaataaaacaattgatatagtgtataatcttacccacaaagataaataaaataataagacaagtgattaataaacgtgccacgtattaaaaccatcccaaagaaacttaaccctttgaatgtcttaacgtccattatttaataaatttactatttttcaattgtttattatttatatttatttttgaaatttagaatctgcgcatataaatacataaaaccctattcgatctctttcttctccaatctaagttgcagaaccatggccaaaactctctactgcaattttttttgatcttttcttttactttttctcttcgtaatcgctggttcgagaaatggagaatccggtgggtttaagattccgtccgaccgacaaggagatcgtcgtcgattacctccgaccaaaaaactccgatagggacacgagtcatgttgatcgagtcattagcacagtcactatccgtagcttcgacccttgggagttaccttgtaagtgttttcacgagttttcctctcgaaccatcggctactttctaagtttagggtttttctttttgggcaggccagtctaggatcaaactgaaagatgagtcttggtgtttcttcagccctaaggagaacaaatatggcagaggtgatcaacaaattagaaaaacgaaatctggttactggaagattactggcaaaccaaagcctatcttgcgtaaccgccaagagatcggtgagaaaaaggttttgatgttttacatgagtaaggaacttggtggatccaaatccgactgggttatgcacgagtaccatgctttctctcctactcaggttttttttccctctgtttttgctctttaccgtgatttgattgctcgttttcgtgtatcgggtgattgtgatttgactgaatgttttttacagatgatgatgacatatacaatatgtaaagttatgtttaagggtgacgtgagagagatttcttcttcttctgcttcttatggtagtgaaattgagcagagtcgtgactctttaatccctcttcttgtgaacgattctgaggtttgtcgatctcaaaactttctctgtttctcttttaaatccgataactgacttgttttgttggttggtgatgtgcaggaagaagctcaaatcgaggatgctataccaatagaggaatgggaaacatggttgactgatgatggtgttgatgagcaggtgaatcatattatgaatatgaaagatgatcgcaacaaccacaggcctcaaaagccattgactggtgtcttgattgacgatagtagtgatgatgatgatgattctgatttgctatctccaacaacagtaagcaatgttcacctttataatcctctctctgttttcagttttcaactcacaaagctaattttggtttatatcacagaattctattgaaaattcgagcacttgtgatagttttggtagctcagaccaaatcaacttagtgtcactaactcaagaggtgagctttatattatctctttttttcagtgatacaaacaatccctaatgctactttgtgccagcactcgctaaaaattttcgtttcttatgatatgattcaaggtgagccaagctctgataaccagtattgatacacccgagaagattaagagtccttatgatgatgcacaagggactggggctggagggcaaaaattgggtcaagagactcgagagaagaaacgagctggtttctttcacaggatgatacaaatattcgtcaagaaaattcaccaatgttcttctatctcaagaacataatagcagtaaatgagatcaaaaacaccatttgtactttccaaaatcttgttttgctatgtatatcttgttttgtaacttttccataactgtatgtgtgtcttaatatataaagatggtgaaactgtgataagaaagtggttagagaagacaaatttgtatcagttgacttaacaatgtctatcttgttttgtaactttctcatcttgtgtgtccattgtgaagacaaagttgtataatttcaattcacacagctaaccaaatggtctaattttctttgacttagcaattaacctcgagtacgttacctaaccccactaaaaaaattccgttcaacaaaagaaaacaagattaaatttcaaatcaagatgtcaagagtctctgtttggactaataagtctacatcatacatgtacacgtgcatgttgtcatgttgatggctaagtctagaacacattagactaatgctaacttttattcttcttcctctttataagatcatttgtttacattatcatatatcatttttttattttgtttttttaatctttttctacattactttcactctgtttctagattaaatcctctgtttcggtgttcaacttgcaagtttttctttttactatatatcaacttacctcattcgttagatatattgtatatagaattaaggaattttcttgttttgcccaaataaaatgaattatgttgttataatttgctgaattaatgttgttatattggaaatgaatcttttgaatataaagatatgcgcctgcaacttttatttatattttaaaatattcgtggaaggtcgtgaaatatagtacagcaaagcaatctaacaggccgaacaaaaagagaaaaatacaataggaaaaatttgtaaaagatgaaaagattccaaatagcctttttggttttggattttttctcgaagtggttgaaactgagccattcgttgaaaagtaagtgcggcgcttgagatttgatgctcccacgtggcccaatgtaactcacgtatctagatttggtcgttattggcgtttgtttggaaacacaacttgggccaccactactacttcacattcccctactcccaactcctgcggaacagagaatcaaaagtataataatagtatgtactgtgttttgaataaataattcgttattaaagtttggcaaagaaaatgcttcgtttaaagttgtctcacatagtcacattggagttttctgcggtatcttgttcacacgcgtgtccattttctccgaaaaggaggccgctggattcaccttgttccagtgactgtaaaaggggagttttatttttatttttaaattagtaggaaaattttacggttttaccataactattatgatacaaatttatatatgaataaattatatatctgaaaacaaataattttggatattcggattattattttcttatttttatattatctacatacgtacatgagttaaatcggtgaaacaatcccaatgaaaatgatcgaattgatggtgatcaatccacttatcggtgtggtatacttggagaagctcgtctaagccattacaataatctccgccataatcttcgttcttgttctccgtcagcatctaaaaaaagtcatatatatttccaatttggttataaacttcatatcaaatcattataatctgaaacttgaaacaaaaaggaaatacagtaattctatgacttctatctgaacgatttgtaataagacagaaccagatcaaccaaaaatattggttcctttgaaaaaaaaaaatgatcattttaagaaaataattaagacggaaacgttataaatcaaacatttttggtttataaaattgaagtatgaaccaacactaataaatttaatgacttttttcccctcccatattttaacttcttaagtaacctgggggtggtgaaggatagggtctgaagtgagagaaagatctaaagtcggcggaaattcctctgagatggcgccacttcgtctagttcttgtctttttcgttagtttgcagagaacaaatgcgtccttcaaatgattatatatagagtcagccactaattaatgtttatatatatacatacgtgtgtatatgtagatatatatatagatatatatatagataccttgttgggatgggggagaaaggaatgaaattcatggataatccaattggtcttctgttgttgggtggtagtggtggataacgaggaagaagaagatcttttgttttcttggaaaacaagaaatttctttaaaccgatagggttaccatcaacgtccttaatggtacgactatttccggttatcttccagtgccctgacctcgacaccctcttcgttcggttgagcttcccaaacttctccaccggcgatatgaagtaccaagtatgactcgattctatcttcgccagcccttttcaaaacacacataaaaatgaagaagaaatgttaagagtctagacatggggtttaattagggtatagaattttatggtttatatatatagtataatttaccaggtaaatctgcaggttcatggtgcaatatattgacctcggcgatttgcttccccactagatcatcattctctgtgatcttgttattcaagtaatagttaatgagttcttcttcaggtgggttaaatgtgcatctatacatctctattagctgagagagacgatttttctttttgggacagatgagatacaaacggagatatagctagtaaaaaccaaaaaaaatatattttcgagattgtaatagagttttagtgatgatttagaattaagaagaaaaaaacaagataggagattggctaacttaaataggaattttcgctgatactgcttggctacataacttgtaaaaaggacaaaaacatattattattattataagaaaaagaaacaaagacatgaagaaggcaaaacaaagaagtgatcaaatcaaagcgctttatagaaaacgacaaaaaagcatgcacattgatgagaaggactcatgtgagtgcaaaccacatgatatcttaattttccaaaatattcgtcagttgatataagtattatcgccggatcctaataaaacatcggaacatttgatttggacggtctttaggctatattgctttctttaacccaaaaacttccatgctaaaatatttcaataatgaaaaaggagagtcccataatttgcggtgaaaatgttgtcacctttttcgctttacatgtgacttataaataataacccccacttgaagttgaaatataataccttcatactaatagaaacattcaaggcaaggaaagaatatataactcgggattcactccattgtttatatactaatttttattttgttttttttccatgtattgatatttcgtatttagttagacaaaagtcacaaaacacatattgaagattttgtttttgtttcaaagataatgtaataaacataatatataatgttgtgaagaaaattatacaatattgtcatttattttatgaatgcgtttaggtacattataactacttttataggtacagttgtttttaggagaaataaaatagatatcacattttgcaaaaatcacagagagattaaccgaatggagttaataaaccaaatgtgaggaaccaaggcgagatggtaagtaataagtatcatcaataaggttcaaaggcaaaaaaagacaaagatgctaggcccaacgttttatttatggtcccgtaaatttgatgggctcaattcagttctctagtaacagcagcaataacgatttttgatcttaagcacatacatgtgcatgaggtgaagaagtcgaactacgaattcgaatcgaaacactatccttcatagaattcggtacgactaaactctcgagcttaccagattcactgtaattatcttttaatactttaaactgcttaattagatttacaaaacaataaaaggccaatattttgtcatagactaatatctagcaaaagaaaattaagatcaacacgttaatttctacacataaaatatgtaaatcaactcacatgcgttattcccacaaaccatatgctttctaagcaaaactactgtatatgtgaaaatattattctaaattttggtcactcactttgttatatgaataattcagtgagtgaaaactatatggaggcggtagtatcgcagaggtttagtttaaagctggagtaagtcaaagtaatggaataaagtatgtactaaatattcgaaatgaatttaataaaacatcaacaaaatggtagaacttattgacaaagagtatgtatgtatatatacagaagaatgatgattgatgaagatggttaagtggaacttgggattcaaggaacactcctggcaaatacaacgcatctatgcctacaccaacaagcaacggtcatgcctctcgcatgcagattcaagaaccaagaataatgtctcctcttcctccttcttcttctccattcgccttcaaggtatttctctcttttgaatcaagaatcaggaaacaccttgatctctgtatcttctctctctctgggttctgttttgctttctactttatgctctctgttttgatcctctctcgttgacttccatcactatttcttgactcaagaacaaaaccaagacccagcttctcttttgtctcttcttgttttcttcatggtgctttttacttgcatgttcataacgaattcacattaatcagctttgaataacctgttgatgagacaccattttgtttctttttttttgcaggaacaacaaggtagaccacctccaacaacacaacaaaccatagcaggaaaactctttagaactcttttcaagggtcttctcttctcacaactaaccttaatctcacttttggtgatcgttctcaccattcgcggtctcatctcagcaagtacacaccatttccacctcaagaaatggtaccctcctttactagcatctgttgctgtctcaggaattgcatctttagcatggcaatgcatctttatctacaatccatcaagagcagtcaaagcaacgttctggcttagcccaatactcacctgctcggtaggaatcttgcttgttttgattggctcagcggtagatgcaggtataggtgcagtgtttgtccttttcgccattactcagtccctctatggttgctggattactccgaggcttgagtacaccgataaaatattatcacttgccacagcatttccacctgcaagaaccagagaagtagtctgcttatcaatcatagtcagtgtcgtttactctggtttcttggtgactggaattggaggagcaacttccactagaacaaatcttgatatcttgttcatatccgtaatcataataagcttagcatggacgatgcaagttatcaagaatgttcaacaagttgcgatttcacgggcgagatatgtaaactttgcacatggagaagatatggacgcttggaatgctttccgcatcactatgaaacacttgactgggagcatctgcgttggctcgacgcttgttccaatcatcgtattcataagaggatcaataagaagtgttaatctaatgtcagggagcagcgatgaggtcatgtattcaggtgctgattgcttctctaccattgctaacaaactcattacacttggaaacagatggggctttgtacatgttggaacctatgataaaggattcatggaggcttcgagtgatacctggaagaagttcagaagcacaacagggttggagaaactgattgactcggatctcactagctccttctgttttctcagtgctgtttctgttggagctgtctcttcattaactgctgggatatggatgttgttaatacacaaggactatgccctggaagtgactctctatgctttcataattggatattttgtggtaagatagctaattttataaaaatatgaagaagacttttagacaaagtggtttatgttgtgtacctggttttgagtgttttcagggaagggtaggtttggcgtggctacaggcatgtgtattggcttactatgtagcttattctgaagatcctcagagcatgagatttgatggaacaattccacaacgtattcagcgtcttcaaatgttaagtgctcaccgagataacagggagcttgaggtgggtagagacagagaagaagatagttataacaattgttgagtcatgaaggagtctcgctacatacatgtaaagaaaaacaaggattactactttatttcttcaaacttatagattcttctattgataggcaaaaatcttagcttcaatgtgtttatatgtatgccaaaactccaactaaagaaagaatgcacatactttttctctcaacttagcaatatgtcccattatacagtgggacttaagattactgaaattttcaacacttagaaatcttgagtttttagcatactaccaatttacagcaaaaaataactaaatttgttccatatgtgacagaagtatactagtgatcataatcacaatcattatcaacattaagcacaagtacattctaatgattaacgaaaaaacaataatctgaagcaatagaaggaagagaagctactgtacatttggaatcgaatagccgataggggaatccgccgcagattctggagaagaatttgcagttcatcggagagagcctatgattgaagaaatcagacaaaagtttcggaggagagatctcgaaccggaacaaaaagtttatattggtattgaaattaaaatcgattttgggtttggtttagactggtttagagaggaaaagaaaaaaatattcacgcgatggtgattttggagacaagtgcgttgataaaaaaaggcatgatttcagaaggtaaacccctacagaattgctctcacgctctctacgcgcactttgtgcgagtggttctgaaatagagcctcttgattggctaaaaaactctaaaaaaatagcaatagtagacatgttgctagctcttgttattatttagcttttctacaaaacgccgtcgtttctatttcgatcgtttcagcttttgacattgatccgaaccaatcggttcaactggcttagtctatccacaggttcgtataaaaaaatctcattttgtcatcaaattaagcagtaaatttatattaattaatcataagttaatgtttaaagacaaattctatttcaaatttctaacgaatcagacctaattgtccggaataaatgattggttctgaaaatatcaattgggaaattaaaacccggttcaatttgaaaccggaaacaagactagctacgcctggaaactcacacagagtcacaggagaagctcccgcgtctgcaaggaacggataaagtctctctctttctcacacacactctctctctctctctctctctcaaagaagaagaagatgctgacgagtcccagtaacgcacttcatagtagtactccacacttctggccagttcgccggagcaggctttgccgttcccggaatttccctcgttttcactccggcgaacgcagcagcggcggaggaggaaaattgtgctcgctctctcttctctccggaagtggcgccggtaaattcagtgtcagagctctagttaggcctgatgataccaacgacgctgactccgtcggcgatgggtttctgtcaaaattccactcggaaatagagaggtaatctcttcaaaaagctatacccttttgatttcattggttgtttcatctggtcaagtttgagacctttagctctatagtagagaagcaaagctcgctgctttagatgtatgtgttgaacattgtttagtgtcttcaaagtttttcatcttttctttctttttgtctactgtgtagattttagttgagactgatctcatggggagacaagcaagttctgcagtcacggtgacagatggagaaactgtaagtgtgctgcttcattcaatttccaaaactttgaactttttttcttagttcctcgagtttgtactcttcagtttagcttctgttacttgcttatctcttcatcggtttgttagatgcggaagctttgtttcattttctaatctgtctacttgtcattgtagattgtctacacatccgtgtttgtctagctgatgttccaagttagccatcagattttcttcccctttatgttcactatcaggagcgattctcagctgtaagtcgaacttggcaagtgtttttcgaccctttgctattttggagtaatgatgtaagaagaccatatcattgcctaaatgatgatctgaatggaccttcttatggtacagtggtggattttttaagcgacaagggagaaccaaagatcacgaggaggtatgtactaatgatggttttggtttctacagtgaaactcagattttatcctgggtatggttcttctccgtgtactaatgatcagctatctgtctattcaatacatgtaatgtaaaggcttccggttttttgttgaaccatatagtgatgcttgttgatctcatgtaagttttccatctattacgcaagatctgttatatgttaacatggttaagattaccagcaccagttatggggttgaatccattctttgtatatggaacattgtttcacttagattgctaaagttgtaggaagagaagagtatgcgttagcatataaatcaaattgatcaaaaatgtttaaactgttgtgatgtgaatatcagaagatagcaaatcaaaatgcatttataaccctgttgattttaccaaaacgaagcattggatgatgtgtgtgaaatgtcagaagataatcaaagattataggagtatatttttatattccgttgttatgcagctgcttgagaaagaagaatttgtggaggcggtagtatcgcagactccacttgatttagaaaccaccatacatcttggctgagttatgtaaagacttggctgatagttttacgaggtttttagaataatcaagtttagttctgcgaatttaggtgactagatattttcttgtgattgaggaagtaataaacactcatttacttgtccctttgatttgttgattgaactttagctcaacttaaaagtggttagctttgctgaatctgcccagttatattattgtttccagttgattggaattggttcactatagattatgttttgtttttggtttttataagctaaaggtttgttctttttcatggaaagaacaatcatgagatgtcaacatgttattgatctttagaatcgtttcattcaatggtcaagtcattttgtaaacgaatttgtttttttttctttgtctttttcgacttggtttctctgtaagattcttgttccttgaagtgatgaggtttctattagataagagttgattagaatgatataatgtgctcatggtgactctcatccttgcacgtccctgtggtttatgaaaagccatattgctttcctctttagccaaattgcgtgttaatatccttcccgttgcatttgattctatatcttgtttctgtttgatttttatgcatctgtcacctccatgatagtttctcttggttaatggctgaaacaagtttagttttggatagagaatcaaagagtctcttcttgttcgtttgtatctttcctcttgcggtatatgttgaagaactttagggaaacaaagtgaatgaaagctaagagttttttttatgaccaaaggcaaaacaaaaagtgaagaatattcctttggaaagttttgaaagggaaatacatataggatattaactaggcgaatggaattttttcactcatacagagtcattttctgtatatataacttagtgattgtgagttctcatattgcttctatgtaacactccttgtaaagctaaatagcccttttgtgctaagtctctgatatctattgttatcttctcaatactgcacttgttcaatgacacttgctagcgattttggttttccatccgctatatcttcatcttttacaattctagaagagagataccacaataactttcctaacactttgtgtgtttcatcaggacaggaatcgatgaataacaaccccgtcccctgtcaggtgtttcctctggtctctggtggtagttctggtgggaatttgttttcatcttcttccggattctgcaatggtgtctatgtttcatcttcctcccaggcacggccatctgtttctaccgtgccaagagacagaattactgttgctcacgtctctggtgaagggcagaggcaggaatgccctgtggaaacacattccttgcaattgatcaatcaacctcaagaacagaaaattatgacttggtcttcagaccagattcggggcttcttcgattttcctgttccagatccacaagcagcgagcagcagaactatggtttcatccaaggaagtgctttcaaaatgcgaatggccagactgggcggatcagttgatctctgatgatagtcttgaaccaaattggtcggagcttctaggtgatcctaatgtactcaatctatattcaaaggttcgtttctttcagctaaatatgaatctctacgcttatttcagctaaatatgattcttctattaagactgactctgataatgtcttacagatagaaacacagtcttctgatatagcaaggcaagagatcgtctttagaaatcagcatcaggtggatccatcaatggagccgtttaatgccaaaagcccaccagctagttcaatgacatctaagcaaagaatgcgttggacaccagaacttcatgaagcatttgtcgaagctatcaatcagctcggtggtagtgaacgtgcgtatgccctttttttttccttctcatgcctgcaaaatttagctgaacaacttattattattctcttggcttataatttcaaaccacaggagccacccctaaggctgttttgaagctcatcaatagccctgggttgaccgtttatcatgtcaaaagccatttgcaggttactattctccatctatgttttcggtttgtatgcttacagctcatcttaaacgtctttatattattggcttgtccagaaatacagaactgcaaggtataaaccagagctttccaaagatacaggtacttgaggcatctaaggattcaaactgtcttctcaatatttcacataagcttattatactttggaaacataatggcatttaaaagactcttgtgtgatgaaacacgtctttatacataatcagcttttcttcttggacagaagaacctctagtaaagaatttgaaaaccattgaagatatcaaatctcttgacttgaagacgtaaggaacattttacttctctgtcagaacagactaagtatcacctaggataatatttcttcatatctaagattttttttttttattcttcttcaggagcattgaaatcactgaagctctccggttacagatgaaagttcaaaaacaactccacgagcaacttgaggtataataattcaaactgcctaaaagaagcttttataaaacaaaacagtgtcctttcctcttcatttgtctgatttcttagtttttggttttagctggtgattttgatcttatattggtcttaatacaatgcagatccaaagatcactgcagttacaaatcgaagaacaaggtcggtatcttcagatgatgattgagaaacaacagaagatgcaagagaacaaaaaagactctacttcctcatcatcaatgccagaagctgacccttcagctccatcaccaaacctttcacaacctttcctccataaagcaaccaattcagaaccatcaataactcagaaactgcagaatggttctagcacaatggatcaaagtgaatctacttctgggactagtaatagaaaacgggttagagaagattagacatctcatgagtatgatccaaagatgttgcaaacatatgtaattgtgtatataaaattgaaaatatcacagcagcaagaaaatgaaaatttcttcttaatggagatgacgtggacaaatcactgtcgagttggaatgttgtcggctgatgagtcagcaatttagatgacgtggctaaagaacatccttatttatgacgtaattaataatgatctctcgaaatgcgtcttttcttcgtctgttctatcttctttaccaatttctgcaattctggagaagctaaaggtctcaatctctcagtcaaaaacaaaaggtctctcctttattaaactatctatcactaactagaagaagagattagaggaggaggaagaagatgttgtttcaggtgggaggtgaaggcacacgccccaccttctttgagatggctgctgctcagcaacttcctgctagccttcgcgccgctctcacctattccctcggcgtataatgcccttctctacctacgtctcttttcgattttgaaatttggtacttatctgtatgattcttatatttgtttgctgtttcgtgattttttaggtttttgctttgagacgatcgtttctccataagattttagactatgaggatgaattctttgctgctctgatgcttattcttgaaggacacagcttacgaaccacaggtagcttctggattctgttttaggttttgtgtgagagtgtactggaacttttttgcttataacagttagaggtttgtgaattgtttcagatggttcctttgctgaatcattgtatggtttaaggaggaaatcagcgagattgagattgaggaaagacagtgccaggaaggattctagcgaagaagttcaacattctggtttagagaagcgtcagagaatcctttctgttgtgtttctggtactgactctttcctaaatgctataactttgtaaatgcgtatatgttgaaagcataaagcttatgcctttaagcttggttactgcctttttctaggttgtgttaccgtatttcaagtcaaaattgcatgctatatataataaagaaagagaggctaggctccgggaaagtttatggggtgcagaggatcaaggatttgatgaagctgacttcttcacaggggatgattcaattgtttcaagagagcctagtgggaatgaagagctttctgttcgagtacaattagctaccaaaattaaaaagtttatagctgtctgctatccttggatacatgcatcaagtgaaggtaattgtggatttatgtgagcatcgacatttcgactgcatagtagctgatgattctttaacataattacgagcacttcttagtttacactgattagcttcgtgcgtagacttctatctctgagtttcattggcatggagaattttatttgatctgtatcatttataatgagcttatatgggatcctctgtgtaggattatcgttcacttaccagctcttatatctgctggacgctactggattttattctcttgggctacaagctcttgggattcaagtttgtagagctacagggcaagaactggtattaacttcctcctttctggttgaaatttcgtgtcaccattatcttactatgcaccccatagaattagggcgctttggctttgttggatggtattatttaaaattctacatacatcttgctgcaagatgttataccatcattgactgacccataaaaacctttcaaagtggtaaatttacatgtgttatgtcttaacacactttttttcttcgtctttaccttttttgatgccaagatagatggatacatcctcaaggatttcaaagattcggaatcatgagcgtgagagacttcgtggtcctccatggttaaaagtatgatttcacttttcttaaacttcatgtaacctaaggaatgagataggctgattcctactactgcttacactttagtgatccaacgtctgacagtattgttttgaatattgaattagacggtgcaaggggcacttcttagctgctcatatgctgtgcttgactatgcccaaaccggtctaattgcagcagtttttatcttcaaagtaagtatccataaatgtcccagtttatgttacttctcttatttcactgtcttaaaagcttccagcagaagtaggttcctttaggaaatgaaggtcctaagcttaaattacattagattagattttgtatgctacagccaccgctaaatccataaagcttattgctatacttatggcgtttttgactctcggtagatttttcatcgcataatcatttagttgaacctaaacatctagctcattttcgtgtgtttttggttttgtagatgatggaatggtggtatcaatccgctgaagagagattatcagctccaacagtgtaccctccacctccacctcctccagccccaaaggtaatcaatcaggtagcattatctgaaacttatgtaaacatcactcagtcgactttgtcaaagtttttgtttttctgtaacagatggccaaagaaggaatccctctacctccagacagatccctctgtgctttatgcttgcaaaaacgtgcaaatccatcagttgtcactgtctctggatttgttttctgctattcttgcgtatttaagtatgtttcaaaggtgagttctccaaatcattactctctattcccaaaccccaaccttggtattagcttatatccgtcttctatggtaatcacacagtacaagcgatgtccggtgacattgattccagccagcgttgatcagattaggaggttgtttcaggacacttaggaccagtctatttaatggttttaagccaacagtgagagttccatcatcgttctcccatgcaagttagagtctgaaccagaagagctaaaagactgccaagtgagacactaataccccaattgattttatatatatatatggataagctttcatttagagctcaccaagtctgggatcaagtgcttcttggattgaaagaaagctgtgttaatcctaatcaaagctgattctgattaaaacagagaaggcagacaaatggttacttttttctttcttagtttcagcttcgaaattgttgtctattgcacaatgggggatgatattattgttcaggatggaaaaataaaatttatatactgatcaaatttataaagaaaaggatggaagagatgattggagttcaaactttcatagctcattattgaattagctttgcacttttgctcctgaaccgaaaaagttttctgattaatgtcaaaaatttcaaagtcgattcagaaatggtttaggaatgctgggggagtaagaggagtcaaaatcgaaccgaatagaaaaaaaggattaatcattaagagagaacaaagatgtttgttaaaggaatttcagaaataacatgacatacaagagcaataaacaacactaccaaaagccttttctcaaggccacaatgatggctcaaaaagtgaacatctttgaatccagccaaagcaaaacctgaatgcaatgattcagttactccggactcatcattcttcggctacatgatttgaacgggtacccgagtcactagcaccagcggcttttgtagccgcttgtttcttcctcctgctcttagctttcttagctttcattcgacgtttcttctcagctgaatcgatccatttgtaatctgaaggtatcaagaaagggtcagcctcgtctttgtaacggttactatcattgtcacttgatttgccacttctcatccatgagatccatgatggtgatgagttctctgaagaagacgactttgcatcatgaaataccggactagaaggaggtgttgagaactcctcctcagctgcctgaagttcttcaaatttggtgaaagtaacaacaactcgaaccgtaggaataatgggaatggcgagctgcacataaattaccgataagaataaaccctagagagtgattcaatcatatcagtaacatacaatttacgaattgaaaaagatttatacctttacagggaatgtgcctagcggaagtttagttgtgagaagctctctgagtctcctaacggctttaaccttgttagctaatatgtcaaggagcggtaaaagctcgtctgtcgtaagaggaaagtccggtgttaaccacaagaccggtcttagtcctttcttgtattcactctcacgcttaacctcatctccggcaacacctttcttcttcttcttcttctcctttcctttctttgcgtctccatgatcctcatttgcatgatcagataccatcgaagatttctggcttttccctttctggttcccgtcttctggcgcagactttgagcctttcttgagctttgtatcttcagtgtttgagcctttcttattccaaccaaaccagcccttcttatccttgagagctccgttttcctgttgatcagtaacttcacactcttcatcttcaatggcatcggaatttccagtctgaagcgcggaattcaattggagtctttcctcaggtgttagtacgtcttcaaagccgtcggtctctgcaccatttgttacagcagttcgctcttcatcaaccgcaaagagctcttcatcagtcattgcaccgggaacccgtctagatttgacactcaccatcacatgaagcatatcgtaaacttttgctttccaattcccaaccatctcggttctctcttgccgtctccaattcaaatgagaaaccagctcagcttgagttacatcgattccaggtctatacatattagtctgagacatcaaagccacttcatgagcaacctcagcatctgttggttgcgcaccagctccttccaaagcatttgtcatttctttttccttatgcgaaagaacaatcaacgagcccggagatagggacattttaccatcttcagacgagtaaccatcccctagaaagagaaatgtttgatctgaccgttggattttaaacccatcaaaaccagcaagagtcatatcagcacggagatttgaaccacgtttccatatcctgtaagtatcggaaggagcaatgcggccaataaacggaatgaccgagctctcaaaatgaaaagtgatctccatgtaaaaatcacggatccgagatgctgacgcaatgatccgaggaagtctcctacaccatttagcccaagcaagaggctggtaatgccgagcaattatcatggcgatggcctcttctcttgtgcaaaccgcttcttgtaacgcactccaaccattctcgttctgtagactccaatcggcaccagcagacatcaaaatctcagcagagacaggatctctaagacgaacagcgagatgcaatggagtttcacgaccaggaacatcacggcgatcaatgacagctgaaacagaatcagcacgagactcagactccatagactcagcctcagtagtaacttcaccagccttagctaaccgaggaagatccgaaacaattcgcctaagagcagcatgatcccgaagcacaacagctaaatgagcaggactatgagtatacttggagtaatcttccattgtttatccacaacactcactaagctccaaaacaaaaaagcttttctgctttacttctctccaaccctaatagaaaaggaatcagattcttccaggaatcacaaacaaaaccctagaaactcaccatatgagctcaaatttgaatccaattcaagaaagcttcctcctttctcctcctcagaacataaagaaaaaacccaaattccaatacacaaaaagtaacaaccttcacaacaagcacaagctgttcatcaaaaaagttggagcctttacaaagaaaacacacgcctttttcactttcgctttatcaaattttcgatttccttgtgaggaacagaaaactaccagtggaagatccgttaagccgctggagttttctcaccaacccgacccggaaacctcaaaagacagagagaggggtacgaaggaaggagcaatggggaagaagaaagagagagaatcgatcggtgaacaatgaatgtttgtagcgattgagaagatctaacggctaggttcctttcttccacttacgccattattaatgccaccaccactactctcagatctatctctctctctctctctctctgcgaattttctggtctcgctcgaccaacaagggagaaatatggaactacccttgactttacacttaattacggttttaccatttttcattttttcttttcttttgggttcgctttacgtctgaatttccaggttggacatttccactttggattctttttaagacacagtttcgaataaaaaatacatttgttttcatttctgaaccaaagtccaaagatttgcatttacaattttttagccacaaatgtatctgtattcagagtaaaggatgttatcattgcatttaacttatacacgtgtgatgtgggtatcattaaaacctgtcgtaatagggtgtgtgacataaaagattcatataatcaaccataggaataggatgcttcatatttatcgatatataatcttgttagttttgtattaataatcagtactacataagactcaaatttacggtgctaaaaaggatgctgtgaatcaaattaaatatttaaacttgttagtacttttttggaccatcctatagtgatatcaaattattttcattttcttctgcagaatttttgtgccagcaaatttgtccccacagaccacaatgcagtgtttcccccaaaagcatcttgttggatatttttatactttgttttttgttctctctttactccaaaatgcttagaaataaactagagatgcaaaagtgtcttatacaaagcataaaacatcaccacagcaaaaaataaccccactttactttggtaagtaaccatagttatttgattttattatatttttaaaataaccacgatctagatcaaagaaaagcttcacttttatttaaatatatgagaatacaaatgtgttatgttggaaagacgtcggtttatacattgaggtaagactttggttgtgaatagacaagtcatagttaacattttatgctaaagatcttcaatctctgtttaacaatttgaaaatagcacttgacatttggaatctctcctcttattatatcctcgtgaaaaagactaataatctttaatcaaaaaacacacctttctgagatatatattgtcgtgtaacatgtcacattctttgcattaaattctaaaatacgtttaataataatgacctgtgacaggaaagttacatacagtatgtggtaaaaccaaatccaagttaaatatttctggtaaataatattcatattgttataatgtattgaccaataatatcatgcctttcgataaaaataaattccatttggactgggtttggcaaaaagtaatcagtctttgcacctccaactggaaaaaaagaaaagaaaagaataacaaacatcgtgccgtttccatttggaacaaaacaactacgtgttgttctttcgcaaatggaaaaggtattcaaaaaaaacggcatggaactgtccgcctaaaacatagggccgttcaatttggcttacccattgcaaaatcaaatggcccttgatgaccttgatgaccccaagatcaagtaagtaaacctttgtgttccttgagaaacaggaaagctacgaccttagggcaaatagttcacaggtgattatgttgtcgagtgaagcagaagagtttccagcaccaaggacagggacgagattgaagataggttctttcaaactgtccatttttactccatcactcatctcgttaagctctctgaacgcagacacaaaaatggccgataatctctctacggacacaccaatactagtagagaagtgtattcttaagctctgcatcaaccaaaacaacaagatataagcaaagcttttgatgataggctaacattgtttaaaagaatctcattctcaccgtagtgtcttgccaagaaaacgaattttcagacaaggttttgttgagaagatatacacagaatcttgatactatctccagttcttcttcttctccctgaagtttcctcattagttcagctgagatagagagaacggccacacacactttcccatcaacaactcgtttctgcacacaatcttggtgccatttctctggcttatatccccaaatactgtaatgtccttcacccgattgatctcggctggtttcatcttcggtgtctgtatcttcttccacgtataaaataggtttcacttcaacaagggccctggagaacaacaattactgtcaaaaacccaaaactgttgggaagatcggggacacggatgtaaaggaagattctatgcagtattttaaccttttcggaagatcggggacaagaatgtaaaggaacataggatctaggacattctgtaccctccgagaagactttgccaaacccaagaaagtaacaaacttttcatgaagttggttcctctctgattgttttgtgcgtgctgaacagaaaaccacaaagagtatagctgatgaggagattgagcagttaaaagactctgctattgcttcactgttcgtcaatgcttgatttagctcagcaattgcgccttcggtttgaagattcatcgtgggagggtcaagtcctaattgtccagccatgtgaagaacactctggtgcaaagtggcctgaagtagatgatattgtaagtatctgactttgctagtcaatttgaagattatttagaaatcaatgatgagatttcattcacctgactgtaaggtccaatgcagctaggtgcccagcaagatatactttgtacatggagaactcttttgctttcgtcattcgcgactaaaacctcgatgtaagcttttccaagacccgcttgtaccaaaggaagttctattgtactacgggaaggaacaccgaaagggcacttctcttgtgtgataaatttcacatatgtctcattcgccacagcaaattcactcatgtcagagatatatagatgaatgtacaatacatgctgccagttatacccgtgttttaaaagctgggattcaagttctgtaagaacagtctcgagatcttctttcagacctgttttaagaggataaagcaaatatcaagtacatatgcggggagatcttgaagatttggtctgtttctgagttaccttttgacgattcactagaatcttccaaccagcagcagatggagaacgtgttgtgtttctcagcccttgatatgtgaagtctgttacttgtgtgttcaactagatcaacgattccattatctcgttggcgagtagaatctgatgtgttaggaccatctcctagtacctcagacactaaacttgattcctcttcaggggaatgggagtctggattccctttcttttcaagatggaacgtagatggatgaagaacaccaacaggtgcaatggaatctggagagtgtagcacaacttgatattcatcaagcacgatactcgcattctacaaatatgcaaattgtcaaactacaataaatgtgagaaatcaatgaacacaaactgttcttaagattgttgtttaaagaacatacagtgaaaagcgggcaatctagagtcagagtttcatattctcctccttccccgcaaacattacttccatatttcctaagtagagatgcaatcagaagctttagaaacaatgtaacacaaatagataaatgaagccataaaaaagagctgtggcatactcttttaacttcaaaagatatggttccatgaaggctaagtctttccctaaatgctttgagggatctaaccctattgccgcgacctgtaaaggttttacaaaccataattataagacgatgttgacgttaatagaagcaggaataatataacaacaatccttatctaccttgactaaaatagctttgatcccatttgctatctgcaagtaaacgagaaacgagttaagtaaaacatatacgaaaaagaaaaataaaaaattgagattgaaataggcttgaatctagattttctcttatactgaaacagtttaccatgtcctgaagaagcaatgtctgatcttgtttccacaaaaatgccaaagaaacaaggcctaaccttgaacaaatactctccacacgcagtcgttggtagtctgatgcaatggcaccagacgatactgcagtgatggaaggtatctgtctcttcacttcacttaacaagacaaacatatcttccacttcatcatctggagtcatttggtagctaagtttctgatgcctgcaaataaaactcgtcagaaattgttcataaaatcaagccttgccttggaaagcctaaggattctcaccttgaagaacctcggattcttcttctgaacaatggcacattcatacattctgcataacccactaaaatctggtggcctacctgaaaaaggtgcatccaatcaaagaaattagatgcgaggaaacataaatcattcttgctctcaaatatctaatcttattactcttctcaagaagaagaaccagatttacaaatcatgaaaacattgaccagattcacgtaaaacaccaatgagatagaaaaggctcaatttttattcaagcccttgttcatattaaatatccggttttagctcatactcaagcatatatagacaagagtagacagagaagaagcagaatcttacagtttgatacatatagctgtccaattcatcgacggaatcatcaaccggcaacaaattagccaatgccacgatctgtgcaaacacaaatcgagaaaccccaagtgagatttaagttcgtatagcttaaaaaattgaacttttgagaggcaatttcagggaaactctgaacaactaacaaaacttcgaaaattagacagaatccgaggtaagagacgtacctcgtgaccgtattggatacacttcatcatagcataacagctatctttgcctccactcactaaagccacgaccttcatctttctctctctctctctctctcgagttggagtgaggttcttatgtcgtcgaagaaactctgagaaagtcaagtcaatacaaaactttgaaggacgacttaaaaaataaaataaaaagaattttataaaagtttaggaatctagcatgacgtttctacttgttattcgattggcccctatattttttaatttgtcaagttctttctaaattagtaaattctaatttagggtttggaatcttttttttctattgctttaggtcgaaatccatatgatacgatatgatatcaccacgatagagatgtgtttgtatataaaacaacacaccaaaacgtctgaaacaatcccgtccacaaatgagtattcaactacctagttatgatagatattataatcttctcaatttaattgctaaactagattagaaaacatttgatattaacattgtattgatataacagttcgttattcaacctcaaaatcttttttctaaattactttcaaggaaactaatgaataagctaggttttcatctattttgagaaaacagaatattggccgaataaagagattaatgggcctgattaaatgggcacttagcttttggtaattaagctttgggtttcgatttgggtttagtgtttaaagcccaattcttctttatggtcgtgtacttagcttttcttcttctctgtaaacaggatcgaaagatcactaaacaaaacaatcatcttcttcctaaatttcttctgattcctcatctttttcttctacttctcatcttaattctgttatttctttgataagtctatttcgtgtttatcactactcttctcttctccagaaggacgaaaatggcggtttttattcaaatcacttaatgctacctgaagctctctttctccattagcttcgttgcccaaatcctgttgacctgactcatcttctggttcgttaccggagcacggtcgaggtactaccatgtgagctagatttgaataatgtagaagccatcaaaaggctcaactcgaacggaattgctcttgaagaaggaattccaccgttccgattcctcaagtatatcgttctccgtgatgaggtagctctgaagctctgtgtctgattttgttttggtttgattttgtattcccaaattaaggattgattctgattttgtttacaggtgtggttcaaccattctaaacttgttgaagacaaaggtgctcgaaagctgatcagtacttggatcagaagatctcacaggttaatcgatttcaatttgtatctgtgttcacttgaaatttactgtggtttttgtgcttatatttgtagatgatatttactaggtttacatcggttttgaaattaaaattgatttttaggttcggtatacattggtattgaaattagaattgatttgtggtttggtttatactggtttagagaagaaaacacaaattttcacgcgatgggaattttggagactagtgcgtcgattgaaaaaggcatgatttggaaaggggtatacccacagaaatgctctcacgcgctcaacgctcactttgtgcgagtgggtgtgaaatagagccttctgattggcttagaaactctaaaaaaagtgaaatagtatacatgttgctagctcctattgttattatttagttttttgtttcttctatcaatctgatcaaagttcagttttttttaacatacagttgattctaataaaggttttgggttattttgaaatcatttgtatgtcaccaaaaaacagaaaattttgtgatttgtatgctggcaataattcatcattataaacgattctgttttcatagagtaaaaaacagaggatcaaaaaacatttttttggaaaacgcccttctaggtttatatgtaacatttccagtgactgtgtattcaggttgttgctttagttgttttatttggtgttagcgaggccgtgacagaagaaatgccgaaactcaggtttgtgcttctatcgacttgtttatgttaatgtcgttttgatatgattctaagcctggcttaagtctacagtatcgttggattgcttattcatccatcaccgttggctgctgtttttttaacatatttcttatagggacagaaaccaaggtaatgcacatttttctgaaatgctcaaatcagtttttaccgaagttttttatgccattatagatggtatatttattgagaatgagttgattttcttttattttccaaaggctcaggataattcttaaacaaaatgtcatgtgggcttgctttatatgttcttcagtcacatcaaagtaagtttttgttttttctttctgatattatcttaacatctacaggttgttcatggaagtatgatttggaaaatggtgcaggcacttcaccgaaggtcgtgaacatcaaacgatattttttacttcttggtgacagggtatgtgttaggacttgttccagctcagaccagctctatgctcgcttgttggagttgttgtaacatattttatggatctccatagcacaattctatagcctttgtgtcaaccgctattactagaatgaacagaaggaagatacgcaacgcttctggtctggtaaacacatatagttctaaacttggttactgtttattagtaatatgtttcagtctactaatttttgttcataaggataggttatatcacactgcgacatgcaatacatttttacaagaattacgttgtcagtaaagattaatgcaagttgattttcttttcatgttgtctactcatcttcactgaatcttccttgtctgagaccctgaagatgaataaagaatgagtctttggaagtctttctgattcgtatactttgtttttgttttcattagaaatttagaagatagataattgatgatcacaaggtgagagttaaaacttaatccattacttagtctctctattctacagattctgagcaaaaaaaaaatgattcatcatactgtaccaaagtatcaatttgatcaaaattagtctttcacctctttccaaaatatcaatttgattaaatcaaaggacttgattgattttgtttttgaggttcacacggttcaatcaagatcatcgaaatccgaaattccaaagtgcgatttaaccgattaaaccgtccggtccattggttcaggtccttacctcatttataagaagaaggaagggtattcccgtaaataatatggaatttgatgtccagttaaaaaaactccaaataggcctctcagctaaaaacaccgtttccatctctccggctctctcgccatcggatccctttctccgccatttcacactgctcaacgccgccactttccttcttcgatcgactcttcatctccttctccttcttcttctttacactttccaatcaactcgatcagattttttctacttggaaagcgacgagactgttgatttttccggctgccggaatcagcgcttcgaggagaagatgttagggttttcaaatggaagcggtggcggtggagttggagctgaggatttagctcaactccaatctaccatgcgcgcgattgaacttgcttgctcttacattcaggtctttttttttttgcttcttctttcttcattcatatacgcataaacaagtggttcgctccattccttgtctcctggttgatatttttggtttcctaatatattgggggaagctgtagatgtgtgcgtgtggttgcatttatgaaattgttttttatgttttcttgtaatttgtttggcttgaaattgaagtcactgtagagtattgaaaattatcaagttgctttgtgagtttttcttcttttttatggtgtttgtttatctccgcgtctctgttgactaaggtgttagagactacatgtctcactgaactagtttactattaccgtctttctaagtttatatgaagtacgaagtctctttgcttataaaaggcttttcatggtctttgtttgtgcttaactcatgtggacttgacatttccctttcttttctacagattaatagtaatccagttgctgctgaggcaaccattttgtcgcttcaccaatccccacagccgtataaggcgtgtagatatattcttggtaagtctttctgatgaatccagaaccggccaagtggacttgggaagtttcatctgtttgactgaaagtgttttctacttccagaaaattctcaggtggcaaatgctaggtttcaagctgctgcagctattcgagaatcagctatcagggaatggagctttcttgccaccgatgataaagggggcttgattaggtatttttttcttcttttatgttatttaggtgatatatccttaagcttccagttagttgagcgatcaccctctcctctatcaggaagcaacccttggtgttaagtttgtaatttttgattggctttgcaaatcaactgagagcattcatgcttcacaatatagtagttttagaatactgctgctttcctggtcacattattttccgagataatcatgactatataagaaattataggtttctattatgaagttttggattatataaataaaaataattaagtaatatggcgaaatctttctgcagcttctgccttggctatgtcatgcagcatgctaattcatctgagggatatgtgctttcaaaagtatcttctgtggctgcacagctgatgaaaagaggctggtaagctgcggtgggcttcttctgcttctggtatctaaattcttaaaacatgcacattagatgttggacgttagctttcacttctgatgctatgcgtatgagaggattcatgaaatgatgttgtcgttcacagacaattataaccggtagcttctggaaaaatagagtagcactaagaaatcttgactaattagttagctacttctgttttcttgcttgctttgttcatctaagggaacctctaatctgaataaattattcttacaggcttgagtttactccagcccagaaggaagtctttttctatcaggtatctacattattttgtaattttttcgtactttcaattttagtttctgtatcctatagtttgagtagcattaggtgcatatatgttgttatctgatactggccatatgttatttctaagaaatttacctggtactattttaactgtaccttaaatatatggacaagaaaggatttagagtgattgagtgtattaactagtaatcatttgagtagtaacaggtccttacaatatgtgcctccattatttcagctagatatgtattgatatgctccatgccttaataaaaagaaatgggggtttacgagtcatggcttcatagaaatgaaaattgtggtactggtagtgctgcttattattttgaaaaatataatcgagtcgtccaatattaatgttaaaattaaaaggatcatggttgatcttcttatgtcccttaccaactgctgtttacagatcaaccaggctattcttggttctcatggcttagatgtgcagttcattggtgtaaattttcttgaatcattggtaatggtctctttctattgtttctggtattatatatatagatataccatatggttgctcataatttcttcatctcaggtatctgaattctcaccctctacttcaagtgccatgggtctccctagggaatttcatgaaaattgccgcaagtcactagagcaaaactttttgaaggtgactgtaggattgcatttgcttccagttattaacccatcttcctttcgtctgtgaaagaataatagcctatgtggagggttctgttactaaaatagattgtgttgtttactttctatgttttcaattgcagagtttctatcagtgggcacaagatgctgctttgagtgttacaagcaagattattgaatctcattctagtgtccctgaggttaaggtttgcaatgctacactgcgattaatgcatcaaatactaaattgggagtttccttacagcaaaggtggcacaagagccagcattaatgtattctctgacggaattagacctgataatgcattatcaagaaagacagaatgtgtaatagttcaggtagctaatggttatatttaagatttacgacaattgctcattatcttgttgaaattcagaaagaccacatgctagcatgtcagattttatacttgtttaccgttaaaacactttcgtgagctcttcataaatctcaccttcagtggtgctgattgcagcctggagcttcatggtgtgatgttttgctttcaagctcacatgttggttggctgataaatttctattcttcggtgaggcagaagtttgatcttgaaggttattggctagattgtcctgttgcagtctctgctcggaaacttatcgtgcaattgtgctccttggcaggggaaatatttccatcgagtgagtgttatatgcttttgtattttctactaattaatagaattgctgaatgcgttataggaacatcaaatttgccaattatctagtttgcatcattaatgaggaacgatggatgttcatcacgtttttcttatcgagctatatatttatctgtgtgtgacttgttcaataatttagacaatgtgcagatgcgtgatcaacatctgctcctcctgctgacgggtgtgttgccctggattgatcctcctgatgtcatttcaaaggaaattgaagaaggaaggagtggaaggtgagctgctcaacattcttttcctgtttgatttttgttgtcatatattccaagtctgacactgtgttgttgaacctttttttcagtgagatgattgatggttgccgcgcattgttatctattgggactgttactactcctgttgtctttgaccaactcttgcgatcattaaggtctttggcatataacctttttagcagttaaaagccatttggtgtttctttattcataataaagttgttctttctgtttcttcaggccctttggcacccttacactcttatctatgttaatgggtgaagttgtcaaagtactaatggcgaatagtactgatgaagagacttggagctatgaggcacgcgatatcttgctagatacctggaccacactccttactgtgagtatagttaagatttattttactactgctgcatctatccataatatcatgaatcactgtgtttatgaaactgtgccatatctggctctctgggggtactttgggcattttctttgtgattgtcagggtatttataaagaccgatcattgtctttgccaacaaattttttatagtctagaagaatgattcatttaaagtaaattgtgtcctatgagatactagtgggcactatttgaccaaaggttgtgatgactcctgccagtcaatggatggttctgggggtaatgcgtggctaccacctgaggggatacatgctgcagctagtctcttttcattgattgtggaatctgaactaaaaggtaaaggtttccagacttttgacctctgctttacaacttttgttggtttggaactcttttctttatcaaatctatatacaagctgaaagtttgtttctctagtggcatctgcgtcagctactactgaagatgatgctgactgcctggcttctgtatccggtgagcaaaataaatgctgttattactggttcttgatctagtctttttgcagccagtctgagaaggcaggctttgtgctatcctttattaactttttaatattatgttctggcagccatggacgaaagactaggctcttatgctctcattgcaagggcagcagtcgatgctacaattccatttttagcaaaacttttctctgatcatgttgcacgcctccatcaggtgctcttgaacgaccttcctttagaatataagcgaaagcaacattctttcatctaccaatcattcttcttttcctttttgctcttagctatttatgccttttgtagctaacatatcaatatatacctacatcaaagcctttttagcaattgattagaaaatcttgctctatatcgtttttttattctttctagtgtgcacgagttagtgatgtgtcctgagaggttgcttttgctcatcttaatctacctgttgtagggcaggggcactgttgatccgactgaaactttggaagaggtctactctttgctgctaataatcggccatgtacttgcagatgaaggggaaggggagactgccttggtaattctttaactttcctgcatcctatccacagtaatcacagaaagaaagatgctgacaggctttcgttccgttaatttctgaataccttcatctatcaataaataagaaacttattattaccagatatatcaatttcaaacggttaggtcttgaaactatcctttttcttaataagtaaatgaccagtttcaaacttagttttcacgaggcctgttataattctgttttttcacttgtaaattcttcccaagagtaattacgagatgatgttatcaactaccaggttcctgatgctttgcaatctcattttgtggatgttgtagaggcaaacaaccaccctgtcgtggtactctcaaggttagcttatagaagcctttcacgactgaacagatgagtgaacttgaataatttgatattaccaacaatagatgccttcagttttcttgtgattctaaattactaacatatctctttttgagtgttgaactgtttctaagtatttataagttagtcttgaattttacttgagatactagaggcatactaatattcaaattgttgtgcagaatttttctatgaacagtggctatgctcgttcattatcaatttagtaacatcgatagtctttttcttctttcttttcttaaatgtagctcaataataaaatttgccgagcaatgtttggatgcagaaatgagatcatcgatctttagtcctcggctaatggaggtacttttaattcctgaatttggtaaattatgactgtttcgaaaacacagactcaaatgcataaaatttatcatggtcattaagcattacaagaagaaatttattacactttggtacctttgtcctatatattgattttgggaaacatatgtaggctgtcatatggttccttgcaagatggtctttcacatatctattgctcgttgaagagtgcaatttgggtagcaacaagcttcagtctctaccttcaagagcatgtttatttacgtatttcaacgaacacaatcaggggaagtttgtccttgatataattgtccggatctccttgacatcgctcacatcttaccctggtgaaaaggacttgcaggtagtaatcttttgtccttctaaaaacattatgagttttgataacccttgagtttatacaatggtattttactgtgtacaaatactatttttggtctgttggatggaaatatcattcagttagttgtttgactttacaaattttgataactaaaggactttaggccatggaatccatatagctacagcgagatttcttttagggtttaatgtgaattttcttagaagcggtaggttacttaactcccatttcttcaagaatggtattcccctaatctttttatctttttcgctctctgcaggagttaacatgttttcagttactgcatgcacttgttcgacgaagaaatatttgttttcaccttctatcactggtgagttcagaaactcaccatagttgggtgtaaatggggccgatttctgtatcttgctttgtttccaatacaaatgaaatttttaacttcgtcttctactcctctattaatttttaccacttgtttttttggaatccacaatcatctctctgtgggtaaaatggctgcttcgacgaagaaaagctgttttactgggaatcactcggcttatattttttttatccactgggaaaaaaaatcgttttctttagaattcttgtagatgcacatattctgtttctttagtatctaacgttttatccaaaacattcaggactcctggcgtaacctggcaaatgcttttgcaaatgacaaaacattgtttttactaaatagtgttagtcaggtatattcctaaagtctggattttggcccttttatattcatgcctgttctgtttcttaaaatgatgttacttctattcagcgttcattggctcaaacccttgttctttctgcttatggaatgcgaagttcagatgcatcaaatcagtgagttacctaaatctttgcaattcgctcacatcataacaacaaattttgcctgaccaataaccttctttctattttcgaaaagatatgtgaaggacctcatggctcatatgacatcatctctagtggacttgtccaatagtagtgaccttaaaaatttggctcaacaacctgatattatcatgctggtgaggaagaaaacacgtgaaaacttagatttagttattggtaaatccttataaacagaatggttctttcgtatttgtgttaggtgagttgtgtgttagagcggcttcgaggagcggcaagtgccactgaaccccgaacacagagagcaatatatgagatgggattgtctgtcatgaatcctgtactccgtcttctcgaggtttacaaacatgaggtactgttcaaggcgcaaatatagtgatcacatgttattcggatcatgatgaagtctatatacttgatatttcagtttcgatggtgtactatattctacctgtcttcaaaatccttgcggttggttttttagccattatggtcagaaaaaccactaatttattgttattgcttagtctgcagtgatatatcttcttcttaaatttgttgtggattgggtggatgggcaattatcttacctagaggctcatgaaacagccgttgtcattaatttctgcatgagtcttctacaaatatattcgtcacacaatattgggaaggtaaatctgttcccctatctcctccttacttctctcttcagactgagcgtcattgtttgagcagacaagagaagtttttgtgtaccctcacatacacttgctttttttttacctcagatatcattgtctctctctagtaccttgcttaatgaagcaaaaaccgaaaagtataaggatttacgcgctctgcttcagctactttcccatttgtgctcgaaagatatggtaaacgttcttgctttcacgtactgtagaaaatatataacacattcaccagtattccttatcttctaacaactggtattacctttttgcaggttgatttttcatctgatagtattgagacacaaagtacaaatatttcccaggtaaaccaagttaattatgatgaattctacaagaatggtttgtgtaatttttttaacttacaggtggtgtactttggtctccatataatcactccacttataactttggaactcctcaaataccccaagctttgcttcgacgtaaggctttgcatcaaccattgatcaaacctctcgtagtactttactgttataattctcacttagcaatcaaattctgcagtatttctcgctcatttcacatatgctcgaggtttaccccgagacgctcgcacaactcaacaatgacgcatttagccatgtacttacaacagttgactttggtcttcatcagcaggtgaagtaaaatcttcttgtcagacatagtaagcagaccattttgctcttcttttacagcaatgttaaagcaaatctatttattgatatgctcatcaggatgtagatatagtcacaatgtgcctgagagctctaaaggctcttgcttcatatcactacaaagagaaaaatgctggcaactcgggtttgggttcacacgctgctggacacacagatccaaatggagtattccatgaaggaatattgagtcgattccttcgtacattgcttcacttccttctttttgaggattacaggtattaaactctgttcaccaactagaagcgctctctcgaatggtttgcttaaagtgttattaccggtttcttgttacagtaccgacctagtcagtacagcagcagatgccttgttccctcttattctctgtgaaccaaatctttaccaggtcagtattttattgttctcacttaaaaaagtaaaccgagtttctatgctttaaacagcagtaacttgaaagtctgtgctacatctagggattgggcaacgaactgattgagaagcaggcgaatccgaactttaaaactaggctagcaaacgcgcttcaggtgctcacaacgtcaaaccagctatcctcatcgttggaccgtctcaactaccaaagattcagaaagaacctcaacaacttccttgtcgaagttcgtgggtttctgaaaactaggtgaccgaattttagaacttatttgctttttttttgggttgtaaaaagaatttacttggtagaagtggttttttccgtttgtaacaattaaattttacttttacaaatgcgaacttaagaccaatgtgatcatctcttatagtttagaaaatgtagtttagtaaaaaagtaatcaatacaatgcatgaattaatatgtatgtcttacaaaatactttttcattgaagccactggggcaagatttttcttttggttcaaaaagctttgcatttggtcaatttacagtttatgttagaaataaaaattatctttgaccaaattcaccagagaattttaatacatattccattaatttccaccataaatatttatctataaatattgaagatcagctaatagtgatataaaataaattaggtaaatttgagaccaagaagttatttaatttgtattgttacctcttttttaagtgtcttaattagtcaatagttgttttaattttaacatttctatttattttttaaatcatgaatttgatattaaataaaaatgttatgttttgctcaatttttgttttttttttccttatgttttgcttaaatatatattaaaatatatttataaaaccgtcacttccatcaaaatcgaaactggaagaaaatttgagagactaatttgaccacaataatccggcacattataatgagagtaaaataacacacaataatccagttatatataaaaagtcttactgtatgttgaaagttatgtacaaaatattaattagataatgatttacatattaaaaacctcggacattggtggttgtctgtcggttcggccaatgacattgtacttacaccagttggctattggccgaccgagatctttacttgcctcaacaattatgcagaagaggtgaaatggggcggtgagatagtaaacgccaatttatctggccgacacacgactactcagatgggatctggatacctttcgaatagtgccaaaactgcttatatgcgcgatctggaaatcgtggttaacaaccgtgatttccagccgattgacgattttatagtgggagctacgaacaccgcttactacgatgccaagaagtcaagcaacacgagtttttcatacaggggacctatgcatgcaggagcggttcacattattcttgattcgacaattttttttttttgcatcagtcttttcttgtttttttagatttttttttttttttcaatctctattcagtttgtcgttgacaaaactcaataatgtttactttattagtttctagtgattgcctatcttctcctccattcacccaagtctgatagtcgtcaaagctcctctaataaatgcaattagtatactcaaactgtctacatattttagtctatcgttgtcaaataatatttacatacatatgttacatacagaatcatcacaacctatgtgaaaaatatatatcaaggcggattcaatgatgttgccagatatctataatttctccatttcgcataactactctttgtctctttcgctacatatgttaattttcagttttttttttttttgtagtaaaagaaaccatgttatgtttattagaaagatcacttttacaaagaagaaaaatatctacaacgcatcaataaattggtgattaactttctttgcattagacgtattttcacaaaacaaacaccactgaattgctatgtttagacccattgctagccgattcacatatttagggcataatttgttgagctgttaatgtggaatatattttagaaagtttaaagaaaaacaataacacaaaaaaagaaggaaaaaaaaatgactttgagtaacttcaggaaatgtgagacattttcgtaaaattaaagtgttactggtaaatttaaattacagattggagtaaagtatgtgtaacgaaaacgctgataaagaacccattcgggttataacatcaccttagaagatgtatgatgcctagaaattccaactctttctttacataactaccaaaaaactatgttagatagtatacatcttctttcttataatcgatccttaaatagtaatattgattttcttgtaatatgctcagaccacttgaacgttttaatggagtgaaaaagatgtaagaaaagtttgtgctcgagcctattgtggacacacgttttcataaagtaaataccaccggttggggctaaagctaaacatagcagcccaacaatacataaccataccgttttcaacaaaactaatgataatgtttgttcatttatatttatgagtaacaggtttggaaattttaagccacaaaaataaaagagatcgtcacttgtgaagtatgctcttcttcacagttttttgcttcttattgctgtgatgctgcatttacaatcaaacagagaaccatcagttataatcaagaattagatactcataaaaataaaatcctttgcaaatgtatctatcaaaacgttcgagtcaagatacttgccttttgtctttcagcagcctcctgatctgttctctctttccagctactctttcgtagttttatcggacgatttccaacatacttacctgtgtattcatatgaaatcagtggaccaaatcagaatgttcaacgacagtgattatagaacagaatcatataacaagttctgacaaaaacagtgagatgagatatcaagatgaagcaacacatcaaacagaaactaaaaacaaggtgcttaccattcatttcttttaaggctgctgctagatccgcaggatttaagaaactcacaaacccataacccttggttttaccagtccgcttatctctaatgacctgtcatggtaaataagactcttatttttctggtacgagtttgaccacaaaactaacactgaatacttatctttgtgattcgagtaagaatgatccgtatgatctaaggtcaaccatgctctgttctgaacatactatgtgttttggtttgcaaatgcatcacagttgactacaatcacatgactaatgttctcaaatatatgttcataggaaaccagatatgaataatcactaaagccgaaaaggaggagagatatacacagttaccttggccatattgaaggtggggaatctagcaaatgctttggaaagaacatcatcattcacttcgttcccaagatcaccacagaacagacgatagtcatctgccaaatgttagaaagatataagaaatctattttaacaacagagaagaaaacatctaaaatcctacctatgaacaactatgataccatcccgtaaactaaaacaacaatcagcaaaatcaagggaaagaagaagaaaaagacgagcagagcttactttctggccattctgaaagagtaggatcctcccaagactgtccagcagctttacgaggaatggctctctttttagtttctgctttgtgttcggtttcactacttgccaaagcagcttttacattctcaagagcttctggtgtaattgtctgtgcatctctttggaacaattgatgtgcctgccaataaatacaaccgaatcaaacaacaatgaagataccaactttctaccttaaacctaaacttggcagaaatttcacaaaacaagtaaaatcaaatccaaagaacaaatctttaactgtaaaacatgtgagatccatgagtgacaagcattacacaatcataacgagaaacttcaatatcaaaaacaacattaaacccctaaaatcaaaggagagagatttcgcaaaccctaattcgaacccagaatcataaatacacaacgccacgaatcaaactcctgatttttcaaatccaactaacctgttggtactgagggtaagcgtagacggcaggaaccggtccaacaggctgaggatagaccgtagctccgggaatggatgccacaggcgccggtacagcaggcgaaggcgccgccgcgtaaggctgtggaggctgatacggagcggaatagtaagaattagctgcgtatgtgtactgagacgaggaagatgaagaagaagaacctgaagatggtgggattgacatcggagaagcaaatcgccgaatcgcaaaatcgaaacctcaaattttgtttattctttttttttaatttgttttcccacttaaattggaaatttacggttttctaattattgggctgaggcccaatagtatcttcacaaaaagcctatgggttcctaaatcagacgagactacaccaatagacgatcaattgagaacgtggctaaaccggattaaacctggttcaatgttattcactaagtagtttaaaccattttaccaacaacttttctggtagcttttaagttttaaccagagaatctgaaaatatttttgaaattcttagaaatattgcacaagtactacatttatataaacgacgactctgttcaaaaatgtgcaagaggatcagaaataaatccaaaagactgtataacaagggccctcccaaatagggaataaccacatgtggtgctaaattatgcaaaaaaaatcataatcttacaacaaaatgtttaaataataatatttcttacagctacattcaaagcctacctcgtacggacacatcattttcatttgtccacgtttcttagtcccctattagcctgagccaatgtcgacgaaactcgtccatacgattttaaactcttgccttgagtgccccgagaccaaactgttctattctacgttgcttttattgaagggggaaccacattacagagatgagcgcaaaaccggttacatcactgtttggtaatcaattccaattcgtgtaacatcaatttatacatctcatatactatttgtcaatgcaagttaaaaattcgaactcagagtttcaactatagttacagataataatttaaatagatttataacatctttcaacaaaaattgtcgacaatgcatatcacaagttcacagcccacagatccaaaacggtaggtcactacatttaaatgtcactgttggtaaaagcaaagagcatccgatcaatatgttaacagcgacgtttctgaatttaaaacacaagcgaaaaaaggaatcaatccgtttaatatttttgtcttttttacagaatattatatgagtttgaaatcgatagtgacatatcaaacacataattttgtgagaaatatgttctgatgaaaatttttaatattctaaaattgtcaaatcgacgttccgctaataacaaattgggaagaaatttgtgtaacaagattagctgtcatcaataattgaaactatgatcatattttgtctttttgcaattatagatgcgttttagatttgcctttcaaatttcaattttgtgcaacattctctcacacactcatgtttagtcaaacatcatattggggaaaatatactaaaccaataaaatacacatttcgatatttttctcttagctatgcggccgaaacaagaagttaacggtgaacacattaatgacatggagatgaagaaaatccgtaaatatattagacaaaatatatgtatcaaaaataatctgaagaaatatagccgtttaatttatcagaaaaataattgtacgttaagcttcacgtttgagtggatgaaattgaaatttataagtatatgttcatgcatagtataaaccctaacaagtaactagtatattatattcataattatgaccttacagaaatattaaatctaacagaagtcgtcatatgatatcgatcgatatatcacttaattaatatccaagctgacaacaaatatcacttcatgttcatgattcgaattttataaaatctcgattatcatcaattcatcatctagacaatataatatataaaagaggccatgacataatcatatataagccaaataaaatccaagttcttttcatttattgattataagaaaaacaaaacaataggtctaattaagaaacaatgatataaattaacagtgggtggaggagaatagggattgcgttacacgaatacaaaggttgatacgtagatataaatagctagatgcgagcatacataaagttatacgacattattgagttgcaccgtggtggtaattagccatcatagactgaccttgctcctgctgtggctgctggggtaaaggcggttgggactgtggttgggactgagttatttgcttgttgttgacccttttcctcttcttctcatagctaacaccacgtgacttagcctggaaatctctaacctccctgaggaaaatcctgacggaccgtgagccaaaagggctagtctcgggagcgccaccgttctcctcgtaggctgcacggagacgaccaatgagggcgtcgagtgagccccaggcttgtcggagaggacaaggacaaggagccggtggatttgggaggccaaagaaggcgcagttttggtggtggactttggttttgccgaattggtcaaggtaacgcagaaaatcgaggacgtgtgcgccactgcaagaagctagagagagcggtggatggtggtttctgaggtattggcagaaagtgttccagtcacggcgtttctggttctcgtagcggctagaggaaggtggagaagaaaaggaagaaggggtttgcgtcgagagactggtattagggtttctgttgttgtggttttgagagatcaaatccatagctttttagatatgtttccaaattagggttctttctccagatcgagttgagtgatttagggcaaagattaggttttaagttatttataataaataactttttctggttaaaggatatatataataaataactaaaaagagagatagaattagcacttggctacttccttgtactgcaaagtggtgaggtaggtgctacaaaaaaggatagattcagtgatgatgatgttgttcaaatatggtgaggcaaagaggaacaacctgcaaaataagaagagacctcttgcttttttgcaagatgagagatataagtagaagaaatcaaagtgagattttttctttctttctccttttctactgttgtcttttgtgtttttcctcttttctactatagaatgagaagatggatagaaaaatacagacacaaatgtccatatatatagctgcataaacatcataataggtcatttatagagaaagagaaagagatgagagtcgtgagactgatcatcagaaatcatatattttccatttaagacacaaaaaaaggaagagaaattaaagaggagaaagggacttattgttttacacagtgtataaaaaggtaactctatagatgagacttgagagagagacagagaccaatgggtcgtctgaagaaagagacaaatatttgtatgattttttatctgtcactatttttcttactttttatttttcaatccgtgattccggacacaaactattagcacatgaggaataatcggattataaagaataaattattgggttataattggttatttatatgtataagtgaatttgatgaaagagttttctacttcttggttaaaggttttcatttgtaaaccaagaaaatcgattcaaatacaaccttattctgaatgaagattcaaatacaaccttacacatgtccaacgagtgaaattacttaaaataataacgccttctcttctcttcacgagtgaaatattttctgaaatatatcgaaagcaattaatcaatgaatgaataaagcgtagcaaagaaattaaaaatatcaaagcacatatcagtagatgaaagcaaactacatacctcaaagcaagagagtacatattccacgtcgacgtctgagatttggtggtgtagaacaatcctgattctgtattaagagaccataaactccaagttaccattaattacatccaaattaaattccagttttatcttattctatgtggtattacatgatcataaaaatgtaatatatatatcatatgtacgcgtacctgaatgtagcttggggtatgacaagcacaccgacatcttccaagctcttacatgcctcttctgctccaaattttggatcttctggtatgtctacgtatatctgcatatacgagtttgttatatacgaaaaaaaaaaaaaactcgtaaccgttcaatccggttcagttcttaaccaaccaatcattcatttcaaacacttacgatgttggtttccacagctgcaacgttcactcttaaccgttcaatccggttcagtccttctggtgatgaagaaaaccaaaatggaaatcaatcggttaccactctcgtattaaatttgagattccggataacagaaaaccaaaaatccggtatcaatcacctgccaaaaccctggctttcttatggtcatcttcgagcttggcgacgttttcatggagagccaccaatgcggcggcgcagagcacgccgatctgtctcattcctccgcctaatgttttccttaaccaccttgcctgcatttcaacaagtaattacttgaaccggaattgaaaaaaaatattgttatttaaccgtctcaatttgatttataggtaacgtactttagtaatgaacttcttgcttcccacgattaccgaaccgaccggtgcaccaatacctttcgacaaacagatctagttgtaccaaagtgacggaattagatttcaactgtacattgagagacgaaaacattaattagaccacagttttgatgatgagtcataccgagacagaatcagctgcttgaacaatcctcttcacgggaactccaagtgccttcaaaattaagaccgaaaagatgcactcataatcttcaaagcatccatacacgtatacgagtaaatgaaatcagagaaaatgcaaatgaaaacgaattatgtgtatactaaccacagaagcgttgaaaatcctagctccgtcaatgtgaagcttcaaaccatgtttcttggctaattctccgactttgtctatatattctataggaaggcatctacctccacaactacatcaacaaaaatccggttttgtcaaaccacaatgagtttatcgaaccggaaaatttaacacgaccaaaatactagtccacaattaatattcttttgaacaaccatgaaattttagaacatttggtcatatttgtgggacggttctatataatacttgtaagtttgtaactcatttctcttcaaccagaaatgagacaaccctaatacataaccggttaattacgaattatactctacaataatttcatttttctattattagtcctctaaaagaaacctaaaataaacctctacaccaactttagctaacacatgttcacaaaacattatgaaattataattaggctttgtttttatttgcttgataaaactaacacttactttgcttgagtattctcaagacatataagcttagtaaccggatgatggagatctcctttgggactcctcacggcagcttcaatagcaccaatctccatcgtaccgtcttcctcattcttcaccgtcctcggatgcacaccaccgaggcttgaaacgccgccgttttcatatatatgaatgtgagagtcgtctccaagaatcacttcactccctctctcatcacaatggaccaacacgcttatcagattccccattgtccctgacggaacaaacatcgccgcctcttttccagcgatctcagccacctctttctccaaacgcagagccgttggatcgtttcccaaaacgtcgtcgtctacttccgcgtttgccattgctgaacgcattgactctgttggtttagtcaccgtgtcggagcggagatcgacggttctaattgtagttggcgtcaccatcttgatttggctcactgcgttggattataaccaaaacattaaataaaagatcccattagaatgaaactcatctaaataaatataaagtcacttgagttttacttaagcatacctagattctgttctgttaggctatgctttttgttttcttggcgaagagataaaaagagatgtgcttcgggtgactcaaatggttgagagaatgagtgatcaaatcaaatacgaaatgacgacagggaatcttatagaaagaagatcggtccaaccaaataagtgttggatgcattatgacaaattggtaaagtaaggttttcttaacgtttttgcctaatttcttaacttatactgtactagtttccttgtttttcagtctatactttttagttgtatgtaagtaaataattctatgataactatcaaaataaaagttatgatagttaatattaaataaatcaatccaataaacatattaattttttatgatcgcaagaaacaattgttatgttattggtgtaatgttttgtattcttcattttatatattcatattattaaacattattctctatgaattttttatatatatagaaaagttacatagtgtaaattatatattagaccgttgttctagtatattctaatctggttaataatgaacgtttgcgtggcctaatggataaggcgctcgcctccgaagcgggagattgtgggttcgaatcccatcgcgaacgtagttttttgttttcagcaatttgcttatttcgttgaaacttggataacaacattcatatgtggctcttagtcgacgaatatgtatgcgtcggctaatttggaaaatctgatagcggcatcccaataactatactcgtaatttagcaagatgattacatgcataaccactctgacttataagagcgagacatgtatatagtgtagagtgtacatacgtaagcaaacatcaatcaattttgtcttgattggtgatggtatattcattttttatgtagcatctctagatgctttcggataaaggtgatatgaatatgtttacaagaaagagaaagaaaatgatatatttctgaataatgtttttttggataaatcctcaataatgttgtttcgaatctatgatctctacaatattattaaacatatatacctacaaatttagcatctatacgggtaagacgaccattcatatatataagggatcatgaagacaacacaaataagacatccacaaataaattaataagccaacttggtcttaaaaatcaggcatcttattcttaacaaactttagctgatcgattagtatttgcactaaccaaagaaataataatttagtttactaacataattgcatatatatatatattatacaattagtagagtggctataaagcatgccacatgcacattctttaatggacagacatttgaatattgaagagtttatcgtaaactaaatgtcatttgaaaactgctaaaggtcttttattttatatactcacataatcacatcaagaatatgacttattatattcatcgtttttggtcgataataatgattctttacaataaggacatgttgagcatgtttataacttatttaatttgactcgttgaattgttattattttgttaatatgcttagattccacatctaaaataatatctaatgcagatcatatgtaatgcacattaaaggttttacctccgataatttaatattccaattaattaatatgcaatggcagtgtaactaacggcagccgttagttaatggagtcggttgcttgcttagtttttgttctcgaagcttgacttttgaaacagaatgctgtttaacctccttaaacggaatattctcttttttagtactttgattctattcctctatataaacctctctctctctcacgaatcagagatacgaagaaactaacaacaacaagaaaaaaggaatattccgatgaccagagaattcgaactggaaaacaactaccagctttgcgacgagatcggcagaggtagattcggaacaatcactcgctgtttctcacccgcgactaaagaattctacgcctgcaaaaccattgacaagcgcgtgctcatcgacgcattagatcgcgagtgtatagagacggagccgaggatcatggcgatgttaccgccgcatccgaatatcatcaggatcttcgatctctacgaaacagaggattctcttgcgatcgtcatggaattagtcgatccgccgatgacgatttacgatcggttaatctccgccggggggaggttatcagaatcagaatccgcctcatacgcgaaacagatcctcagtgcgcttgctcattgtcaccggtgcgacgtcgttcatcgggatgtgaaacctgacaacgtcttagtcgatctcgtaagcggcggtgttaagctctgtgatttcggatcagcggtgtggttaggcggagaaacggcggagggagttgtgggaacaccgtattacgtggcgccggaggtagtgatggggaggaagtacgacgagaaggttgatatatggagcgctggtgtagtgatatacacgatgctagctggagaaccgccgtttaacggtgagacggcggaagatatatttgaatcgatattgagagggaatttgaggtttccgccgaagaagtttgggtctgtatcatcggaagcgaaggatttgttgaggaaaatgatatgtcgtgatgtttctcggcgattttctgcagaggatgctcttcgtaagtcatcttttttttctcgattttttttttttttttgagtttgctcatcaatttgtaatggtgaattgcaggacattcatggatgatgaacgttggaaacctccaaagcaattagtcgaagcttttcagatatgtgattagagagtgtaattagagaagtcgtaatatagatgtgagtgtgtaattgtttgattcgaatagtcaaacgtagttgtgtgtttcagcaatcttcctacgttttgtcactagagaaagtatgttgaaaactttttgtaacgattcgccagattcagaataaaattgattttgagatcattgttgagagttaggtcaaaatctgaattcgattatttgctccccaagaaacaaaaagaaaagattactatggttggtaaatctgggccagtagaagggatctttcggaaattgggcctaactgatgaagtttagatattttgggctagatttgtcgaattttggggcccgtttcaggctaattatgatttgttcgagaaaaaaaaggtttcgaagtcaatgcaaaggcaaatggagttcaattattctccagacctggttttcacattaactaatactcaagtaattcgtctagactctaatgtatactagggtttttaaactaaaagggacatttcgtttttaaaaacagccgtggactgatttactaaataattcttttctatataaaaatatcttatagccaaaataaaatattattagtatatatgtgaaagaatatccaccaatgttaagaaacaaatctttttttaagtcaaaataaaatatggttggtatattgatatatggaagatacatcaatggtgagaaagagaaatgtcaaccttgaacctaaatgttctataaattcatcttttacttacaatccagaaaatcacaacatcttttttgaatagattttatagctgatacaacgagcaagagaaaatggccatcacaaagacttcagtgactcttttacttttaataataatggctgcttcgttgtctaatttcagcgtcttggcttcaggtatgtttgaaataattctatgctgttaatttcttattaggtttcatcacttgaaagcaatgacattgatatgtatgtatgtacttaaatcatgcatatatatatatatatatatatatatagtcatatagatatgatattcatgttgtgagtttgtggacatgcagagatcaaacctacaggaagagttgataatcaatgcaaggagatgtgttcggcaacgtttggggacggtaaatgtgccgcagactgtaggaaggctggtttctcatccggacgatgtcttacttcttctcctttcggaaataaatgttgttgcacctagtgatagctagaaccaatctatatgactatatgagttttctcttgttgtattgccacatattataattgtactgcaatagaataaaataattttattgttatatttttctttaatcatcaaaagtaggagctacaattacaatgcacgagtcgattaacatactcttatgactctttaactactcaattattacgtacgagaagttttctaaaatttcaatactgaagtggtgatattgtttacacaacgcaatgtcaagttttttcataaaaaaataaaataatcataaaaatatatgtttgcttgtgtttaaacaatcctaaacattttgtaaaacttcagaataaaaatgattaatttcaaattatgattgtcagttaggtcgaaatcccaaatcgaccatacccttatcggattggactttagatcttttgttaacaatgacgtgcataaatgaattatgaaaagttgagttaataaggctttttttgttcctgctctaaaaagatggccaatattgccagtaaagaaaagaaaacaaaaagaagcaagcaaataagtgttaacattcatggcttaactatgatgaatattgatgattacttttctatatccaacataatgatacctgttacttacattcataaacaagtttgaaaaaatcgcctagagatgctagattagtttagttattgcaaggagagatgagccattgatgtatgggtgaaagctcgattcgattagtcaacgtagctgagaaagttaagttggaaacattattttgtaacgtttcggaacaaaaaggatcttttgggcctatctagcaaatttgtgggccgttctcaggctaattatggtttgcttataacttagttattcgcatcactcctacgatttgttctaggatctgtggtcaaccttggttttgaaacaaaaagggacattttgtatttcaaaatagccacggattgatttgttaaacaatacattttacaaaagaaaaaatcttttagtcccaaataaaatgttattagatacatgtggaagatccaccaaatccaatgttaaggaaaaaatctttttaaatcaaaataaaatattattaatatagaaagatccatcaacggtcttcttttctacaaccacaataacctaaaatgttgtataaataaagcttctacttacaatctacgaaaacacaacatttttttgaatagattttatagttaatacaacgaggaagacaaaataatggccatcacaaagacttcagcaacgtttgtactcttaataatattggctgcttcgttgtccaatttcaacgtcttggcatcaggtatctttctaatttctacgtactttaattgtagttaggataactttatttgaaagcaataacattgatatgtatgtatgttattattcatgtggtgatattgtggacatgcagatatcaaacctaccgggagaattgataatcaatgcaagcggatgtgttcggcaacgtatgggaacggtaaatgtgccgcagactgtagaagtgatggtttctcatccggacaatgttttacttctccacctttcgacaatagatgttgttgcaacaattgatcgaaatcgatcttgtttttgcattgatctatgttttctttttttctgttgttgacttgccataatacgcaaatggaataaaactataactttactattttatgctttcaaaaaactaaaagtacgagctattattagtctatcaccatgcacatgagtcgatttaatttgcagcccactcttattcctcgtatcatattagtcacttactacgacaagtttaactttggaaacctccaacaaacctatttgagactatgtggtttcgatatgattagggtttagagttaaagagtggcatcagataccgctgttgaggttgaatagtttaattatttgtatctgaactataaaaacaggaaataaaatattttaaatctacatatttgtaaagaagaaatagaaaaagtcaaaaacaattctgatttgttactataatttcttccaggctccactaaaaataaaaatatcttcttcttttttttttttttttttgtaaaagacagaaatatctaatccggtttatacgaatccggtttaaaatcggtttggttttgttacaaagataagaccagattaataacatcttcgtcttcacacactctgcaacacctctcactcaaatttcattcaccatgttctctctcaaatccttaatctcctcacctttcacacaatccaccactcatggattattcaccaacccgattacccgacccgttaatccattaccacgtaccgtttccttcaccgttaccgcttccatgatacccaaaagatcctcagctaacatgattcccaaaaaccctccggcgaggcaacagctctaccaaccgttccgaccaccgtcatctcccattccaacccaattccgttcactcgactccgccggtaaaatcgaaatcctcgccggtcgaatggctctctggttcgaatacgcacctcttatctcttctctttacaccgatggtttcactcctccaaccatcgaagaactcaccggaatctcaagcatcgaacagaaccgtttaatcgtcggtgcgcaagttcgtgactcaattcttcaatctatccatgaaccggagctcatttctgcgttcgacaccggtggtgcagagcttctatacgaaattcgtctccttagcaccacgcagcgtgttgcagccgccacattcatcattgatcgtaatattgattcgaaaggagcacaggatttggcacgagccatcaaggattatcctaaccgtcgtggagacgttggatggttggattttgattacaacttaccaggagattgtctttcattcttgtattacaggcagagcagagagaataagaatccatcggatcagagaacctcgatgcttctacaagcattgggggttgcagaatcagaaaaggctaagaacaggttgaacacagagctatacggggacaaggaagcagagaaggag
